United States Patent Application Publication US 2009/0018031 A1 - sequence listing, part 18

SEQ ID NO: 9375 - DNA, 6000 bp, Homo sapiens
aggtgggcaaaaggaggtcagggggatgcagccgaccgagtgaaaaggcagcagagctgagcagcgtcacctattttgacgcctgttatctgagtgtcaggctatggcctcgggcccggccctggcttccacactggtgtccaacgttaggagtgtgggcaccagggcttagacaagtccacgagccacgcagaggcagtagagctggtctggcctgcaggcgcaccccatgtacccccacccctgtctgtcgctttgatcacccattctgaccccttcagtggctcgttgagctctgctggaggtgtggggctgagagccatggggactgtgtgtggtgcagtcgaggagagccccttccctccaagggtctgtcccagccagaaaatgctccccgtcccgcagcgtcaccagtggctacctctacgtgaccatcatctacaacatctccgtcagcctggccctctacgccctcttcctcttctacttcgccacccgggagctgctcagcccctacagccccgtcctcaagttcttcatggtcaagtccgtcatctttctttccttctggcaaggtgagccccctcccagcacctggaggctgcccatgccaccctgtcctctgcgcttcctgctgccccttctgcttatggtccctggtgcctgtagggcctgttcagaggggcctcagcccactgggcacttgctgggggtgaaatctgagccctcgagggcctttcccaggggctagggagagctttggtggggccgctacatggatgagagggcccaggagaccctgcgtaattgctggcatctcagtttcggtggcaaagagctgggagagtggggtttccggaggctgtggccttgtgtcgctacccctgccctgcaggagcagctgtggccctgctcacatcctcactggggcatgtgggcagctgaatggggcattgtggaagaagggggagcaggaaaggaatcattctgggtccagacacccgtgcctccccatccaggcatgctcctggccatcctggagaagtgtggggccatccccaaaatccactcggcccgcgtgtcggtgggcgagggcaccgtggctgccggctaccaggacttcatcatctgtgtggagatgttctttgcagccctggccctgcggcacgccttcacctacaaggtctatgctgacaagaggctggacgcacaaggtatgagccagggtcctaggcgacccccgctgggagaagcagggagccccaaacatcccaggaccctcccacctcccagcatcctacaggtgcggctgggtcaggacatgggatccccactctatatgcaggaatggggccacagaggtcggggaagagcaggtgccaccagcacgaccgattcggtcctggaagctcaggccacctgtcccttgcagcaggtccaagtgtggcggtccagggctgatacagacagagactgtaatgaatagacaaattccctcgggcttctaactcccaacactgtggttaccattttgtcctgtaattccctcatctcatatgctattttttaaaaaaaggatacttctggccgggcacggtggctcacgcctataatcccagcactttgggaggccgaggcgggtggatcacaaggtcaggagatcgagaccatcctggctaacacggtgaaaccctgtctctactaaaaatacaaaaaattagccgggcgtggtggcgggtgcttgtagtccgagctactcgggaggctgaggcaggagaatggtgtgaatccaggaggcggagcttgcagtgagcgagattgtgccattgcactccagcctgggtgacagagcaagactccgtctcaaaaaaaagaaagaaagaaaaaaaagaatacttctgagaaacagactcggatggtaataggttttaacagctttcttttacacctgcgaatcttcctccttgctagaacagtggtaagtagccccagttgtactggaaaatgccctggagagcttttggaagtgctgatacccagccccaccctcggagatcccgctgtaatgggtccgggctggcaggctgggtgtgctgtgagagttctgtgctttaagcactcccagggtgatgtgaaagtgctgctgcccgggacgctccactgggctggaagggctgcctctggccactgggcagaagggggttgtccttggaggatggggaagaggaggctgggaatgcctgagactgattgagccagtaaaggggcaggagggactggggagaggggagcctccttctctgacacatccacccaggagcctggctgctgccagctgtctgcccgagtggctggaggcaagaaacccacttccccagggcctacctgcaggccccacacaggctccgtggtgggtggtgtggactgtagaaatgtctgcctgcagcggggctccgcggcccacttcccgccccccttcctctgtgccttccctggtgggggaagacctactctgtgcccaaagagcaggtgcacaaaggccaggggttgccacctggtggcccagttggaaggatctagcaaacacacacccagcattgagggcagtgtcccttggacctggtgtggtataccctgtgcccgtgggaacatcatccttgggcctggggcctggggccaccccaaggagcaagggggcccatggcagagaaccattcctgcaccactggggctcagcagaggggctctgctgcctggcctgagctgtccctctagacatacccacgcccggccggggaagctgcttgccctcttctgcctccccactggtcctgagccccctgctaccctctaacccaggcccagaccctcagccctcaggataggcttaggtgcagagctggctcagctgtgcgattgtaacccctccctctgagcctccatgtcctggtctgggaagtgttgtgaggtttgtaaaatgtgaggtgtggatgtggccccaggctagccggggaagaagtggggatgggacgtcctgacctagacgtggaggcggaactcagtcgccagacggatgtttcctgttggcgtgaacaccaggggaggagtcatccctaggtggatatcccccctgccaggccccaggaggcacctggagcttcctgggtgccctgtggggcctgggggggtggggacagggtgtgtggtgtgtcgtgctggtgggcctcggtggtgggcacacattgttcactcagctgtctcttgtcttctctatttctttggcttctctccccgccccccttgccctgcttttgcccggggtttggccgcgggcagtgccaacatacggcccttacggtaggtcccgctcttggtctgcatgtctgtcctgcatgtcagttctggtcactgtcactggcatgcgtctctctgtagctcttctccgtgtcctcatctcctccccaccggcaccccctgggtgggagcgcccagagcacctgtcaagggccaccctctgtagagcttgcctgcttccgtcctcgtttctcgttctggaatatgccccgccttcttctgggggcacagtgctgttcatgggatatcggggcatttcacgatgtttccaagagttcacaagctgagtcaggaatcctgggttccaggggtgggctcgtcccttacatccaggtgtcctgggccacctttctgctctgagcccctgaggatggggacagttgattagagagatgaggaggaagccctcttagagggagccagtgagtcgcatctgctcccctgggggtgcaggccagcctggtcctgatctccagagtagagggagcacagcacttcccccggtggtgggggacgcgcctggcacctgtggaaccgggcacccctggcttccaggccctctggccccacatgccccaacttcagtcagtgctgagcctgctctggcctctctggggcattctaggctcactgcccatagcttgccagtctccaccctgggtcccttccctgcagccagcccagctcccagtgggggtttatgtctgctcctcttcacagtccagcctccccttggggctccccagccaaagaagtccattttttcctgccccttctcatatcctggaccccattctctgtcccagaagggatggttgaagggcatagctttgggttggggggtgtctgtcccaggatcacgggcaggggctgagccacctccctctcaccgtcccagcctcctcacctgcccctcccgctccctgcccggcaggccgctgtgcccccatgaagagcatctccagcagcctcaaggagaccatgaacccgcacgacatcgtgcaggacgccatccacaacttctcacctgcctaccagcagtacacgcagcagtccaccctggagcctgggcccacctggcgtggtggcgcccacggcctctcccgctcccacagcctcagtggcgcccgcgacaacgagaagactctcctgctcagctctgatgatgaattctaggtgcgggctgcagtggcggaagtgctggcgccatagccacggtcaggctgtgccccacctccagcctcaccaccaggccaggaggcagctggcacagtgctcacgccgcctttatttattggaccagaaacactcacatgtcacttccagaggaacgggggacagccaggctcgcccatgggccttcaggaatatttatacatggcccagcctgcactgcccgggcgagggcagaggacactgggagcaaggcttatgcccctgctgcccgtcctgtgctgggggcatgctgggaccagccgcacccaggccccaatgcttgtgtgtggaccagcggctgcagccttctagcccctcctccccgcgagactctcaggctgaggtcggcaagccgtggctcccccacacaccgtgcaataccctgtctgacctgggctcttcccgcctgcatccctcccctgtccacctttgtccagtgctagattcacctcaccccgggcaggagtggggatgtgggcgctctgtggtcctcccctcctgacccaggcctctgtggcatgctgcaaggatcagagccagacaccaggagtcacaggccccacccaggaagggcattcagggcccctgggcaccgcttctgttgaagcaggggcttctgggcccctgggtatccccacctgtcgtggccacacctctgcctgcctcatgccccttccccctggcctaccaaggacagcccacagcccgcactgccggctcacttgggtccttcctcgatagctttgggcagagcccttgcttcctggctgcttcagggctcaggggctcccagccctccttcccaggctgatgctgggtcctctctctctttggggcttctccctcccgtttcaggggaaaggtctgagtctccacgtttcagaccagcttctgggggaaggcagtccggcagggagaccgggaggggtggccacacagtggggagctgggaggtggggggaatggtcccagactcctctcggggcccctatccacacagggcctggtgttctaccccatctggcccctggcccatctcttctgtgccttagtcacatatgaaagcgcccctccctggctccccatctgtcccacacgctccctggggctcttagttcagctgctggcactcgcaggatcctgcagtgctgggcccagagcccttggacaggcctcaggagtggtcaggaccaccaagcccctcctctccccctccacacctctagacctggggcctccggaacccccagcaggctgggcttatactagctcctgacttaggaagagcctcgtgtcacaacacgtgtccctacaggcaaagtgtcctggcatttaaaacccagattatccctgggtttgggctgcagtcacctggagaagctggtagggtaagggagagggaccctgccggtgttcactggggattctttc

SEQ ID NO: 9376 - DNA, 6000 bp, Homo sapiens
caaaacacaatacttaatactttttctggaggagggggcccatgaaagtcacactgggtccctttgagccctgtgtccctcctgggcacgagtctgaagtgttgtgatgatcggctcacatgactgccttctccaccagacagtgggccccgggagggcaggggcatgtcttacattgtcagaacaggcaagcggtaagtatttgctaaataaataaatgcttataaataaaaaaaaaatagccttgattgctagttagtgacagttagcaatccttgcccagggccaggcactgtactgagctcccatgacacagacacattgatatcatccccgttttacagatgaggacatcaagacaatgaaaggttaaacctgcccacgtcgttcaccaggagtgtctgcattccaagcctgctctctggaccactggcccagaatgtccccacagaaggtggagcacctggtggatgtatgaagaggctgagtccaggaggaacaccctggacatggggcaagcaggctatgtcagcccctgagttctggcccatggatcggtgccctcgggagctccagcgctgccccagcctcccttgtgagtgtacagccagctcaggccttcctccatgtgggcagcacacactcagccagctactgtgctcagggtgttggtgacaatgacggctaattggagcttacacctaccgagtgccagctgactgcaacctctgcctgccgggttcaagcaattctcttgcctcagcctcccaagtagctgggattataggcatatactaccatgcccagctaatttttttgtatttttagtagagacagggtttcaccatattggccaggctggtttcgaactcctgacctcaggggatctgcctgccttggcctcccaaagtgctgggattccaggcattcatcactgcacccggccaaaagattagaatgtcatcaggcagagaaacaaggaaaggcgttccaggctgaggcacagcctgagtaagggctcaggagtaggagaggccttggggtgaggccccaggagtgcaggtgaggcctgcaggagatctgcgtctgcaaccacactggggagctggtgatttaagactgggaagctgcagtcaggcagtcgctcgatgaacgtttattgagcatttattaggagccaggtactgtaataggtgtgggggacagaggtgactaaggcacagtcacccataagagtctggccaaatctctgcatgcctaagactgtccccctcagtcagggacccacgttgtgttcctggcaccctagctgacccactttgtaacctggatcccacgcctgcactcctcagagtagccttcttccataaaatgagtttaactgcggttgtcacctggtgatggagctctttgagctcttaggatgaaagattctgtaaatacgcagcctttgtcaccagactgggtggggtggaatagggagcccacatcagatccccaagggtgcagagaaacagcccccgggagttggagggagggtcggtcgccaagctcccctgaggttaccgccctctgacagctgccaagcgagttcctgcagccagaatgcctgacatgaaagtcccccgcccccgccaaggcctgcctgtgatggttaaatgacagacgccgacaccctggctgctgactgatgctgacagcagggagggagatgtggagctggcctgggttgcaggcaggtgactggaggctcttccttaactcgtgttcataggacgctgaacacccaccacgacctgtcactgtccagtgtccatgggggaggcagacaggcacacagcacattccaccatcacgtggggtgttagaggggaggccctgctctctggcagcacagagaagcccacctgacagatgatgggtccaggacaaaccaagggcccaacctcctcccgtctccccgcaaagatcatggtgataaaacccctttgggatgaagtagttcagaagtcctttgcccatgtgaccctcatgcaagagaaaatgaaggccagagagccccattgacttgtccaaggccacagagctcattggtgtggcacacaggacacttattattattctgattccttggcttgtggcttcatcactccaatctcttcctccatggtcacattgccctctgctcgtcttctctgcctctctttggttttttgtttgttttgaaacagagtcttgctctgtcacccaggctggagtgtggtggcttgatcttggctcactgtggccttgacttcccaggctcaagctatcctcccacctcagcctcctgagtagctgggattacaggtacacaccaccatgcccagctaattattttctttttttgtttttcttttttagagatgggtggtggggggggggggtctcactaatttggccaggctggtctcaaactcctgagctcaagcaatccacctgcctcagcctctcaaagtgctgggattacaggcgtgtgccacagtgcccagcccctatctttctcttaaagggttacttgtgttacacttagggcccaccctgataatctaggataatctcatttcaaaatctttagtcacatctgcaaagtctttgcatgtagataacagtcacagattccaagcattagtaccgaattcctgtagcgaccattattctgcctgctcccagcccccagaggatgcagagtttaagaggggcctgccttcagtcagcctgtgggcatgagcctcacatatccactcagcacatcctgggaggggacctggactcccccccgaccccagcaaggccagacccccctgtctgccaggacccccggagagggggaagcaggctgtgcaatggaggaggtaggatgtggcaactccatagaagtggttaggacagaattctggagttgcgcatcccagagatgaggagtcagagaggcccttcccctacctggatgctgcccctacgtctgatttgaattctcctttcattgctccatccagcagacactcagaccagagccaggctcggtaccaggctctggagagcttgtccatgtcctcaaagagcttgcagtctaaacctaggagtgataatggccagcaccgtggtctccaggagggtggaagagcaggagactcttctctttccagagcaggcaatggaggcccaggaaaggggactgttcttgtctggagttgggctgaagccgctttagcatgagggttttgcctttcctcaatcctccgaccccacagccttcctgttcctgcctcggtgattttgtcattcttgtctcgtttcctcttggtactttaaaagtaaaataacgactgttcatctgcccttagaagggctggcacagaaagagattcatcccaagctgtgcacctgctctatctgtacagttggcggatggggagccaaggaacaggacccccggagtcaggcagcattttactcaaacgctgagcactcgttccaagtctgagtaaggtagaagaatgagtggccagccctgccttcccacagctcaagtgcagcaagcaccgtccttaaaacagaagagctggccgggcgcggtggctcatacctgtaatcctagtactttgggaagccgaggcgggagaatcactggagctcaggagttcgtgaccagcctaggcaaacatagtgagatctcgtctctatttaaataaaatagaaaatctgtttaaaacaaacaaaaaatagaagagctgtcgtgaaacttgggtgctctgggtaaagcttgggaagaggcagggcctcccagcatgtctggaatccccaaattagcaacctgtttccttgtctgaaaaatgggtgtagaaatggccggctaagaggacaacggcactggtgccgggtgttgagcaagccctcgacagcctcaccgagagtgcaccaagggccacccgcgcgctgccgctcccagggctcccaccctcccctcggacgccggcctggtgaaccaggctgcaggcgcgcgtgggagcgctcagagctgtctcaggtgttctgagccgccagatcgggagtccagtgccctgctgagcccgagccccagcacaggctcccgtcgcgtcctcccgcagcccggggtccccgcccgcccagcgcctcccacgcgcggactcctaggctgagcgcgcagggcagcggggcccacgcgagggcggggcgagccggggctttgtgttcaaaccggccaatgggtggcggcggtgggcggtgacggccggcggggcctgaccaatgggctgcggcctgtcagcgttgactgacaggcgcacacatacagagtcggccacacgcgcgccgcccggccccactcgcgcagcgcgggcctccgccggccgcattgtccgcccgcccgccttgtcccgcgtcgccgctcttcgcgtgcccgcgcgccccgggcccggccgctgtgtcgccctgagcggagcgccgcccgcgggatccccacgcggaaagggggcgcgccccggcggcggcctggcctcggacgcccccggccgggctagaagccgccgcggcagcaggtgagtgcgggcgagctcaggagagggttggggggccgcggcccggcctgaccccgggtcaccgtcgggccactcgggcggggccgcgccgccaggcctgcttcctcctctccgggacgtgctgggccggatccagcctccacccgggtccgcggcccgcgccctgactcacctcctggcccccgccccgcctgccgcgccactggtcagccgggagggcggtgtctgcgggcgggacttcccgggcagcctcccgggaggaggagggcaaaggccgactgccccaacccggccccgggcagcgcctacgggttttgtgccagacaggccgtttccagggacaggcagttcccagcctctgcctgtcagaactcagggcctcagaggaaggcccgttttgttcagttctaaaacaaaacaaaacaaagcaatggggggcgcggtgtgacttagagagccaggaggcgcgcctttggtgacaatttctgcaggtttggcctgtgggaatgagggcagagggagttagcaccgggcgtttggcaggtcccacaagggcgtgtggcctggctgtgcccagggagtggaaatgtcacgaggaagatgccccagatctggtttaagtctgaagatggatggagatgtttgtgatggggaagggcggaattgagaaaggaagtcgcccagctgagaagtggggaaggatgctttccgatgagcgtttcctaactgattgttagggaggaggtggggcgggggtggtgtctattatgattcgcagtagtagatttcagctcccagaggctcacttcttgttttggagaatggggcctcgacctttttcatcttgtgaaacccagactcaatggtaaactgttttgtgatgccaggatgccgcaggaaagactgagaggcatctctgggagttctgggagggcggaggcgggtgctgacagttttcagcactccccgctcaacctccatcagaatatttagttcttcccagcggcagcttgggtatggtataaacatgttgccttgtttctgccctgggcaaaggtgtcacctccttcagcaggacagaggctaagaggagtccctgtgtgggcagctggagccttcaggtagggaccgtacgggcggggcagggaggggggaggggagattaccttataaggacaggaatagagacaaggacccaggccaacttcctgcttttcctactaccaatcggtcccttttccaacaccagctaaaagtagaggggatgccagatgggcgtctgacctgggaagatgccaacaaggccaggacatgaggctgcttgtttttcagaggaggactttctagctggactaaccagaccttcgggtttctgcagcctgggttgggaagtggactt

SEQ ID NO: 9377 - DNA, 6000 bp, Homo sapiens
aactcctgacttcacgtgaccaccagcctcagcctcccaaagtgctgggattacaggcgtgagccaccgagaccagcctcacctcattcactcttacctggacgcctgactttacttgagatacaggcatagtgattctcagcaggaaacagcctgcccccacgtcacgcccagagacccatcactggctgcctggcttggtgacaaagtccatgcgtaagtcttggctggggtggatatgaataggcatatgccaagaatcaacccattccctggctagggtgggagactgtgttgtgctcccccagaccaccctcaggttcagtgatttctagaaggtctcacagccctagaaaagctgttattctccctgttaacagtttattacagagaagggtacagattaaagtcagcaaagatgaaaggcacagggaccagagtccagaatgaccaggccaaggctgcagctctcttttctggtggactcctacaggcagtgcttaattctcccccaacagtaagtgaggcagcagagagccctgccagccacggaagctcacctgggccttggtgtccatggtttttgttgggagttggtcatcctaggcttgagcccccgcagcatggctgacctcagttactcagtctccagcccctcctgaagtcagatggatacaggcctgacggccccaccctcgatcacattgttggcataaactgtgttgtacggtccaaggccctagctatgtacaaagacactatttcaggcaggacattccaaggccttagcagatatctcccagcctcctgtcaagagtcagtttggactcttggtccagtggcttgcattgtgcaaggaatgacttccccactttttactacacaggccacccctcttggctctaacagcaaaatgatattagtttgagcatctgtgtgtgtgtgtgtgtgtgtgtgtgtgtgtgtgtgttttcttgagacagggtcttgctctgtcaccgaggctggagtgcagtgatgccatcagggctcactgcagccttgacttcctgggttcaagcaatcctcccatctcagcctccctagtagctgggactgcaggcacatgccaccatgctttgctaatttttgtattttttgtagagacggagtttcaccatgttggccaggctgctttcgaactccctatctcaggtcatctgactgcctcagccccccagagtgctgggattacaggtgtaagctactgtgcccagccaaatttccttcctaatttcttcattgaaccactggccattccggaccatattgtttaattttcacgtgtatgtatagtttccagaattcctcttgttgttgatttccacttttattctgttgtggtcagagaagatgcttgatattattttaacatttgtaatgttttaagacttgccttgtgacctaacatatggtgtatccttgagaatgatccatgtgctgaggagaagaatgtgtattctgcagactttagacgaagtgttctgtaagtatctagtaggtccatttcttttgtagtgcagattaagtctaatgttttcttattgggtttccatctgggacacccgtccaatgctgaatgtggggtgttgacgtctttagctgttattgcgttaacgtctctcttgggctccaataacatttgctttacgtgctccagtgttgtgtgcatatgtatttacaattgttatattctgttgctggatgaccttctttgtctcctcttacagtttttttggttgttgttgtttgtttgttttgttttggagacggagtctcgctctgtcacccaggctggagtgcagtggcgcgatcttggctcactgcaagcttcgcctcccaggttgacgccattctcctgcctcagcctcctgagtagctgggactacaggcgcccgccaccacgcctggctaattttttgtatttttagtagagacggggtttcaccatgttagccaggatagtctcaatctcctgacctcgtgatccgcccgcctcagcctcccaaagtgctgggattacaggcgtgagccaccacacccggcctcctcttacagtttttgttttaaaatctgttctgtctaagtattgctactcctgctcttttttgttttccattggcatggagtatctttttccatccctttattttcagtctatgtgtatctttacaggtgaagtgtgtttcttctagacaaaagagcattgagctttgctttttcatccattcagccactctgtgtctttgtattggagagtttagtccatttacattcaatgttattattgctaagcagggacttactcctgctattttgttatttcttttctcactgttttgtggtcttctcttttttttttttttccttgtcttccttttaatgaaggtgattttctctggtggtatgatttaatttcttgcttttttttgtgtgtgtatccattgtgtgttttttcttcttttctttttgagacacagtctcacttattgtgtgctttttgatttgaggttgccgtgaggcttgcaaatattatcttataactcattattttaaacggatgacaacactgattgcgtaaacaaacataaagcaaaaggaagactaataaaaactctacactttaagttcatcttagtgctttttaactttttgttgtttctctttttttgtttttgagataaagtcttgctctgttgcccaggctagagtgcagtggcacgatctcagctcactgtaacctccacttcccaggttcaaccgattctcctgcctcagcctcctgggtagcaggcgcccaccaccatgcccagctaaattttttgtatttttagtagagatggggtttcaccatgttggccaggcttgtctcgaactcctgccctcaggtgatccacccacctcagccttacaaagtgctgggattacctgcgtgagccaccgggtccggcctctttatgtcttactgtactgtctgtcttgaaaagtacttattatttttgattggttcatcatttagtctaattaaaataagagtagtttacacaccacaattacagtattataatactctgtttttctgtgtgcttactattaccagtgagttttgtacctttagatgatttcttcttgctcattaatatccttttttttttcagattgaaaaactccctttagcatttcttgtgggatataggtctggtgttgatgaaatctcgcagcttttgtttgtctgggaaggtctttatttctccttcctgttggaaggatatttttgccagatacgttattctaggctaaaagttttttttccttcagcactttaaatatgtcatgccactcccccctggcctgtaaggtttccactggaaaggtggctgccccatgtcatgtattggagctctactgcatgttatttgtttcttttctcttgctgcttttaggatcctttctttatccttgacctttcggagtttaattatcagatgccttgaggtcgtcttctttgggttaaatctgcttggtgttctataaacttcttgtacaaaaaatcagccaggcatggtggtgggcacctgtaatcccagctacttgggaggctgaggcaggagaatcgcttgaaccctggaggtggaggttgcagtgagccgagatcgcatcattgcactcccacctgggcgacagagcaaaactccgtctcaaaaaaaaaattatttgggctcggtggtgcctgtagtcccagctacttgggaggcaggaggtccacttgatgttgagattgcagtgagccatgatcctgccactgcactccggcccgggcaacagagtgagaccctgtctaaagaaaaaataaaaataaaaaagcaacatatcctaaataaaggatcctccataatgtttccaccagatttctaatcagaaacatggaggccaggaagcagtggagaatgacgaccctcaggcagccctggaggatgctgtcacaggctggggcaagggccttcaggctaccaactgggagctctgggaacagccctgttgcaaacaggaagtcatggcccggccagagcccagaatgtgggctgagctgggatccacgtgacagctttgaggctcaccgggagcagcctctggacaggagaggtcccatccaggaaacctcgggcatggctgggaagtggggtacttggtgccgggtctgtatgtgtgtgtgactggtgtgtgtgagagagaatgtgtgccctgagtgtcagtgtgagtctgtgtatgtgtgaatattgtctttgtgtgggtgattttctgcatgtgtaatcgtgtccctgcaagtgtgaacaagtggacaagtgtctgggagtggacaagagatctgtgcaccatcaggtgtgtgcatagcgtctgtgcatgtcaagagtgcaaggtgaagtgaagggaccaggcccatgatgccactcatcatcaggagctctaaggccccaggtaagtgccagtgacagataagggtgctgaaggtcactctggagtgggcaggtgggggtagggaaagggcaaggtcatgttctggaggaggggttgtgactacattagggtgtatgagcctagctgggaggtggatggccgggtccactgagaccctggttatcccagaagcctgtgtgggcttggggagcttggagtggggagagggggtgacttctccgaccaggcctttctaccaccctaccctgggtaagggcctggagcaggaagcagcggcaaggacctctggagcagcccatacctgccctggcctgactctgccactggcagcacagtcaacacagcaggttcactcacagcagagggcgaaggccatcatcagctccctttataagggaagggtcacgcgctcggtgtgctgagagtgtcctgcctggtcctctgtgcctggtggggtgggggtgccaggtgtgtccagaggagcccagttggtagtgaggcagccatggggctagaagcactggtgcccctggccatgatagtggccatcttcctgctcctggtggacctgatgcaccggcaccaacgctgggctgcacgctacccgccaggtcccctgccactgcccgggctgggcaaccttgctgcatgtggacttccagaacacaccatactgcttcgaccaggtgagggaggaggtcctggagggcggcagaggtcctgaggatgccccaccaccagcaaacatgggtggtgggttaaaccacaggctggatcagaagccaggctgagaaggggaagcaggtttgggggacgtcctggggaaggacatttatacatggcatgaaggactggattttccaaaggccaaggaagagtagggcaagggcctggaggtggagctggacttggcagtgggcatgcaagcccattgggcaacatatgttatggagtacaaagtcccttctgctgacaccagaaggaaaggccttgggaatggaagatgagttagtcctgagtgccgtttaaatcacgaaatcgaggatgaagggggtgcagtgacccggttcaaaccttttgcactgtgggtcctcgggcctcactgctcaccggcatggaccatcatctgggaatgggatgctaactggggcctctcggcaattttggtgactcttgcaaggtcatacctgggtgacgcatccaaactgagttcctccatcacagaaggtgtgacccccacccccgccccaggatcaggaggctgggtctcctccttccacctgctcactcctggtagccccgggggtcgtccaaggttcaaataggactaggacctgtagtctggggggatcctggcttgacaagaggccctgaccctccctctgcagttgcggcgccgcttcggggacgtgttcagcctgcagctggcctggacgccggtggtcgtgctcaatgggctggcggccgtgcgcgaggcgatggtga

SEQ ID NO: 9378 - DNA, 6000 bp, Homo sapiens
ggtcaggagttcgagaacagcctgaccaacatggagaaaccctgtctctcctaaaaatacaaaattagctgggtgtggtggcgcatgcctgtaatcctcgctactcgggaggctaaggtaggagaatcacttgaacctgagaggcggaggttgcggcgagccgagatcgcaccattgcactccagcctgggcaacaagaacgaaactccgtctcaaaaaatataataataataataataattagctgggcatggtggcacgcacctgtagtcccagccactagggaagctgaggcaggagaatcgcttgaaccccggaggttgcagtgagccgcgattgcagtgagcctggcaacagagcaagactccgtctcaaaaaagaaaaaccaaccaaccaaccaaacaaacaaaaaaaacagtaggtcaggtgggtgggtaggcagacgggcatggtggctcatgcctgtaatcccagtgctccgggaggctgtggtgggaggatggcttgagctgcagtgagctgtgactgcatcactacactccagcctgggcatcagagcgagatctcttctctgggtaaataaacccagtgagtcactccctcagctacctagatcctgcagggctccccattctccttgacattccagttctttccacccggggctccacattgcctccccaacgtcacatcacaccccagctcggctgtatcagcccctctaaccttgcccatcaggcctctgttcacctgtctccacctccaggccctgccagcaaggcgcttctccctttctctgcctggtctgtgccacgttgcctgaacacacagcccaccccatcccctcagagcaccaggagctcacatctgggtccaagaccctaccaggagagcaaggcaagagaatgacgctaaggcccagcatgagcctacacagagaaggtgcccactgtctgtcaaattcatccattcaacaagtatttaggctgctcatcgtggctcacgcttataatcccagcactttgggaggccaaggtgggaggatggcttgaacccaggagttccggaccagcctgggcaacatagtgaaacccgtctctacaaaaaaatgcaaaaatggccgggcgcggtagttcccacctgtaatcccggcactttgggaagccgaggcaggtggatcacctgaggtcggaagttcgagaccagcctcaccaacatgttgaaacaccgtctctactaaaaatacaaaattaggccgggcgcggtggctcacgcctgtaatcccagcactttgggaggccgaggcgggcggatcacgaggtcaggagatcgagaccatcctcgctaacacggtgaaaccccgtccctactgaaaatacaaaaaattagccgggcgcggtggggtgcctgtagtgccagctactcgggaggctgagaatggcgtgaaccctggaggcggagcttgcattgagccgaaatggcgccactgcattccagcctgggggacagggcgagactctgtctcaaaaaaaaaaaaaaaaaaaaaaaaaaaaagattagctggttagccagatgtggtggcacatgcctgtaatttcgggaggctgaggcaggaggatctgttgaaccctggaggcggagtttgcggtgagccgagatcgcgtcaatgcataccagcctgggcaacaagagcgaaactgcgtctcaaaaaaaaaaacaattagccggacgtggtggcatgtgcccagctactcaggaggttgaggcaggaggaacacttgagcctgggaggttgaggctaaagtgagctgtgatcaggctcctgcattccagtctgggcaagagtgagaccctgctttaccaaaaaaaaaaaaaaaaaaaaaggtatttattgagcacctactatatgctaggctctgtgtggctaggctctggggatgtacgggacttcaaaccagatagggccttgccctccgggagcgcacagtccactgggatggggtgggagtgggggaaacacgcaggaggccttcagctaagtgggacaaagatcactccacagtgggacaatggcgtggggagcggaggcgccgccggcgaggaggctccgggcgggccgtgctgagaccgcagcatttaacccggcccgaggcagctgggaacagtgctgcccagggaactacaaattcaaaggcccggggaagggccgcgctgagcagctgcaggcacaggcccaggccaggccaggcaggaccggcccctgcagtctcggaggccgggggaagattccgcctcttattctcgctcccatccggggggcgccatcttgcttcctttatggcggcgaacgaggcccagagaggccaccgtcccgcgcggggcagcacagcggcgggagagctcggagcgcagagggccgcatccccagttcccagtctccatccccggcagaagcaggcggagcgacccggtccccgcccccgcgcccgccccgccccgcgcgcccgcctggcccctcggccccgcccctgctccggagtgacgcgggcccgggcgcgacggtctcggcggcggcggcggcggcgacagagcgagcgcggcgcggggccaccatgggggcccagctcagcacggtaggcggggagggggcgccggggccgcggggcgtcgcgagggactgggacccggcggcgagggggcgggctggcctgcgggaggtgacgcgggacccgggccgcacccggccgcacccacttcgcccgcccagcccgccgcgccccaccccaccccacaagggcctgggcgagctacgtggtgaccgctacttacgccctggcagtctgcagcggggacccagccctcctgcccggggggcgcgccagagcccagcacccgggggcacctgggccctgccctggccgccgtggggccttggctgctggagggacccgtggttgtgagcgtgtgtgccgctgagtgtgagtgtgtgagcgagcgtgtgaatggcttgagagtgaatgtgtgtgtgagtgtgaccgtgggtgtgaagggcgggcatggaaacgtgtgatggggtgtgtgtgtgtgtacgggagtatgtgaatgggcgatgtcactgactgcgactgaacgtgtgtgtgtgtgcgatgtcactatgtcagagggttttgcacgtttagcaacaaggaacagaacccggatgacacgggggcatcctcccaatgctcagtgggccaggctcccatcaaggccaggctcccactgaccctgcaagctgtgctggggacctcacactttgcggtgtcagtgctgtttgccccatttcacagatggggaaatgcaaactagtcttggccaccgtcccacaacgctgccgccggaaggagcctgctccatggggtttcaaagtccactctgctgctgtcactcctgggctggcctagagccaccttcccttccccccaggccacctcctctccccagtttctcaaaagttgaccatggtgaggctggaggcttgagtctgtgtggacatgtggaggctgcggctgcagagggcagctctcctgtcaactgtgacccgctaggcgtggggaggctggcacaggaggaatcagcccagtgctcctccacctccacctctacctctatgcctggcatctgccacttggagggcacctgggtcctccctccttggggaggacctggagtctcctccttggggatccaggcaaaaggcctcttggcttgggtggttgctaaggaaagtgtggcccaacccagaacttcgggatgttcagaccccaggcaaccttggccagggtgaacctgtgggcatcaccccaacctccatgcaacacccggcccatttttccccagaaagcatctgcctcctttattgttgaaatgtcctgcctgtgtctctaaagcttcccctggtctccacccaacccttccctgctgtttttggtggtgttccataccttccagctggtggttggatttatggccacgtcccctgcacctggctgctccatacatttcttttttcttttttcttttttgagaagagtctctcacccagacagtagtgcagtggcgcgatcatagctcactgcagcctcaacctcttgggcacaagtgatccttctacctcagtgtcctgagtacaggcacgtgccaatatgcctggctaagttttttttttttgagatggagtctctctctgtcacccaggttggagtgcagtggcatgatctcagctcactgcaacctccacttcctgggctccagcaattctcctgcctcagcctcccaagtagctgggattacaggcactcgccatcacacctgggcttcgccatcttggccaagctggtcccgaactcctgacctcagatgatccacctgcctcagcctcccaaagtgctgggattacaggagtgagccactgtgcctggcctaattttttgtatttttaatggagacaatgtcttgctatgttgcccaggctggccacaaactgagctcaagtgatcctcccatcccagctcctcaaagtgctgggattacaggtgtgaacgccgttcttggcctcattccatatatttctgttgaatggctgagcagtcctctgtaaggggcagagcactgcctgggagtcgggagacctccaccaaccctcccccgcccagccccatctctccaagggtgggtggggattaccctttgtgggtgctgctgggatcctcgcttggcccagaatgtctccagcacattctgagccaggcctcctggcttacgggctccccacagtctggaggaggctggctgggggcctggtgctctaggtgtcttatctaagacatgcaggccccatgggaggcctctcccaacactttgtgggatccaggccaggggttggccctggagtctgccagccacactgggaaaacattggagcttggtctgccatcctgaactgtggttcccctgcctcccagcccggctgtgagtgctcagcgaccctgacaggctgacaggtacagtctgccgggctttcctactgtccctggcagccccatgcttactctgcggcccagatcccagctctgtgtccacctgttccttctcctgggttcccttcccccacagttcccagccaagccagagccccccactgcagaacttcctccactccctcccacttcctcccggttagaacaggaccaggagggaggtgccgctcagattctggcaggaccgctggcgggcaggcaggggacaggtaagcaagtcacccgactggcttgtctaagctccagggcagggagctggcacctggggaggaccgggcctgccaggtcgggggccctggcagctctctctgcccacccctaacctggcctgggcagagtggaggccagggtcccagtggggaattccaggggtgggcagctgcgcagggcattctatgtgtggggagcagagctacgcagcccctcagctatggtgcatgagctgggggctccctgggactctggcaccctgtgtccctcttcccctctgtgttattagaggcaaggagaggcgggtgatgggttccctggtggggcagagcatggcttgtgggcattaggtcaggggctgggaggcagctgtctcctgggcccccaggtggctggggtgaggtggtctgtgtgtgtgagtgtgtgtgtgagtgtgcacgcagcacaggtgaggaggcacaggggtgggaccttggcctcagccacctgccttctgtttacttggcccactgctggtgagggttggggtggtgctgtggacgaggacggggcagagcctgttccaacccgtgtgggtaggaagagagtgcaccccaccgtgtgagtctggcagggcctctggctttctggaggtgaaaccttcgcccctccactgctcctggctgtggtgcgccctctctgccggtgtctgtctccccgtctggcttgaact

SEQ ID NO: 9379 - DNA, 6000 bp, Homo sapiens
agatgaaataagacatcctctctcagctcagcagtgaggcaggagaacgggggcgaattcctccgtcctcagcctttccttctactcagggttgggggcccacccacactgggggccatctgcttcctgagtctgccattcgaatggtaatctcatctggaaacacccccagacacacccaggagtaacgtttaattggggcaccctgtgtcctggtcaagttgacacatgaaattaaccatcatagccccgactgtggtttggaacaaacatctctgatggccaccccagctgcagagctcctatgggactggccgaggcccctgtggcaatgacagcctcacagctcaacatctccctctgtgcagtcctgcgtcccttgccctcacaggaactcagagccctccccttgccctgcatggggctctccaagtcctcagtcagctccccgggccaggcccatgaccaagggcattgaaggaaatgtcgagtgatgtgaccgagagtgacaggagggtcgtggccactcacaccagggggcaagaaaattcaggatgagtccgcagtgcaaagtgaaagcaagtttactaagattgtaaaggagccgggcgcagtgtcacatgcctgtaatcccagcactttgggaggccgaggtgggcggatcacttgaggtcaggagttcaagactagcttggcaaacttggtgaaaccaaatctctactaaaaatacaaaaaatcagccgggcatggtggcacatgcctgtaatcccagctactcaggaggctgaggcaggagaattgcttgaaaccagtaggaagaggttttagtgaaccgagatcgggccattacactccagcctgggcgacagagcaagactcataaaaaaaaaagaaggtaaaggaataaaagaatggctactgcatagagcagcccctagggctgctgcttacccatttttatggttatttcttgatgatatgctaaacaaggggtggattattcatgcctcccctttttagaccacccaaggtaacttcctgacgttgcgatggcatttgtaaactcacggtgctggtgggagtgtagcagagaggacgaccagaggtcactcttatggccattttggttttggtgggttttggccggcttctctactgcaacctgttttatcagcaaggtctttatgacctgtattttgtgctgaactcctatctcaccctgtgacttagaatgccttacccgtctgggaatgcagcccagtaggtgtcagcctcattttactcagctcctatttaagatggtgttggtctggctcacacgcctctgacacctttgcctctcggggcctctgtgttcccgtcaggacatcggaatctccaagggcataaccctggtgctctgggagcctctctgtcagcactcagcctggatggagggctcagtgcggactccgttttgttgggtcatggttggccagtgctaggctgagctgggctggacacagggctggaggggtagcgcccttactgtagggacaggtgggggtgcaatttgtgtagggatgaaaagcaccagcttggagggccttttctaggcccttgggcctagcccctgatgctgatgcccctagttggggtctgcagagctggtgccaagaacctggctggtaggggtctgacccagcctttggccttctgtctccattgccctgcacctctcgattttttttttttttttttgagacggagtctcgctctattgccaggctagagtgcagtggcacgatctcagctcactgcaacctctgcctcccgagttcaagcgattcttctgcctcagcctcctgagtagctgagactacaggcgtgcaccatcatgccagctaatttttgtattttcagtagagatggggtttcaccgtgttggccaggatggtcttaatctcctgacttcatgatccgcccacctcagcctcccaaagtgccgggattacaggcgtgagccaccgcgcccggccatgccctgcacctctcctctctcctcacttcctgcctaagatgagtcatggggaatcctggcgatgggagccatggaagggcttagagcaggggagtggccacagtaacaggctaactgggagtagctccctggtgacagggcgggaagtagtgagcctggaggcaggggcaggcagcaggggtgtgccaagcccagctgacaaggtccaggacataggctgcaactgcgaggcccgtctcgggggccaggagcatgctttgggcctgaggtcacctggatattgggctgcggccaacttggccccatacacagtttctattcctgggtcttgggctctgacaccaaatatggcgtggcctgagtctggcacccccaactgtggtccgacgacatatcctgctcctccaagtgggcccggaccccgcccacaccatggagtcagatcatgccagcactcggggcccccaagtgggcagaggctcctgctgctgctactggccctccaactgtccacccgtccgcgtggttcacatggggttaaaagtactcaggaccaaaatagcccctctccctgcagaagaaagacaggggcagggggcaccatgtcttggttcacaccacagccctgtccttgctacccgcatcccagggagctcacccggcctctgccccccacctttcgcactggcccacttggtcacacagcgatctacacactcattggttcactcttactggtcactcactcgttcactcattcattcatttactgatcattcattaattcactcattggttaactcatggaatcactgcctatttattgaccacatactaagagctggacaccgttctaccatttcagagctgaacaaaacacaaaacatacctatcctcatggggttatgttctagacagacaaccaaagcaaataagtaggatgtaccgtgtgttagaataaatgcaaggatgaggaaacgagggggctctgaggtgatggggggagttggaatttcagggggcccagggaggacctggtgggaaggggacttttgagtgggcatctgagagaagaaccctccaagcagaagaacagcaggtgccaaggccctagcagccgtttgaggcctgaaaaacaggcggccaggtgtggctggggcacaggtggcggggagagaagcagaacgtgaggtcagggggacacatggggcccagtggatcagggcctcatgtcattcagggtctgagctgagaatgacgtggctgatatacttgtaaagcatcctgctggctgttgagtgaatgggtcagagtgagccattttcccatgtgcctgctgcgtgctgggaacctagctgggtgccggggagagaagatgcaggtgaaccctagatgcttattcccatggtgcttgcagaggtctggagccaccactgtctcctccatctgacctgctcatccttggtgcttaaccatgtgtcacctccccaagggagtcaccatctttgtctgtttccttttttctttttttttttttttcctttttgaaactgagttttgctcttgatgtccaggctggagtgcagtggtgcaatctcggcgcactgcaacctccgcctcctggattcaagcaattctcctgcctcagcctcctgagtagctgggattacaggcatgcgccaccatgcccggctaattttgtatttttagtagagacagggtttctccatgttggtcaggctgttctcgaattcccgacctcaagtgatctgcccaccttggcctcccaaagtgctgggattacaggcgtgagctaccgcgcctggcttttttttttttttttttgagatagagtctggctctgtcacccacgctggagtgcagtggcacaacttggctcactgcaacctccgcctccctggttcaagcgattctcctgcctcagtcacctgagtagctgggattacaggcgcacaccaccgcgcctggctaatttttgtatttttagtagagacgaggtttcaccatgttggccaggctggtctcgaactcctgatctcaagtgagccaccacgcctggcctctttgtctgtttctaaatgatgcccccaccagactgagaactcctttagggaaaggctgtgtctgattctccccttctcctgggtaccagtgcagggcctgcccctattccctgagtgtcccctgagaggtggagcgagtgaatgaatcagtgaacacatgagccccaggcctgacctgcctgtgtggccagggggacgaggcctctgagagccagcgacctgtttcactctcttcttgccatcttttgcagatggatttgcagccgctgcaagtgtgtggaagggccgtgttcgtgttggcaaagaaggtcggctgctgagccagggcgtgtctcccggaggcctgtgggctgccaggatccccacctctctgcaatgggctgcccaggctggtcagttaccagccagtgacatcagcgaggttccctgctctctaccctgggaagggcccagcctaagttaccaagccccaggctcccagtaccaccctcagcctatgtggattgccaccccaccttctgcctgtccttgggaggggaccgactcttagctccccttagcaatcaggttgcacccagtcccttgactttatgcccaggtttcctggcacctaaagtagaaacgatgcaactgcccctcgggcttgctgagggtcaaagggggtgtgactttgtcatggagcgtagaagtcagagtcgatggtgatcccgctggctgttaacatcgatacagttcaggtcagcatgcaccaagttcctccaacacaccaggtacattggctagccacctctcccaggcagggcggtgcagtggtgagagcagggaccccagccaggtggcctgggtcctaaccccctgcactgtcattgctggctgtgggactctgcacaaggtactgcacttctgtgcctcaatttcctcatctgtagggtgggggtggtgattgccaccccatagggtggttataaggggccacacatgttcctatgtgtgagatgctgagaaagtcacctggcatggacaggatggacagccagtatttatcgaactatgaatgaatgaatgttaccctttagtgggttccagcgtcctatcctgtcggtgggaagactgaggctcagagagctccgtaacttgccccaggtcacacagccggttcaggcagagttggggtctcatgcctcccaggtgttcccacagtcttttccccaggagcagggtccaagcctgctgctcctccaaccacctgcgaggcacctgggcatgttcctggccaccaggaaagagaggtctaatggcagtagtaccagtcagcgtcatgtgcctggagcgagtgccctgtgagtgcacctgctgggccagcccttagcaaaccaacgcctgggcctgccggagccccagacctcatgctgaacatcctcagggcccctcagtggcctgtccttagacgaaccccaggcctggtttatggagctgaggcgggcatgagctgggcctcaaatcccaggctgccaatcctcacagagccctgtgtgtcacatggcgaagccatcacttctgacagtccttacgcagaccagactctggcctgggcctgtgatggttacacaccatgggtggcactggcctggtccttgggtgagctcacaggtgtgtcgcagagagtggaagggaccctgctcagaccccagtccatggcccactgtgctcccatttcgtaggtgagcagccagcaggctggggttcaagccttggcccctgtgggcccaggagcccatgggcttggaagccagccttggctctggctgatgttcacaggaagcgttttccttgtggatcgggaatgccaacggcctccctgatggcgggtgctcatctcttgcagaccagccggtt

SEQ ID NO: 9380 - DNA, 6000 bp, Homo sapiens
aggttcaattttctgagatttctcatcaggcacaccaaccagcaggaccaggtaagtggggtgctcttgcatggagcctccactggcgagtaatttatgttccagcagtccctggtttatgtgttgtaggaattcattatttaattcaagggaaggaagggcaaacttttttttttttaatttcacaaactttaaactcctggttacaactactccttgtaaaatatcatttaaaacgataaatttttgaggccagatgcggtggctcatgcctgtaatcccagcactttgggaggctgaggcaggcggatcacccgaggtcaggagtttgagaccagcctgggcaacatggtgaaacctcatctctactaaaaatacaaaaaagccaggcgtggtggcgtgcgcctgtaatcccagctactcgggaggctgaagcatgagaatcgcttgaacccaggaggtggaggctacagtgagctgagatcacgcaactgcactccagcctgggtgacagagtgagactccatctcaaatatatgtgtgtgtgtgtgtgtgtgtgtgtgtgtatgtatgtatacatgtgtgtgtatgtgtatatatacatatatgtgtatatacatacacatacatacatatacacacatacatacatatacacacacatacatacatacatatacacacacatgtatttgagcacagaaactaagaggtatgaatctttataatacaacttcttacccgttgtttctcttcctatttaaaaacagaacaaagcgacacagtaaagatgtaagtggcccttgcaggccactgaaaatagactctttaggctcccagaaatgggttctgttcggacccttctaccacatctttctgtagcctatgcagaggaagacccgagtctagtcatgttgggggaagcggaacttttggtcacagtctccaaatttagtcacatttctttttttacttaagttctatttaagatctagtctaatgctatttttatgtggctttttaagtagtgcttgttaaaaagagaatacaaaattctaataatcactgctaattatttatcagaattctgtaaaaagcgttcgtcattgtagataagctgtggtttctaaaagcattagaagtcattttgacaagtgccgcggaaggtgggcaccggggaaggtaggcgccggggaaggtgggcgccgggaaaggtgggtgccaggtttcccttcatctctgagctgtcagttcagctggaaagggaactccaggggcctgcacaagcagtcgcatcctccgagaagggccgtgtgtgcacccaggcctgacagcgctcgctgtcaggcctggggtgttctgctgccccacccagacgatgacgtttagagctgaatggtccctctcactgtttcttggtagtttgacttcacttttgttgaagtttatcgcgtcaagaaattccagtttacgtcgaagcacatggaggatgaggacagcgacctcaaggagggggggaagaagcgctttgggcacatttgcagcagccacccctcctgctgctgcaccgtctccaacagctcctggaactgcgacggggaggtcctgcacagccctgccatcgaggtcaggtgcgtgcaggggtcctccagccaccagcgccatccccttgagccctgaggtgtctgtcacaagctgccccacccagggtggggggttccctggggctttataaacacaaaacgtaagaatgttttataaatgcacttttctctccctatgtcaaatatcgaatgagatgccgttacccacattctggaaagatgccagggtgccgagtcctcagcattttgttttgcagataattttcatgggtgtttgaagctcctccatttcattcttttcctcttccacaccctgtgctccaggctggcattgggctctttgccctggcattctctctctcttctcctaaataattcaaaaggtgggaggctgaggcgggcagatcacttgagatcaggagttcaagaccagcctcgccaacatggtgaaaccccgtctctactaaaaatacaaaaaaaattagtcgggtgtgatggtgcatgcctgtaatcccagctaccccggaggctgaggcaggagagtcgcttgaacccaggaggcagaagttgcagtgagccgagaccatgccactgcactccagccttggtgacagagcgagactccatctcaaaaaaatttcaaaaggcaaacaaaggaaaccgcctttacaggcagtcctttgtccactgaatccaccagggaaccgctggcctcaagggccacagtcaatcaccaagtgcaggtgctccgtgcagggaggggcaggaggcagcagggctgggaagggcaccccgaggatgggaaggagaggaggagccccagagggacgccccgtgctggaggccacgcagcctaggggacgcggggaggcaggtgtggccacacacggatgttcggtctccctggggcaggtgccacacccctcctctggctggctgggcggagggtgggaagtggtgtcctccccacacccactggggcccattgtatttggaagtctgtgatgtatcacataaccagatggaatctgagtgcaaagaaaattgtttctccatggaaagacccagtaacaagcaagttgattttttcaaaaggccactgaattaggtgtgggcgtgcaaattacatgagactggggaacggtagagctcaggtggattctgaactcttggcagatgttggtaagagctcggtctacttcaaggaagcccagcttgacgctcgttaacagagtgtggctggcgtgagagcgatagcaggctggtcagcaggcccacgcctgtctgcaacgaaagctgggtgtcagatggcccttgggtgccttaagtcacagcatgtaagaggatgcacgcatctctgtggacagcgccccactttcagtgactcctcagccagccagctgcggctctaagaaagcttctcccattcgcatccgaacaagcctaagggaggaggtctctgcccctccccaggcccagggccacgcgccccctttctttctgtcagggcggtggtgatggcaagaggctgtcgaaaggtcccaggaacaccggccaccccaggcagccgtgcacagggactttcctctgtcaactcatttgacaagtttgggaagtgggattatttttaatattggtgtatgtatttattaaagaaatagaataatttgaaaatcaggacaggcattcttgaaatacgtcctgtctatcttgataaatatggctatgccttgagcagcacgtcgcttttaaaaatataatttgtgtgtgtgtgagctcagctccatggaaacagcctgtcacttatttatttctatttttttattttttgagacagagttttgctcttgttgcccaggctggagtgcaatggcgaggtctcggctcactgcaacctctgcctcccaggttcaagcaattctcctgcctcagcctcccaagtagcaggcgcccgccaccacacctggctaatttttatatttttagtagagacggggtttcaccatgttggccaggctggtctcaaactcctgacctcaggtgatccgcccgcctggacctcccaaagtgctgggattataggcgtgagtcactgtgccctgccccagcctgtcacttaatgaaggggtttaggttactgaaatacgtctgaggaggctgtgatatcattaataaatgagataaatagagctgtcctgtgtgggaagatggcactcacccacggactcactgtggccaccgagcccctgggcaggggacctccagggacccccaacttgttcctcaagcccgaaggctcttgctggcgttgggccacctgtccttctcatctgagcattcctcacacatctcttacacgcattgagtcgccccgcacagactcctcgcaggccttgcgcgctcagtactgctgagaaaatggaggtgggtgggtgggtggagtgggcagacactggagcggacgctctgctttccatgggggtgctggagttcgagtcaggtctaccgatgcccagatttcccacctggccattggcaacccctttacaaactcggcatcccgggagtctaagtgaattattccacgcccagggcccgtcattgtgggctggactcctacagcccacggtgacgtctgaccgttccatgggggatggacccccacttcagcccctgtccaagagcggtgctcagggccagctttgagtgagggacacgtggggtttactgcagcccctgtccaggagtggggctcaggccagctttgagtgagggacacgtggggtttacacgtggccgcttgtctctgcagagtccactgccagctggttcgactctttgcacgaggaattgaagagaatccgaagccagactcacacagctgagaagccggcgtcctgctcacaaactgggaaagtgtgaaaactatttaagataattattacagaccaattatgttgatatatacatttaaatgtagaaatttatttttgatagttaaatcttgattttagaagaaaacccttttgtcaacaattttgtgtacatatttggcattttcagttctgtacgcatctgcgggttgcagcccacgccgcttactctcagcggatgcagctgctcacttgggggcactggcctcttaggttttaacgatgtcaacagtgtagtttagaaaatggcccgttagtggctctattgcaataatgttagggacattatatgatttccacgcaggtcacaccatctgggcctgaggtagcagtgggtcactttgatccactttgcaggacttattctgtaacggtttgtggccaagttttgggaagtggttgattctctttgccttcatttcaccttcctcttcgtttacggttaggacatcgctgcttgatccttacaatactgtgcaactgcaatgcaacgtggccctgcttcaggtgatccgcgggaggggcctccacgccagcgccgggaaggctgctggggcctccacacctgcctcatcacggcggcgaggctacgacaatccggctgggagcatgaccttggcgtctgttctgggagcacggatgataagctctggaagctggcagtgtgtaaagcactggcaagtttgttactgttaaaatgtcaaataccaatgctttatatcgacgcgaagtgcttaacacagccgggcttgggggcagtcaggaggaagctggccatccgtggaggaggggccggtcctggactcccgcaggactcctctgaggcagggcctgaagtctgtacacgtggtccagatttgtccttgtcttttcttcacactgagttctctatatttattgaacatcttgtccttttaagccagagtagtgtaaactgcgtctcggatgtctgtcttttgcctcgaagccacgatggatcgctggtttcctctgcagcgcgagggctccggcgaccagaggattcttcccggaaggcattcctgccgcgctccccggggcacccctcaattgtgtactacgtccttgtttagtgtgtatccgtgcccacgtagatgatgtctgtaacgtagttttgtttgaaatatgagaatatgcggcttaaactttgatctgtaaggagcggggccgtggccgtttggagcacgctgtagacaccgttcctcatgctgccgggtgggttttgcagaagctcccttagtgatttcatgtttaacaggcagcatccattttcagaatttcctggcattgatttatattttgaagcatacaggaaacttctcgtttcctcgtttagccccacccagatcaggtgaaagggcagctttaatggtggtttttatggaccacattatcagagagcactgtgcaagccaaatggttcaataatgaatgaaaattctggg

SEQ ID NO: 9381 - DNA, 6000 bp, Homo sapiens
ccctgaggaccaggaggacgagatctcaggtggaggggtgggggtggagtcctgggtggtctctggatgctgacattggccagggaggatcagggcaggcggagtggccccgtgatgaccacgtgtgcccggcctgtgcagtgtcggaggagctggagcccagcacgctgaccccgtcctcagccctgaagccctccgaccgcatgaccatgagcagcctggtggaaagggcttgctgtcgcgactaccagcgcctcggtctgggcaccctgagcagcagcctgagccgggccaagtctgagcccttccgcatttctccggtcaaccgcatgtatgccatctgccgcaggtgagggccggccagggctggcccgggtggtggacacgtgactgggtgtcttccctgcccgctgtgggcctgggccacggcttctggtcatgtaaggaatgtggagggggagactccgggcagagggacgggccacagggctggggggtggctggggggccccgtggctgagctggaagcgcctcctgctgggagccatgggctggctcctcttgccctgcttggggcgtgagcctggaggcgggtggggtcgccagccaccttcacgcctctgcctcctctcagctacccagggctgctgatcgtgccccagagtgtccaggacaacgccctgcagcgcgtgtcccgctgctaccgccagaaccgcttccccgtggtctgctggcgcagcgggcggtccaaggcggtgctgctgcgctctggaggcctgcatggcaaaggtgtcgtcggcctcttcaaggcccagaacgcaccttctccaggtacctcctgcgtcctgccctgtgcctgccctgccctatctcaccctcccctccctcagctccgtgtcctcccccaggccagtcccaggcggactcgagtagcctggagcaggagaagtacctgcaggctgtggtcagctccatgccccgctacgccgacgcgtcgggacgcaacacgcttagcggcttctcctcagcccacatgggcagtcacggtgagggtgcttgtgggcagacggtggggcaggggcactttggggggccgtggtggcatttatggtttggcaggcaggccagggaggagcagaaacggcgctggtcatggatgtttgggtgtgggatgaggagcatgccctccgggtgccgtggggcaggggcgggaagcctgtccagaccaagtgtgtgcccagaccaggtgtgtgccctgacctcctgcccgccctgacgtcctgcccgctctccacctctgcgtctgctgcagcttcctgtagggtcctccgggtgctgcctctacgcggctctgtcttaccatttcccacagcctggaaacatcccagatgctcctctgtcctgttccctcccagtgtcactgtttttcctcatcccccacactccaccctccctgcatcccccaatccagactgtctttggagcctctggcctggctctgcctgcagcttggcctctgtcctcgtgtgtcctggttccttgggccttgcccgagctggccttgctgtctctgtccccaccgccacgcacacttcacaggcgccctgcacacactgagctagactggccccaggacggggtggcagataggccccacactcactcctgtgtccggaccacctgttctctagttcagaagtggttttgtttttccagataccacattatatacttacattttacaatcgccctgtcttgctgccttcccacccctgccagaaaccctgagtggcatttgcaggtggggccgcccctgcaccccccatgcctgtgcttcccacagagtcccttttgcgtctccgaccatccccagtgccagtggctgctgcctccccgtgtccccctcagtgcccagcaatgctcaggggctcaagcttcactcagctgtagtcgtggcttctagtcccagccctgacctttttttttttttttttttgagtcggagtctttctctgtcacccacgctggagtgcggtggtgcgatctcggctcactgcaagctccacctcccaggttcacgccattctcctgcctcagcctcccgagtagctgggactacaggtgcccgccaccgcgcccggctgatttttttgtattgtatttttagtagagacagggttttaccgtgttagccaggatgatctcgatctcctgacctggtgatccgcccgcctcggcctcccaaagtgctgggattacaggcgtgagccactgcgcctggccagctctgacctttttacaaggatacactgggccctggttggcgtccaaagcaggctggtgctgcgtcctcactgtgagctgggcgcctgcagtgtggcagccgtcagaggacacagggcgtgttgggctggcattgtgcttggcctgtagtgaccacttggtggacgaggggacattgcctctctcagtcccaccctcgggccttgcagaagcaggtgagcctgggcagggccaggcgcccagagaccctctgtggaccccaggcatctcccagccctttgggctgccagtcctccctgtgccttcaggccacgtcgtctggaccgtaaacctcagcctgggactcagatctgcctgtgtcctggactgagctgctctccgtccttttggactgggctcaggctctgagcccaccctctcccctcttcgggaagcctccaggtcgcctcttctccaggccacacctcttgggcacctcctgttgctgtgccctggacagaggcgtctacatgctcatgtgtggagcgttctgagctgtgcccatcacaagccctggccccctgagtggaggacaaagggccaggatgtggagggagggactcagagacagacttgctctaagctggtttgagtgggaagaaaggaagtgttagaggagagcccgggatccccaccgcatagcccttctgctgccacggagtgctctgcggcctgccctgccctggcagagaggcccacaccaggatggctcttcccactttcctgcgatcagggacttggggctgacccctgctgtctccaggctccctgggggcttggtggaaccctctgacctgtaggcacccccaagctgggcacgcccaggcctggggctaggcctgagccttctctctgctgtgccctcagttcccagccccagagccagggtcaccacgctgtccaaccccatggcggcctcggcctccagacggaccgcaccccgaggtaccgtaccgagcctgcgcaggcccgcctccccttacttggtgctggcggcctctagtgtgcactgagttattgcgggcactaatgtctccctccacacctgacactaacgacccgtctcccgagccccagtccttacctccctgacccgtgagtcctgccctagaaactaacactggctgccaccccacgtctcagaatctgtgtgttccagccctcctctcgcacggccctgctggggtcctgccaaccacccctgccctgggagctcagccccctccctggaggccgggcccagccagccccaggtaagtggtgccctggccccctttgggtgcttacctggcatctccttcacaggtaagtggggcagtgtccggaccagtggacgcagcagtggccttggcaccgatgtgggctcccggctagctggcagagacgcgctggccccaccccaggccaacgggggccctcccgacccgggcttcctgcgtccgcagcgagcagccctctatatccttggggacaaagcccagctcaaggtgactggggtgcggggggtggggggtgagggtgggggctcggcagggggcttggggcctcatgtgtctcacgggacttgtccggattcttttcagggtgtgcggtcagaccccctgcagcagtgggagctggtgcccattgaggtattcgaggcacggcaggtgaaggctagcttcaagaagctgctgaaagcatgtgtcccaggctgccccgctgctgagcccagcccagcctccttcctgcgctcactggaggactcagagtggctgatccaggtctctgcactgccccgtccctctgcccgccttggtgctgggccctccccttgggtagagccaagtggacgggtctaggtttgcttgtctgacagtgtggagcgctggaaggaggaggtgacagccacttcccacccaggctctggtgcctagaaggcagctgggaggctgggcctggctggggccagctgacagtgagagtggccagggcttgggcatgggtatgtcggagcagcctgctgggcccacgtgggctgatgaccacacgggggatgcagtttatggttctgggcccctgctgcattctctcgggggtgggtactgacaggatgctggcttggtaaacactggagggcttgaaggtagggccaccggcatcttgagggacagggacgtccctcagtcctagagggcttggaagggggtgggctgtgaccagcaggctggaggcggtggtcggcacacccagagcgagctgtgtttgtccagtgctctgcccgcatacagggcttggggggctgtggacagggcctgcctccccgctgcctgtggacatgcgggtctctggcctggtgagtggccaggcgggagggcggtgggtccccgaggtgctgaggccgcctgtccctgcagatccacaagctgctgcaggtgtctgtgctggtggtggagctcctggattcaggctcctccgtgctggtgggcctggaggatggctgggacatcaccacccaggtgtgtggcgcgtggggctggggtgggccaggctcccgggctcctcgctgacctcctggcggtgctggcaggtggtatccttggtgcagctgctctcagaccccttctaccgcacgctggagggctttcgcctgctggtggagaaggagtggctgtccttcggccatcgcttcagccaccgtggagctcacaccctggccgggcagagcagcggcttcacacccgtcttcctgcagttcctggactgcgtacaccaggtgggcaggccgctgtgtgggtgggccgggactgtgcaccctgaccgctgagccctggcccctgacccacatggcgtgcaggtccacctgcagttccccatggagtttgagttcagccagttctacctcaagttcctcggctaccaccatgtgtcccgccgtttccggaccttcctgctcgactctgactatgagcgcattgagctgggtatgtggggagtcggggctggggcagccacgggtcaggaggggcccaggctcagtgctgcttctgtgcagggctgctgtatgaggagaagggggaacgcaggggccaggtgccgtgcaggtctgtgtgggagtatgtggaccggctgagcaagaggacgcctgtgttccacaattacatgtatgcgcccgaggacgcagaggtaagctggggcctgggtcgggtaggcggctcctgcccgacccaggtcctcaaccacaggcccaccctcaggtcctgcggccctacagcaacgtgtccaacctgaaggtgtgggacttctacactgaggagacgctggccgagggccctccctatgactgggaactggcccaggggccccctgaacccccagaggaagaacggtctgatggaggcgctccccagagcaggcgccgcgtggtgtggccctgttacgacagctgcccgcgggcccagcctgacgccatctcacgcctgctggaggtgcgtgtgatcccagagcagggtctggcctggcacccccctcctctcgctcagacaccagggtcgtgcgtgtgtgtgtacactcgtacatgcacgtaagtccggttacccctgggggttggtgtggccctgccgtctccccaccatgtgaactgcctactggcctggggtggctgtggctccccagggccccgcaccactcagtgggtgc

SEQ ID NO: 9382 - DNA, 6000 bp, Homo sapiens
aaatgtttactgcgtacccaccgggtgcccgcatcccgcactctgcccgcgctgtgcggccctgcctagcgcgcgcgcctcctccaggcctcacccacgctcaggacggacgcgcgctggacggctcttccttgtcggagcgccccaggggtcggggaagagggcccggcaagggagccctcgcgccggagctgcagctgcagccgccgccccgccgccccgccggctcccacggggcagagacgcagctcctctccggtcttcccgtacgctaccgcgcccgggcagttcctcgcccgcgcacgcgccgctccgccaactgattggcctccggcgcctcggattggcccaggccgtccaacagcagccccgcccagagagagaccattggtccttgcccataggggcggggcccggcagagatctgcggaattcggccttcggaaagagcccccgggccggggcacggagagagccgagcgccgcagccgtgagccgaatagagccggagagacccgagtatgaccggagaagcccaggccggccggaagaggagccgagcgcggccggaaggaaccgagcccgtccgaagggagcggagcgcagcctggcctggggcccggtcgagcccgcgccatggcggccgaggcgacagctgtggccggaagcggggctgttggcggctgcctggccaaagacggcttgcagcagtctaagtgcccggacactaccccaaaacggcggcgcgcctcgtcgctgtcgcgtgacgccgagcgccgagcctaccaatggtgccgggagtacttgggcggggcctggcgccgagtgcagcccgaggagctgagggtttaccccgtgaggtgggaggtcaggggtcagcctctccggtgcgcggatcggggtcaggggtcagccgcggggccctcaggatgctccatgttttcgcccccctcttgcgcccgcgcctggggcggggcggggccggcctggccgggagggggccggggccgcggcaggtagggccggccgcgggctgagcgcgcctggtgtgggtctgcagcggaggcctcagcaacctgctcttccgctgctcgctcccggaccacctgcccagcgttggcgaggagccccgggaggtgcttctgcggctgtacggagccatcttgcaggtgaggggggtgtgagcgccgcagcaccagtggctttagggcctgtcgcttacgcgatgcgggtagtattgttcccgttgcgcagttgaggacaccgaggttcacggtctgagtaacacctcattacaccgaagcctgggcctgtattcccagagctttgggaggctgaggcgagaggatcacttgagcacaggagttcgagaccagcctggacaacatagtgagacccccatctctaaataaaaatagaccaacgctaaagcctgtgctccagagcctccaggcaattggatcagaagtcgcagctctggtgggaggaaggcgagccctcatgtgtgtccctgtgccactttgccttggcccctttgctgtccatcctttttcagggcgtggactccctggtgctagaaagcgtgatgttcgccatacttgcggagcggtcgctggggccccagctgtacggagtcttcccagagggccggctggaacagtacatcccagtacgggcccagtcctaccctctcctccccaaggcacctccaccccctaaccctaccccagtgcccaatgtctgcctccacatccctcaccccaagtagggaatttcccccaaaaccctgacttcccctcattgccccagcccttcccactcctgccccagccccatcaccaccctgatagcttcctgggtgcagagtcggccattgaaaactcaagagcttcgagagccagtgttgtcagcagccattgccacgaagatggcgcaatttcatggcatggagatgcctttcaccaaggagccccactggctgtttgggaccatggagcggtgagtcaggagcctcctcagggctcctgtactcctgagctgaacctccatgccagcggatgtgtcgggggctctatccagccctccacttgagtggatctgatgtcatgggctgtcacagaacaggcttttaaatgcttgccagaggccacatgcagtgcctcatgcctgtaatcccagaactttgggagccgaggtgggtgaggtgggaggatcacttgagcccaggaggcggaggttgcagtgagctgagctcatgccattgcacttcagcctgggtgagagcaagactctgtctcaaaacaccaaacaaaaaaagaaaaaagaaatgattgccaaggccaggcacggtggctcatgcctgtaatcctagcacttcgggaggctgaggtgagcagattgcctgagctcaggagttcaaaaccagcctggacaacacagtgaaaccctgtctctattaaaatacaaaaaaattagccaggcatggcagcatgcacctgtagtcccagctactcgggaggctgaggcaggagaattgcttgaacccgggaggcagaggttgcagtgagccaagatcgcgccactgcactccagcctgggtgacagagcaagactccatttcaaaagaaaaaaagaaatgattgccggacaagtcacacagtgataggagcaggggtgcagtagtctggcctgaggggtagataggcgaggggtgggaaagaatagcagagccagtgtatcctattctttgggcttcaggtacctaaaacagatccaggacctgcccccaactggcctccctgagatgaacctgctggagatgtacagcctgaaggatgagatgggcaacctcaggtgagggcaggcaggacaaggctaatggtaatggtgtccgcccttccagtagttgctgagggctggtgtcagggcctggcctgttagggtggctctgatcctcctctagtcactcctgctcaggacccatgctcccatacccctgtaggaagttactagagtctaccccatcgccagtcgtcttctgccacaatgacatccaggaaggtaggagaaggcatctgagtctcctaacccaagatggaagagccagagggctctggagtgagcagaacctcaccccattcccccagggaacatcttgctgctctcagagccagaaaatgctgacagcctcatgctggtggacttcgagtacagcagttataactataggtgaggctggaaagatggcttcccatagatctgttcccatagggctcttgaaaacaggccagctgcccagggcatttggggactgaatgtccaccttattctcccaggggctttgacattgggaaccatttttgtgagtgggtttatgattatactcacgaggaatggcctttctacaaagcaaggcccacagactaccccactcaagaacagcaggtatgtgggccagaggctggggagcaggacccatcctgtgaggaaggagggaggtggagtctggaaggaatggccggaaaggatgttacctgggaaatactccacagtctccccaattcctgactcttggccattgatcgtagttgcattttattcgtcattacctggcagaggcaaagaaaggtgagaccctctcccaagaggagcagagaaaactggaagaagatttgctggtagaagtcagtcggtgaggaaggaggggcagggtggggtagggcagagcagaggaaagagggattggggaagaggcagatttatcaagctgcagggaaggtggctgtggagagtggagttaggacagtgggggagaagttaaaactgtagggattggccaacctgggtgaggggatccaagcagtgctagacatgctcttgaatgcccctccttttcctgccctccccccaggtatgctctggcatcccatttcttctggggtctgtggtccatcctccaggcatccatgtccaccatagaatttggttacttggtaagtgaccctggggatgggaatgctagctggggggctggggagcagcagcagccacactcttccaggaggcctggggagtcccgggtggctgtgggcagcctgaggtggatgtagaatgctggtcccacgtcttctcaccactgtgtggggtgggtttccttccctaggactatgcccagtctcggttccagttctacttccagcagaaggggcagctgaccagtgtccactcctcatcctgactccaccctcccactccttggatttctcctggagcctccagggcaggaccttggagggaggaacaacgagcagaaggccctggcgactgggctgagcccccaagtgaaactgaggttcaggagaccggcctgttcctgagtttgagtaggtccccatggctggcaggccagagccccgtgctgtgtatgtaacacaataaacaagcttcttcttcccaccctgtcctggccctgctgagcagcagcagaaagtaccaaaccgagcagtacacacaaagggactcttcagtgctctgggattgaaagtggttagcgttcatgctgccagttggggtcccccatccctccccagtcccctggctgcagcttagaataataaatactaggacttggggaggaggagagtgatgggggtatgaagacgaccctgaggtggggatgccgcccggagcaccagcgatcccagaacaggcagcagctgacacatcggtgaccttttccctacatttggctatttttagctctaaagccaccatcctcacgagactctggggccccccaggctcccagacctttgagcaaccttcaccgcacagaaacccagccgcgccctgcaattcccaccgcggaaggtgggtgggttctggttctcgccccacgtttttccccgaccccgatttgggagtaggtgtcaggttcctggtgagggcggggcgggggtggctaggcctgaaggacgtggggacacgggccagagtggctggccccacgcacggacaggagtgaacccgagctgtgagtaggggccggcacagggcggcccgcgggggtctgggccctcagccctgcacaggggcgaggacggcgctggggcccgcgcgctcgggtggggaagggcgggctcccgaaccctgcctctgtccaggccggctccacttccaggggcgcctctctcccctgcccgcgccctcgctgacgccccccaactccaggctgcccttcgccgtccttggggctcctggagctttcaaggcccaaatcccctgcaccacagtggctgtgcccacccggaaggctggcgcgaggatttggcggcggttggcctggcggggggcgcgggccgggggcagccgctagtcgcggggtggggggcgcgaggggtcgcggactggctgggggcgtctcggcgcggctggcggcggggccggcctaagcgcgcccgcgcacccatctgcccccgtcctaggtgccgaccaacccccaggatggcggaagctcaccaggccgtggccttccagttcacggtgaccccagacggggtcgacttccggctcagtcgggaggccctgaaacacgtctacctgtctgggatcaactcctggaagaaacgcctgatccgcatcaaggtgcgcacaggtgcttctcccagagcgtaggcagaggccggctgtcagctgttaagcgctttgttagggtccctcactgcctccttggctggcacttctgcccggtacaggttgtggaagtacagacaccagaggggtgcacaggatgtggtcggacacagggagctgtgggtgtggcggaggaaggagcacagcagggcatcaggagagaaagccttccaggccaagaccaggagccagttcccaagacttcacaggcaggctaacctcccgccttccggctccataagggcgcctgtttctgcccacagaatggcatcctcaggggcgtgtaccctggcagccccaccagctggc

SEQ ID NO: 9383 - DNA, 6000 bp, Homo sapiens
gatcatccaggcaggtggagcagcctgaacaaccccatcctgcagccgccagacgtggacgcctggggtcagggagaatagtgagggtcagcatcgggtgatagagaaggctccggctgccctgagccacaggggtggaccccagccccacctcattagccttgtagtcacaggccagttacttaatacaccatggattcacttttctgtaaaatgtactgataatgcctccctctaagggtgtgacgaaggttaaatgagtagctgaggaaggtgcttgctggtggggattagtacataccagtgtcttctcccacctgcagccctctgctggccaagtcctaagccgggagaacacaggccttccggttggggcttcagcccttgcctgccccaccatgaccctaggctgctccttccgtcatctgggaagctgtttccacccttccctaggctcgtcaggattaggtgttaatcattattaattattatgtggtagaaagaaaaccagccaggcatgggaggacctatgggaggttccaataacattcagtagcatctcggccagtgctccacaggcggtgcagctctctaaaggtttggggctgggcggcggcggcgcttttggtttcctttctgctgttgcgcttctgttttccgaagtgtcctgcaccacagggtgaaggcaagaggagcctcgctgttatttggctgtcttgtgacagttctggggaagagctgaaagggttaggattgagattaaggttctaagtcgtttgctcagtcatctgtggatctcaatcctcccagctgtcactaaggagttaacccccgcagagcagttttttcatcacatctctgaggggaacaattgcttaagtatgtgggttccccttcctcacctcaaaaataccaggaggaaatgttgcaagcagcctggtggggctgcttctggaaagaagtgtggtaagatgcatgtcttctgtaaagacacttctggggaagagcttttcctcatgtggagtcagtttggggtggccaaatttcagggagacagggcagaccaggaccgtaatgaggaaccagaatggacaccaccccctgccccccggcactgggggtcccagctggatcagtgctacaaaataactgtgatcccaattgattatgtacaacgtgccaggcacgtcacatacacacactcatttaatacccattaaacaagagcaaatacagacccacctcacagaggaagaagctgcatttcagaggcactagtaactgctccaggtcatagtgctcgtagtggcagacccaggactcatgcctgtgcgaccacctagcacggcctcgctgctcagtctcggggctgcccccttacccttcaccctttgtcagggatggggcagacaccctgtgagctggtttctatttctcttcccaaagaaccactccagtgtatttcttttcctttccagggcctggaagtgaaaaatacagtgatgacaccaaatacaccggtcagtatttcctggtttgcatgtttgcttatttttaaagcagtggagggttctcctgggataagtgcgtgggtcgcctcctgtgctctaactcccaagtcccttcaggagaccccaccttagaaacccccttccagtaccccactcagaagggcccccaataacaaggcctgggtgccattttttgaatcactcagacaaggaaagaaaggtaagtattttgtgaacagaggtcctccctggagcagaccaacagagcttggtgcctctttttcttttcttaattaaagtataggctaaagaccagctaggaacgttgagagattctttttcccacaaggcagcagactgatttttttcaggcagccaaaggtggaatagtaacatctgggtttttccaacaggcctcagttgggtttctcagcttagggagggagccaagctctgtgtcctggtccaggcccctcctgggctggcaggcacagagctgccctgggccctggggtgagggtcagcatgtgtggtcttgtttccttagatggcctgcctgcggctgacctgatccccccaccgctgaagcccaggaaggtctggatcatctactcagccgaccaccccctctacgtggacgtggtcctgaaattcgcccagttcctgctcaccgcctgcggcacggaagtggccctggacctgctggaagagcaggccatctcggaggcaggagtcatgacctgggtgggccgtcagaagcaggagatggtggagagcaactctaagatcatcgtcctgtgctcccgcggcacgcgcgccaagtggcaggcgctcctgggccggggggcgcctgtgcggctgcgctgcgaccacggaaagcccgtgggggacctgttcactgcagccatgaacatgatcctcccggacttcaagaggccagcctgcttcggcacctacgtagtctgctacttcagcgaggtcagctgtgacggcgacgtccccgacctgttcggcgcggcgccgcggtacccgctcatggacaggttcgaggaggtgtacttccgcatccaggacctggagatgttccagccgggccgcatgcaccgcgtaggggagctgtcgggggacaactacctgcggagcccgggcggcaggcagctccgcgccgccctggacaggttccgggactggcaggtccgctgtcccgactggttcgaatgtgagaacctctactcagcagatgaccaggatgccccgtccctggacgaagaggtgtttgaggagccactgctgcctccgggaaccggcatcgtgaagcgggcgcccctggtgcgcgagcctggctcccaggcctgcctggccatagacccgctggtcggggaggaaggaggagcagcagtggcaaagctggaacctcacctgcagccccggggtcagccagcgccgcagcccctccacaccctggtgctcgccgcagaggagggggccctggtggccgcggtggagcctgggcccctggctgacggtgccgcagtccggctggcactggcgggggagggcgaggcctgcccgctgctgggcagcccgggcgctgggcgaaatagcgtcctcttcctccccgtggaccccgaggactcgccccttggcagcagcacccccatggcgtctcctgacctccttccagaggacgtgagggagcacctcgaaggcttgatgctctcgctcttcgagcagagtctgagctgccaggcccaggggggctgcagtagacccgccatggtcctcacagacccacacacgccctacgaggaggagcagcggcagtcagtgcagtctgaccagggctacatctccaggagctccccgcagccccccgagggactcacggaaatggaggaagaggaggaagaggagcaggacccagggaagccggccctgccactctctcccgaggacctggagagcctgaggagcctccagcggcagctgcttttccgccagctgcagaagaactcgggctgggacacgatggggtcagagtcagaggggcccagtgcatgagggcggctccccagggaccgcccagatcccagctttgagagaggagtgtgtgtgcacgtattcatctgtgtgtacatgtctgcatgtgtatatgttcgtgtgtgaaatgtaggctttaaaatgtaaatgtctggattttaatcccaggcatccctcctaacttttctttgtgcagcggtctggttatcgtctatccccaggggaatccacacagcccgctcccaggagctaatggtagagcgtccttgaggctccattattcgttcattcagcatttattgtgcacctactatgtggcgggcatttgggataccaagataaattgcatgcggcatggccccagccatgaaggaacttaaccgctagtgccgaggacacgttaaacgaacaggatgggccgggcacggtggctcacgcctgtaatcccagcacactgggaggccgaggcaggtggatcactctgaggtcaggagtttgagccagcctggccaacatggtgaaaccccatctccactaaaaatagaaaaattagccgggcatggtgacacatgcctgtagtcctagctacttgggaggctgaggcaggagaattgcttgaatctgggaggcagaggttgcagtgagccgagattgtgccattgcactgcagcctggatgacagagcgagactctatctcaaaaaaaaaaaaaaaaaaagatggtcacgcgggatgtaaacgctgaatgggccaggtgcagtggctcatgcttgtaatcccagcactttgggaaggcgaggcaggtggattgcttgagctcaggagttcaagaccagcctgggcgacatagtgagacctcatctctacctaaatttttttttagtcagtcatggtggcacatgcctgtagtcccagctactcgggaggctgatgccagatgatcacttgagcccaggaggtagaggctgcagtgagctataatggtaccattgcaatccagcctgggcagcagagtgagaccctgtctcaaaaaaaataaaaaagtagaaagatggagtggaagcctgcccagggttgtgagcatgcacgggaaaggcacccaggtcaggggggatccccgaggagatgcctgagctgaaggattgtggttggggaaagcgtagtcccagcaaggaagcagtttgtgggtaagtgctgggaggtgagtggagtgagcttgtcagggagctgctggtggagcctggaggggaaggagggaggcagtgagagagatcggggtggggggtggggggatgtcgccagagctcaggggtggggacagccttgtgcgcatcagtcctgaggcctggggcacctttcgtctgatgagcctctgcatggagagaggctgagggctaaacacagctggatgtcacctgagttcatttataggaagagagaaatgtcgaggtgaaacgtaaaagcatctggcaggaaggtgagtctgaagccctgcacccgcgttccgactatcagtggggagctgttagcacgtaggattcttcagagcagctgggctggagctcccctgagctcaggaagccccagggtgcaagggcaaggaaatgaggggtggtgggtcagtgaagatctgggcagaccttgtgtggggaaggggtgctgctgtgacttcagggtctgaggtccaaagacagcatttgaaaagaggctctgaagccagtgtttgaagaatttgttcctgaagtacctcctgggggtaggctagaggcttctggcttcagggtcctgaagaacacattgaggtgccgtctgacactggaatagggtgcccttcattcctatgcctgagtccttaactatatttccaacctccagtgaggaggagaagattcggaaatgtgacaggagagcaaacaggacagtttgcatgtgtgtgtgcgcacacatacatgtgcgtgaaagattatcaataaaagtgcataaatttgttgatctggtaagagtttctagcaggaaggtcgagccacttactgtaggtcaagaagttgctagttgcggagttttttcttgcagttagactttacctagtggtagcagggccaccaaagctctgtgtcccagatggtgtatggcccataatccacccaacagcagcaaaggaccaggcaaaggagaacaggagcagaagcctcccagccactagccttttgggctcagtctctccaataatcctggagaggggcttcgttgggtctggacacctaccatgcattctgtgacctttccctagcttccaataaataactgtttgacgcccagagtacaggataccacaatgcactcttcctgcgtagagcacatgttcccatctgctcccattcctcaggaaccttgaattctagctctgctggcctttgagcccatgccagtaaatgtcctgatgggcattg

SEQ ID NO: 9384 - DNA, 6000 bp, Homo sapiens; identical to SEQ ID NO: 1014

SEQ ID NO: 9385 - DNA, 6000 bp, Homo sapiens; identical to SEQ ID NO: 2192

SEQ ID NO: 9386 - DNA, 6000 bp, Homo sapiens
tcgatatacgccgctcaatcttacctttttaaaagaattcaaggatgcttgtactcagtatgttcctacttctccatatgttaaaacggtattacagactctttgtaccgaggtcattttgcttcctatagactgcgaccttttggcaaaagctgttctaactccatctcagcatttacaattccatacctggtggtcagaggaggcccgcctgcaggctcagctaaatcgggctgatggcattccaattactcaggctcagctcacaggctccgataattactctgatactactgctcatttaggctttgatgctctcaccacggaacaagtaacaaaggtgtgtatgagagcttgggataaattacgcaccccaggccaagcttctgtttcttttactattgttaaacagggtcacaatgaattatatcttgattttttagctaaattacaagatgctgttgaaaaatctgtctctgatgagcacactcaaggtattcttcttcatatgttagcttttcaaaatgcgaaccatgagtgtaaaatggccgtgcattccatcctacgtcaaaatttacctgatcatgaggtgttgcctgcatatattaaagcttgtgaaggcgttggatcggagacccacagagctattctgtgggcaccggccatgaagcacggcaaccaaactggctcgactgattcttttcttggagcctgctataattgtggccaacttggtcatacccaaaaaaactacactgttaaaaacttaaaagcggccaagccggctcaacaaacacggccaaatgctcctgctactgtttgcctgcgttgtcgtaagggtaaacattgggcaagtacttgccactcagtctgatatagatgaaaatcccttgccacagaaccagggaaacaggaagcaaggccagtcccaggccccaatatcaaatgggacacctcggactcagaccaatgttgtgtttttgcgtcaagcagtcccaacgcagcccccagcacaaacaaatttacctacagccaatccagatgggtcccagcctcttcttctgtctcagtacaatgcttgtctacctccacagtaggcagcagggcggtcgatctctgtagtaccattcctctaaatttactacctaattctttgcctttaattgtccccatgggggtcactggccctttacctcaaggttcggtgggcctggtgttaggcagggcatccacctcatgatactaaaggtatcatagttcatactagtctcattaattctgattcctctgatgagattaaacttatgtaaacttatggtgtctgccaaagttcctgtttccattccggccagtgagtcaattgctcaattacttttactacctaacattgttttaaacaaaggagataagacatggggccctgggatgggctccagcggtgaaaaagccgcttattggattaatgtaatttctaaacaatggcctacctgcaccatacacattcaaggaaaaaaggttgagggcctagttgatactggggctgatgtttctattatttcctctaatttatggccttcctcctggcttaaacatcccactaacatgaaactagaaggtgttagaaaagctgaagaagttcaccagagcacatttatcttggcttgcactggccctgatggtcaaaagggaacaattcagccttatatcatgcccatccccattaatcttcggggcagagatttgctggcacaaattggggctgaaattaatattccacataacttttacagtgctcccagtcaacatataatggaaaacatggggtttgtttccagactcggtctcggtccaaaacgtgaaaaaattactaaacctcttcaagttactgtaaaagaagacaaggctggtttaaaagcataatttaactactccccactcccaattatatttagcattgtttaagctttctaaatgttcctaaaaacaatactctgactgcagctaaatgccattatacaggcaaaaaattctccctaaacgaaggcaagccagtgtcatggaaaaactcccaaaccaatacctgggaacctggaacaattataacgtggggaagagggtatgcttgtgttttaccaggagatcgtcaatcccgtctgggtgcccactaggagacttaaacttcgtgtgaatactgacaataaaaaccacgaggaagagacgttcgcgtcagagactgccctcatacctgatgagatctgtaccgactcctcagaaactggcatgccaaatcaaaatgggtctggttcaatcctccctaatggcaatgtaaacccctctaactaatcccacttctcctaattatctttttctccttacgaacctaaaaatctcaccatttctattagcctgaaaataacatccctctgttcttctcttcctccttcagcactggatctcacttacaataggttttatttaataattatcttccttacactttctgtctcaccagtttccccttaaactgatttacctgctacacaaaattattcttattgggcttatgtgccttttcctccacttattcgacctctcacctggatggatgctcctgcagaaatctatactaacgatagtgtgtggatgcctggaactacagatgaccgttgcaccgctcagccaggagaaggcactgcatttaatgttactatgggttataaataccctcctctgtgccttggacatgcacctggttgtatccatctagaagctcaagtctgggctgcttgtcttccagagagattagctatagggaaatggggacatttggtctctggcctctccctttctcctttaagacaaataaaaagaggagtaataggagataccccatactttcaatataaacctgtaggaaaaccatatcctaaaaattttgagggcccatctaaaacttcaatttgggaatgattgtgttaactcacatgcagtagtattaaaaaatgactcggctgggcgcagtggctcatgcctgtaatcccagcactttgggaggccaaggcaggtggatcatgaggtcaggagattgagaccatcctggctaatacagtgaaatcccgtctctactaaaaatacaaaaaaaattagccaggcgtggtggcagatgcctgtagtcccagctactcgggaggctgaggcaggagaatggcgtgaacccgggaggcggagcttgcagtgagctgagatcgcaccactgtactccagcttgggcgacagagcaagacactgtctcaaaaaaaaaaaaaaaaaaaaaaccccaaaaaaacaactcatatggtttagtaacagactgggcacgaaagggctatttaaaaaacagttgctcctctggcggaaaggaatgcctggagactacttattttatttcttactgggaggaccaggatcatcatcctattttgcatagaaggttcagtttgttctttcccttaaaataggaagataagggcattatccccctaagtctcgtatgatattccccattctgagtccagaatacctagaaatttggaatttggctattgccgtgtctggactgtgagtatgggaaggggaagcttttctgtctgttgtccccactaccgcccctcacatccgtgattctgaaccccatgataaatgccctttgaacctttttcctccttttgatgccgaatccccttttatgggactccgccagcacgggtgcatttaaccttcctgagcttgcccacctgacgcatgcagccaagaagctttgaaagatggagtgccctggctgagggttccaggtctcagcaaggccacgaggtggtgactgcctcccagaactctgttgggccaccctccgtcctggagacccccaaaacctccatagcaccaactctgcccattcacacacacagtcagccctccctcccgagtccaccgcgggcagagggccagccaccatgcctcccatagccgccatccctgggaaggagccctgaccccgtccttacacccctctacactcactgcctgtggggagagctgctcgctgtcacaagcatccagggggctgggtcgaggggccccctgcatggtgggggaccatgttgtcgtgcatggaatgaaactggccacacataacagatatggtggcgctctggtcggatctaggggagtctgtcctacaggatgaggcttgaactgtcctgagtgaccagacacccagcctctgcttcgagtgctcagttatgattattgtcctgatttagttaactgttcttcaggggctccaggaggacgagtgtgtatcctcccattgctctgtgcagcctctaacctctagagtctaggggtctggggagaagttgggaagtctggccagtggggccggtgcctggtgacctcgggaggtgggatatcatcatcttcagaactgtagttgttactgggataccagctctgggagaccacaggtgcagtcagcacagcaggaccttagacaaggcacccagccccagtttccccacctgggaagggggctacttgtggctagaagcagcccggactcctgagcaagactagaccaagaggccggtatgtggacacccccgcgtgggcacccccacggggacaccctggccaccgccgcgcggacaccctcacgaggacaccccggccgcgcggacacctaccgcggggacgccccgaccccatcctacctgctgcgccccgcgccgcgccccgcaccccgcccgccacggcctgcgtccgccaccggaagcgccctcctaatccccgcagcgccaccgccattgccgccatcgtcgtggggcttctggggcagctagggctgcccgccgcgctgcctgcgccggaccggggcgggtccagtcccgggcgggccgtcgcgggagaggtgagagcgctggctagaccggggccgaatgcggccggattcggggcgggggccttcagacctagggtggaacactgggatagggtgtggggaattcggaccgctgtgaagtgatctgacgttgggtgggagtctccggacttggggtggggaatctggatgggaactggggaattcggaccttgggtggggatctttggaccggggtggggtccccagactccttgtggaaagctgaggttgaagatctgtgctgtgatgaggggctccagatagcggtgagagatcccgcttcaagactgggttgggggtccagaccaggaggataagcctctccctggagtagggcttgacctggtgagggtgtggtagagtcacaggggagggtcccacttggtccttgggctgggatcagactctcagagctggagagttgcaggaggcctgggggagggtctgtggagccccagactcagagggccttggtgacttctccaacaggctccctgttggaggccttggggtaccccagggcctttccctgcaagagagaggctgctccaccaggaaggggcccaggactccccagggtcggggggatgtgtggtgtgcaggaccacgtgggaatgttagagaaaggggaagtcactccgggcctgccctgctaacagacctgctttttggatttttccagccagggatttttgtgtcctgttgctttttattgtttaaagtgaccctccaagcctgagggaccgtaggagctgccctgcagagcccagtgagacactagttaatgcagaaaaaacagattttacttggtaactactgacaacatgagaaaaagctggctccatgctgatttgtctagatgtgcctggagtttaaagggagagtgagggagtgggaaggggtggggactcagtagagttagggaaacagaaaatcaccaaaactgggaagggagggttggcccctgtgaaaccaactgatctgggtttgccactggggcttaccgaagtcaggcccccaacctcccacagagactgggagac

SEQ ID NO: 9387 - DNA, 6000 bp, Homo sapiens
ttacaggtgcccgccaccacacccagctaatttttgtatttttagtagagacggggtttcgccatgttggccaggctggtctggaactcctgacctcaggtgatccacctgccttggcctcccaaagtgctcggattacaggcattagccacctcgcccggcctttacatttttttttatagagatgggggtctgcccatgttgcccaggctggtcttgaacttatgcgctcaagtgatcctcctgcctcagtctcccaaagtgctgggattacaggtgggagctactgcgtccagcctaaaatgtttgaagttaggtttttgcattaggtttgtgtgtacctggaatgacttttgtatatgaagtgagacagaggtccacactttttccccatatcatcaactgtcctagcgccatttattagcccgtcacttcccacttatttattattattattttttgagacggagtctctctgtcgcccagacgggagtgcagtggcacgaccttggctcactgcaagctccgcctcccgggttcacgccattctctcgcctcagcctcccgagtagctgggactacaggagcgtgccgccacgcccggctaattttttgtatttttaatagagacagggtttcaccgtgttagccaggatggtctcgatctcctgacctcgtgatctgcctgcctcggcctcccaaagtgctgggattacaggcgtgagccaccgcacccggccacttcccacttatttcttaagggggaaaaggcaatggttgttttgaaaaaaaattaacctgctctccctctccctctccctctccctctccctctccctccccctccccctccctctccctctccctctccctctccctccacggtctccctctgatgccgagccaaggctggacggtactgctgccatctcggctcactgcaacctccctgcctgattctcctgcctcagcctgccgagtgcctgcgattgcaggcgcgcaccgccacgcctgactggttttcgttttttttttggtggagacggggtttcgctgtgttggccgggctggtctccagctcctagccgcgagtgatccgccagcctcggcctcccgaggtgccgggattgcagatggagtctcgttcactcagtgctcaatggtgcccaggctggagtgcagtggcgtgatctcggctcgctgcaaccacctcccagccgcctgccttggcctcccggagagccgagattgcagcctctgcccggccgccaccccgtatgggaagtgaggagcgtctctgcttggccacccatcgtctgggatgtgaggagcccctctgcctggctgcccagtctggaaagtgaggagcgtctctgcccggccgccatcccatctgggaagcgaggagcgcctcttccccgccgccatcccatctaggaagtgaggagcgtctctgcccggccgcccatcgtctgagatgtggggagcacctctgccccgccgccctgtctgggatgtgaggagcgcctctgctgggccgcagccctgtctgggaggtggggagcgtctctgcccggctgctccgtctgagaagtgaggaaaccctctgcctggcaaccgccccgtctgagaagtgaggagcccctccgtccggcaaccaccccgtctgggaagtgaggagcgtctccgcccagcagccaccccgtccgggagggaggtggggggggtcagccccccgcccggccagccgccccgtcctggaggtgaggggctcctctgcccggccgcccctactgggaagtgaggagcccctctgcccggccagacgccccgtccaggagggaggtgggggggtcagccccccgcccggccagccgcccagtccgggagggaggtggggggtcagccccccgcccggccagccgccccgtctgggagggaggtggggggatcagccccccgcctggccagccgccccatccgggaggtgaggggcgcctctgcccggccgcccctactgggaagtgaggagcccctctgcccggccagccgccccgcccgggagggaggtgggggggtcatccccccacctggccagccgccccatccgggagggaggtgggggggtcagccccctgcccggccagccgccccgtccgggaggggggagggggggtcagccccctgcccggccagccgccccgtccgggagggaggtggggggggtcagccccccgcctggccagccgccccgtccgggagggaggtggggggatcagccccccgcctggccagtcgccccgtccgggaggtgaggggcgcctctgcccggccgcccctactggaaagtgaggagcccctctgcccggccagccgccccgtccgggagggaggcggggtgggggggggggggtcggccagccgccccgtccgggagggaggtggggggggtcagccccccttccggccggccgccccgtccgggaggtgaggggcgcctctgcccggccgcccctactgggaagtgaggacccctctgcccggccagccgccccgtccgggagggaggtgggggggacagccccccgcccagccagccgccctatccaggaggtgaggggcgcctctgcccggccgtccctactgggaagtgaggagcccctctgcctggccagccgccccgtccgggagggtggtgggggggtcagccccccgcccggccagccgccccatccgggaggtgaggggcgcttctgcccggccgcccctactgggaagtgaggagcccctctgcccggccacgaccccgtctgggaggtgtgcccagcggctcattggggatgggccatgatgacaatggcggttttgtggaatagaaaggcgggaagggtggggaaaaaattgagaaatcggatggttgccgggtctctgtggatagaagtagacatgggagacttttcattttgttctgtactaagaaaaattcttctgccttgggatcctgttgatctgtgaccttatccccaaccctgtgctctctgaaacatgtgctgtgtccactcagggttaaatggattaagggcggtgcaagatgtgctttgttaaacagatgcttgaaggcagcatgctcgttaagagtcatcaccactccctaatcttaagtacccagggacacaaacactgcggaaggccaaggccgcagggtcctctgcctaggaaaaccagagacctttgttcacttgtttatctgctgaccttccctccactattgtcctatgaccctgccaaatccccctctgcgagaaacacccaagaatgatcaataaaaaaaaaataaataaattaaaaaaaaaaaagaaaaaaattaacctatcaaaataaaatatcagcagttgaaactaacaatgtattaataacaataatattatgaccaagttgcgtctaccccaagaattcaagaatggtttaccattagaaagtttattgatgtaactgatctcattaacagattaaaggagaatacccatatgatcatcttaatagatgcacgaaaagcatgcaataaaatacctatttattataactgctaatattttgtgtttttccttaaaaatgcagtgtttttaggaattaaagttcagagcagcaaaagtcaaacaaaaaccaagtctgagcaatagagctactacagtgcccatcacagtgtctgctcaggtgacttcttaaggtcatgtccagctctatgtttctgtgaccacaaatagcatctttggcaagtctagtttcagttggtctttgtccagctcctggattcctccatgcagggcctgagaagccctgagggataaaagattaatccggttcagtggactctgtggttcctcaactccaagtgcccccagcataagtcggacctgcctctcacgcaatggatcccctggcggcaacccgagaccggttctcctacccgcattccgccaagtctctcgctctgcccaggacgcacagatgagagcgctccgaagactggtgggtctatctttcggtctttcctaattttcccgtcctctggggaaaggtcggggatacctgaaccaaagtgtgtgtgtgtgggggggggggggtgtaggtggggcgtgcatagatgtgcacaaccaagggcttggccctccggagaacgcccaggggcagtggcctccgaggttctggcggccggcagtggcgaccggcgcagggaatcgcgcagggttgcggctgaggtcagaccagcgagagacagagacccgcagacatttagtccagagactgtagcaaaggagggggacgaggggccagagccggaatttcgggggaggacttgggagcgcggcgaccagagtcgcttgctggcacttgcgagggcgaatgcaggggcttggccgagatgaccttggaccagagctcccttccggcctgcagagatgagcttggggcttagccgagtaaggagtgagcggcttttcagcctcagtgctgcggcagaggcggatggaggatgaactggagccgtccttacggcctcggacgcaggtgagctcccagcggcggcgacaaaccccgcggcggtgaccccaaaccccccccccgcggcggcgactcccccccaacacgctggggcgaactccccagcacccccagcccttcttaaaaacgctgagtccgcgcatgcgcctcaggcgccctccgcgacactctagcggctctgcgcttcactgcgcctgagcttgagtctcaggccttagtcccggccatcgtttagcgttgcgcgaaccctcagctggtgcggccgctctcaatacccactgcgcttgcgctacagcttcgtctcgacgggtttgctcctctcaaacgctcactgcgcgtgcgctagcgcctctttcaccactgggcgctgcgcgctgcccttccctccgcgcacaggctgccggctcaccgcttgctaatggcagccggggtctccctgggacagcaagacctccgctcaggcccctctttcgaatgctccacgccctcctgcgatctagaatggtatgaattctcatacttgcccagaccaggcgtttcagatgagggattgcggacctgagtgaactgcgcaggtgcagccacctgggaggcttaactaagtcgtcaaatgttcaaaaatatcgtgcttgtatgtacagtggcgttaggtgctaggctcagatgtgcataggcaggtgtttacgcccagggtcggcctgtgggccagagcaaggttgctggaccctggcatcccagcccccagagatgctaaatcctctgccgatcagccctgacctcagaggcagtaagccctccgagcgctgcaatcctgactgctcgccccctcccgagactgtttcccacccccgcctctttcctcctcatgctccctcagctctgacctgacgtcctgcctcacagagggaaagggcgcagccagaggagagcgcccgcactgcactgcccaccgcttctaggggttccttcccaatctggactgatttctttaggtatttgcatggcacattccctcacctcctttgtcttgatttgcacttgtattccttgacagccttatttaaaatagcaccaactaaggtgggaggatcgcccaggagttcgaagctgcagggatctaataggatctcaccactgcactccagcgtgggcgacgtagcgagaccttgtctctaaaaaataaaaataaaataaaataaaataaaatagcaccacctggtccaaacacttcctacgccccttcactgctttaagtctctgtagcaccagctgatgtactatatattttgcttgttcattttgcgattgcttgtctttctctgctggaaggaaagctctgacagctcatggattttgtctgttgttcactgctgtatcccaacacctagaacagtaggattattgaccataatagggaggcaataaatctttgtttgc

SEQ ID NO: 9388 - DNA, 6000 bp, Homo sapiens
aaccacgttacgtgggccatatggggagacaccagcctgagtcaggaggcagaaggagcaatggcagagcaagacccagagccttcattgtagttttctcatgaaggaatgagtgaggcagagtaggcaagtttgagcaagtttaggattggatagtctgaataattttcaactgggttataagtggtctctgtaaagtaccttgccctgaggtgattgagggtaaaggaaatactggcttagtgtatgagagttagataaaggaggcagttttgggtgtggactttggattgtttggtttgtacatgaaagacacgctgccagcaagttgtttactatctctaggaattagctaaccctgggaggagcatccttcaggattagcaaggcccaagataccaaagcatcataaaacagaaaacaaaaggcatgattaatacaaatatccaggaaggccttgcctggtaaatgaggaataattagcccaagactgagcgctggacctgaataacaagtcataaaaacaacacattaaaacatgaaactgtttttccggaccaattaaatatatccaagaataagactcaaaaagatttataggaatataaaaatgtccagtaccccacacagtaaaattcactgtctggctccagtcagagattgctaggcatgcaaagatgcaggaaagcacagcacataatgagattaagagatccaaaactacacagatgttagaattagcaaagaaggacattaaaagttataactgtgtatttcaaaagctgagcagattttaaaagaagactccctgatttcaagaattactatagagctgtactcatcaaaacagcatggtatttcatcaagttaagcaaatagatcaaaggaacagagtctgaaaacaaatccacacatgtatacaaaatgagttttttcaaagccacaaaggtaatgcactggagaaaggatagcattttcaacaaatggtgccagaacaattggatatctgtatggaaaaatccctcaaaacttgggtctatacctcatgccatacaaaaaaattaattccaaatggatcatccacttaaaactataaaacttctagaagaaatgtaaccctaaaccttgggttaagcaaaaattcagatataataccaaaagtactatccatgaaagaccaaactaatatattagaccaccaaaataaaaaactgctttccaatgacactgttaaaagactaaccacgaaattttggcaaagctaagtctaataaaaaatgtgtatccagaatatataaagaatttgtggccaggcaccgtggctcacgcctgtaatcccagcactttgggaggccgaggccagatcacctgaggtcaggagctcgagaccagcaacatggagaaaccccgtttctagtaaaaatacaaaattagcccagtgtggtggcacatacctgtaaccccagctactcaggaaggctgaggcaggagaatcgcttgaacccaggaggcggaggttgcggtgagccgagatcgtgccattgcactccagcctgggcaacaagagcaaaactctgtctcaaaaaataaagaatttgcaaagctcaataataagacatggggaaaaaatttgaacagacttgagaagatacagatggcaaacatgcacattaaaacatgttcaacatcattagtcattagggaaatgcccaagttaaagccagagagatattgctacacacccagaagaatggctaatgtttaaaaaactcaccatgctatgtgctgttgaatatgtaaagcaacaagaactcccaaacactgctgatggggatgtaaaactgcaccaccactttggaaaacagtttgacagtttcttaagacattaaaaatacatctaccttatgatccccacattccattcctaggtatttacccaagagaaaaggaaatatatgtccatgcaaaaacttatacatgaattttcatagcagctttatttgtaatagccaaaaactggaaacaactcaaacatccatcaacagatgaatggataaattgtggcacaccgtccagtgcaatactcggcaataaaaaggaactactggtacacgtgagtgagtctctaaataattgtgctaagtgaaaagccatatagaagagagtacatccggctgggtgtggtggctcatgcctgtaatcccagcactttgggaggctgaggcaggcagatcacttgagatcaggagttcaagaccaacctggccaacatggtgaaaccccatctctactaaaaatacaaaaattagctgggcatggtggcatgctcctgtagtcccagatacctgggaggctgaggcaggataactgcttgaatctgggagggggaggttgcagtgagctgagactgcactccagtatgggtgacaaagtgagacttcacctaaaaaaaaaaaaaaaaaagtatatcctatatgattccatatatccccaaatctcacaaatgcaaactgtaaaaaacaaagcaaatcaatggttgcttttggatgtcagtgggcatggagaggcgggagggagggattaccaagaggcatgacaaaactttcggggtgacaggtacatttactatcttgattgtgatagtggcttcatagatgtatacatgtgcaaaatgtatcatattgcacattttaatcttgtgtagtgctcggaatgtctactttttgtgtttcaattatacctcaatgaagggttattttaaaaaataaaatatttttaaaaaacaagccgagcgcaatggctcatgcctgtaatcccagcactttgggaagccaaggcgggcagatcacaaggtcaggagttcaagaccggcctggctaatatggtgaaaccctgtctctactaaaaatacaaaaattagccaggcatgatagcagtctcctgtagtcccagctactcgggatcctgaggcaggagaatgccttgaacctggtggggcagaggttgcagtgagccaagatcatgccactgcactccagcctgggtgacagagtgagactctgtctcaaaaaaaaaaaaaaaaaaaaaaaaagttgtgcatagttggaaaagaaaatactagatttcatgggtgattggcaactagctctaagtggaacaagtgcattttcctttccttccaggtcccagagaaaaacctccatgctgggttgatagcagcagctaggatcagttgcccaagactctggattctcgagatgaagaccgtcagcagaggctgatctctcctgtgggctcatgtcctaaagcaccttatttgggctcaaatatcctcccttttaggacagaaaagaagttcccgagtcttggtcatgttgggcctgtggagcacatcatcttttctacgtgtttccttttgatgttctcagcatccctgcaagatgttctcagcatccctgcaaggcaggctaaggcatgaggagctataggcccagggagctgaaggcagattctaagagctgggtgtggatgctgcacccctgagcctgggccgcctgggttttgctcagtctgggaagtacttccaaacccactctttgctagtcttttacaatcctgcgggagggcaaagcccagatcatcatggctgcttccaccatgtagctgcagatcaggaaactgaggtccagggaggtccttactggctttgctccagggacaacgaggcttgaggtctgttccccacaggaggaccatgatggttctcctgcttcaaatggcccctttggaaggggcttgctcatttaggtgaatcctggggccgagcagccccagtgatagtccctgggatggctgtaggagagggagcagcatgcaggcgttaacgtcacagactggcaccaggccacccgggcttacactctggctcctccagttcctggctctttgaacttggacaagtaatcccctttctttattttttgtttttttgagacagtctcgctccgtcacccaggctggagtgcaatggcacaatctcggctcactgcaacctctgcccaccaggttcaagcaattctcctgcctcagcctcccaagtagctgggattacaggcacccaccaccacgcctgactaattttttttttttttttttagtagagatggggttttgccatgttggccagcctggtcttgaacttctgacctccacccgcctcggcctcccaaagtgctgggactacaggcatgagccacgccgcctggccaacaagtccccttaacctctttctgcctcagtcgactcacctggaaaacagagcacctacctccttcaaatgagaagagaagtaaaggagtataaggccatcagaacagtacctggcccaagggaggctatggaagtgcttgttgaataaaaaaatggcttcatctctggcctagccccaaaggtttgagttcctgccattgccacccagacagccctgggtggaggccctgctgacattgaagagtgcctgccctcctcccctcaatgcggtagacactttccaaaacttacgtcatcctcactctcactccagtgggataatgggaggcttggtgtacctcattcccaagatgagggaacaggctctgagaggaccacatcgccagcaagtgacaggctgggaccaaggccaggcctgtctgcctcctagactaggcctgagtgaggaccggcctgagtacggcccacctgcttcctcctccgtttagagcttgggctggagctgtcctggccagtgctctctgcctcaccaggctgcatgagccacaagctgccacttgtggagctcggtggccctgccctcgacagccttgctggtggtcgtgaaggctctaaacacctgcatggcaatgaggccaaccttctccgcttgatccgtttcaggctctggctccgctactgcatcgtgtgcttctgtccaagaggcagagagactgaaactatctgctgccgcctggattctcccagagattgcctggaacaccagctcgggtcctcgcacaccatcctggtaggaatctctcagtgacaattgagagtttgtgggctggcttagggccagtggtgggcagggagtcagcagggcgcaagggactggagagcttggcatttctccaacaggagtttcagggagagctcagaggcctgcttatgtgacaggtttatcagcttgcctggcccagggccggctctcataccgttttgatttaaataatagattgctcacagaataaatgtatgttggtttaagctttcactttctcataatcctctctgctggcccctcccaccatctaccccattttgcctcactctggggagcctgaacaccctgttccagagtaggggcatagggaaacacttctatggcttctgagctgctgggcagggccagtccctaaaacaaggagagctgggagggagctggaccccaggatggagtgctgagagctgaaagtcctatttaacagaggggagggagcagagatcccaaaaagggaaaggcctggccaggtcccacagcaagtcaggagcagagcgggcctgaactgtgagatctccaatctctccaaagcctttgggtaagaagtccgcctaaagcagtgagatcagtggggtctgaggaaaatccttttcctcactgcctccatcccagtcctgggacccaacaccatcctgtcctcaccctccttggccatctccttttgccctgagaagctgttatgcatccagccagactgggaatgtgctggaatccatgcaccacaggggatggatgcgccgcttacagtccctgtgggccatggctgtgagggaaagtcagagctggtggctggggtgtgtaggcccaggaggacccctgcctcctccttagccttggagcccccctctgctgctgagtctttcctcatctagcagggccccactgcccccagaccttacctcctggct

SEQ ID NO: 9389 - DNA, 6000 bp, Homo sapiens
accctccctctgctgggtgtagaggtcgacagggtccttctggttcctgaggccacttacaggacattgtcccccagctttgaatctcacaccagcactgggtcgcccactccccttcatgatgagccagctcgaggccactttgcccgttcttcaaagatgcccccccaggccgggcacggtggctcacgcctgtaatcctagcattttgggaggccaaggcaggcggatcacaaggtcaggagatcaagaccatcctggctgagacagtgaaaccccgtctctactaaaaaaaaaaaaaatacaaaaaaattagccgggtgtggtggcgggggcctgtagtcccagctacccgggaggctgaggcaggagaatggcgtgaacctgggaggcggagcttgcagtaagccaagatcgcgccaccgcactccagcctgggcaacaaagtgagactctgtctcaaaaaaaaaaaaaaaaaaaaaaaaaaaagatgcccaccctagcttggtgtcagtcctctccagcactgctcctgctccagtcctggtcattggagtgtctatttctgtgaccctttccacacctggcctcctcttcccgcatggtcttgtccgccagcctcagccaactgtcaccagctggaccctagctaggcctggccctgccttcccagtagcctctcgcactccctgatcctccatccaggcgtctcctccaaccctcctacctttccatctccctctccctcccctgatcctagatccttgggcctggggcctctgaaccactgatcttcccctgtgcactggccctcaccaccccttggtccctcctgtctccctccgcacctcccagtggccacgtgttgcagctccagcccttctgcgcatcacactcgcctggcacagctctggttaaattcagtcctaggcatcttcacacctgcccccctcatcctagactatctcccctgttctggtggcccaggccagcctggctgcagcctcgtgagcctgttcctctcacctactcaaggacacacgtccatcagttctctctccctctctctcctccaccctcagtttcgccctctctactcttggctcttctgcgtcagcttgcaaatgtgcgtgattccccatctcaggaagacactccctcatccatttctctggtccttcagaagagttgtcaccgtctccagggtttcttctgcggtctcccacacgcactccccacgggctctctcgcccctcctcgccatcttctcaggctcattcctgaccttcacattgccaatctcatggccaactgtcattgatggatctctcagcagcgtctggcagccgtgaggggtttatgcatcctcccttgaatccaaacggctgcagaatgtggacgccctcaccccgctcgccgcagaatgtggacaccctcaccccgctcgtcctctctttaatatacatgctgagcacgggccggatgaggtgcctggtctgtagggagggctgacagtctagtggagggaaatgtggtggaaaccagttaaaatatggaggtgagcacagacccctagagagggacaggcaggtgacaccagcgttgagtcagcgttgagagggcaggagccagccaggcagagaagggggaaggaggaacagcgagggcaaatgctgaaaggcctggcagagcagagacgaggctgtcgcccctgctggggtgtacgcttggagggcgagaactgcatctgtcatagccccaggactagattgcttccaggcatctccttagggccccaactatggatggacgtggcgggaactgcactgatcggtcgtccttctagccacggttcttcaggtgtcccatctggcctttagggccctgctcaaatatcacctccctgtgaagccttcctggattctcccaagcttgcgctcccctccctgcttcccttgggctctgtggggatgactgacagagttctcaaaacagggagctttccccttctgtgcctttcttctctagaaggtgaggcagggcctgggaccagattatttccctgatgacctggaatttgcacagcaggagagaaaccaaacaacctcaggcatgcagggactggcagggcgggggcaggcactggggtgaggaaaagcagacagaactggatggttaaccctgcccttttttttttttttttttttgagacaaagtcttactctgtcacctaggttggagtacagtagcacgatcccaactcactgcaacctccacaatcggggtcaaccgattctcctgcctcagcctcccaagtagctgagattacaggcatccaccaccatgcctggctaattttttttgtatttttagtagagatgggtctcaccatgttggccaggctggtctcaaactcctgacctcaagtcatccacccgcctctgcctcccaaagtgccgggattacagccatgagccatcacgcccggccaatcctgcccttcttatcaactgagagacctcacagaacctcagtggccgcatctataaaatgggtacaacagcgcctaccccaggagtctcggggcatgtaaatgaggtctagccctgaagggctctgcagtgtttggttggcatttacacccctttccaggtggtgatgttgctcccctctcccacctcttccctgcctctgaaagggcagaggtgataagacctggggtaaagaaggccctgggggggtacaggattatggggatggtggtccagatacttctgccactgagagtaaggccctgggccagtcaagtgagccctctctgggtctttgtttcctcctttctctcctttttttttttttgtagagacgaggcctcactatgttccccaggctggtctcaaactcctgggttcaagtgatcctcctgcctcggcctcctacatagctgggattacacccatgagccaccgtgcccggccaatttccccctttttcttgaggctccaaggcccccttgaggttactcagccagaggagaggaagatggggcattctggaaagagggaggggcctgcagatcacccaggcccagcctcagcaccttggggaggcaggggtctgctcgcccaggccctgcccagcggagtccactccacccccaccaccgagcactcggggcgacagcttgcggagattacgcctaatccccagtgggtcacttccaaggctgcacaacccggtgtgaggcggggtgggggaggggcctggagcctcacctgccccacccccaccttttccccagagtgagactcttcaggaagacaaggggctgcccaacacccatcatgtgtccatgcggcttcagccattttcctcacttgaccctgggggaagacaaggccctgttcctgtgaaggggggcccttggcagcctgactcatttctcaaagtgtgaccgctcccttcttccctcagcctttccccaggaggcaggatggatgcctgcaccaggacaagggcaggaaggctgggttcagcttgtggggagagggctcggcagcccccttttcagggagtgagctccctgtgcacaggggtgtgcaagcggaggtgccagccaaggacgctcaggaggggatgattctcctttctaccccccgtgctgcctggccctctctgactatcagacttgctgtctactcccctcaaagcctttcctgaccctctccctgggtctgggggagagacgtgcacccaacaactgaaccaacaaataggaaagaagttatattgtgatgttaccaagaaaattaattgaggcactggagaataccttagatctggagtctggtctggagggcttctctggggaggtgtcttttgtgttgagatgtgcgtgttgaggagccagctgaaggaagatctggagaaatacaggcatcccaggcagaggaaagagccgagtgtgaatgccctgaggcagggatgaactcaggagggcttgggaggagagtgttggggagcttcagaggaaggcaggagccctggcgtttggtgggggaaggtctttacctgggcagggggcggtgggtgagcatcaatccaagagtctagacctggggggtgacatgacctgacttgggtttaaggggattgtctggctgctatgaggggacagagtgtgggggtgcaagtggacatatgggctgctgtcattgcctggagaggggtgacagtggcctgccccagggtggagggacttgacagttttgggaggaggttgaagcagctggcccgaatgtcagactggttggaggggtcgagtatgaacccaggactggggcccagcagctggtgctggggaggctgagagagatcactggggaggctgagagagcctggggcactggaggaaggactcatggcccaagcagggggacctcagggccattctagggtgatggactttatcttcagccagcggagggattgttgaggtttggagtgggtgatatccccctggctgctgcctggggactgcctggaggaggctggagaggaggctgtggtggtgtcaggcacctggacatgggcaggggccagctgcctggctgcctgcaccgcagggcagggaccagggctcccccgagccacccagctcagggatgttcctgcgcagggcgaggtagacggttccatttggagctgggaggacagagtgccgtgggctccagatgtcatctctctgcagcttatctggggaaagccagcattgtctaaaaacgtttaaaacgaggcctctaggaggttcctggcagcgttacagtgatctcagccacccccatgctggctgggcacagctcgccctgagccttcgttagccgacgccctgcagtgggtcctaggcacaccctgggtggtctgtctgcagaggggagataccatctcccctcaagtaaagtgggcctgtgcccttttgcactgcgggacacggctcaggaccagcaggcatgcctccttggtctcatgttgaccttagagtttgggattctggaattcgatccttcatggataggcagctggacacagaggtcgtgggtgagctggaggagcaggcccggatgtgaggcaggttccccatctgctgtgggtcagcgagaggcagggcctctctgagccttagcctccctgactgtgaaatgctctaagtataagactgctttgtggggatgatttgcagatttttatggggattaaaatagatgatttaggtgccttcttccattggcaccagctcctgggaggctgtgggctggttcagggtctcagagtggggacagacttgtaaataggtcccagccaggagtgaccaaggctcagggtgggaaagagtgactgggaagtgggttgtccctgaaggtgtctgggagtcactatatcccagcagcgttcagagggcaaagaggagttcgctcccattgaagatgaagaaggtaggaaggcaggtgcagagttgtcagacagcctgaggacaccacccactctcagccctctgtggtggctgcatagggtggggagggggacagatgagatcagggtaggccacaaagggcttggtgcttctggggtctctgtttctatgtgtctctgaatccagtagccaaggatcctgaaatccaagattctgagattccttctgatttgtttttctgagtttgacatagatctccaccaagcgccatctggaatccgtttttaaaaaagactcgggattggattttaaagagggcggaaaaaaaccaaagaggcttggcaggtttaccttgatgcctttttttagcgtttgctttagctcgagggaagcttgttttccctctgcttgctggtgacctgggtcctcccttggccatcaccctccatcctcccctgtttctgggcctctggctctgcctctgaagacctgtctcccttccccacagcagatccgcttgttggatgaat

SEQ ID NO: 9390 - DNA, 6000 bp, Homo sapiens; identical to SEQ ID NO: 1053

SEQ ID NO: 9391 - DNA, 6000 bp, Homo sapiens
tgaaaggaatgctgggagaaaacaaccatttgtttctatttgaacaggttttttcagcgtctttctggggcggaatgttggtacccattggtgataagccgtcaagcattgctgataggtaagtactaatcaatgaatggataatttgcacatattttcctttggatcttttcagttgttttttataagatattttagagaagtttatttaggagagcatagtatttcaaatattcctttagtatttatgtttaagctaatttctaaatatcgggtatacctcacacttaatattttttgcttttgttggggaagttactttattatatttaaaatgtattgttcccttttgattatgaaggaatatagttcatactcattgcagaaatgcaaaaatggagaaacacttaaagaaattagagaaagcactcactaagtcatgagaaattctttataagcagcattgtagtggcatatgtttcattatttgcatataccataactttttagcctaccgtgtattttttgatatttcattggtttctaatttgtgatttttgtaaataacattgtaaataataacttttaagataacttgttgtttattttattttctgtggtattactctctcaaagtaaaactcatagtattgctgggtgctgcttttaggaagcttacagcaatttatacccctaccagcagggtatgaacttgtacttgttgcttcgaaatactaatcattgtcctctagggcaaaaaaacttttttttcaaccctgcattagttaaaatatactggtacagcttttttggatggtggtttggaagtagaacaattttaggtttataaactctggatcctaacagtttcacaaaactccatgaatctaatttacaaaagtacttttctaagtgtgtaaagatttatgtgtagaaggatgtccattgtagcattgctgatgaatagcaaagaatttgaaactgccttatgtaagttccgcagtagggaaatggtgaaattctagcacaaccattccagatctatgtaattattaaaaataaggagatatgtgttcataagttaacattttgcacatgaatatgtttagtggatccctttccagcgtgcatgcaggtgtagcaccgagggcctgggaagccagccaccaaaacagtgacggtgggcaccccagagcctgggatgcagcaggcagaaccatttcactcgttatgttatatgcatcctggatcatttgaattcaaatgtgtgatttatcgtttcttttttattttatttatgtatgttttttgagacagagtcttactctgtcacccaggctggagtgcagtggcacgatctcgacttactacaacctctacctcccgggttcaagctattctcctgccccagcctcccaagtagctgggactacaggcacccggcaccacgcccagctaatttttgtatttttagtagaggcgaggttttaccatgttggctaggctggtctctaactcctgacctcaggtgatgcgcccacctcagcctcccaaaatgctgggattacaggcgcgagctaccgcacgtggcctgattgatcatttctttaaaaacgaagcttgctgtttttgcaattcatgttaatggggtattcagaaaagccttgcttagaaatcccaagtagtaaaaacatatttataggttttaaaactcaaattaaaatgaaaaaattcataaaggcttttatttggtaggaaaaccagaaaaagccgcgccctgttccctttgtgctgttgcagacctgcagggtgttcttagcctcccgcggcctcaaaggtcagagggctctgagggcacctgccggggttgtgtccttggctgcctcttggctggaaagattacacagaatttctcttgtcatttaaattcattttttagtaattatcataatctaaaatcgggttctaatatgctgttcaatttttcagaaagtggatgggtttttatgtaattaatttttaattcacgcttttcatattattcagatatggttggtgagagtgtgacaatccagttcattagggaacaagaggagctcatatttaaaaattataaacctaacaagaattcttttttggtctgtttctagtattatagcccccctttttgtaatattgggattatactattaaataatttgtatcctgctcttcttcccctaatatcgcactgtgagccagtaggaggcccgccatgaaaaggaactgcgtcatgaattctcacagacagctgatagttcctttgtgacagacagtttgccctgcccctctctcctagtgtgtttcttggcatcttgtgtctcacctgcatctccaaagtttgcagtgtctccttagatgttgagatttttatgaaattcccctgtagtgtgcaccctcttggtctttctcaaaggttttgccttgtaaaaatgctgtcgataatctagtatcgaatgtgagtctgacatgtgtttcctacgcgttccgtgtgtcatgtcgtttctcacctcctgactttcctctgacctgtgtgctgttttgtcctaggttttaccttgggggacccacaagcatccgcggattcagcatgcacagcatcgggccacagagcgaaggtctgtcctttcccctcacggcgccaagtctagaaggctcgcgtctcactttggaaaccatgtacctgttattagcttacagcgataatagacattcctctttcacggtggtggaattagcacctaacacagaacttaccatgtagcaggtgtagaacatttattgagagaattgtaggaaaatgagaaaatatatctgagcaaaaactctgtgaaaatgacccgcagtcctacccagagagaacatgtgtaaacgtgttgttgtctgttccctgcaggtttgacatgtgcttcctactcttcctttgtttacatattattattttttttgagatggagtctcgccctgttgcctaggctggagtgcaatggcgcgatctcggctcaccgcaacctccgcctcctgggttcaaatgattctcctgcctcagcctcccaagtagctgggattacaggcacccgccaccatgcctagctaatttttgtatttttagtagagatggggttttaccatgttggccaggctggtctcaaactcctgacctcgtgatccgcctgcctcagcctcccaaagtgctgggattacaggtgtgagccactgggcccgacccctatgtattattattaatattatcattattattttgagacagagtctcgctctgtcgcccaggctggagtgcagtggcacgatctcggctcactgcaacctccgcctcccgggttcacacgattctcctgcctcagccccctgagtagctgggattacaggcacacaccaccacgcctggctaactttttgtgtatttttagtagagacggggtttcattatgttggccagactggtcttgaactcctgacctcgtgatccaccggccttggccttctaaagtgctgggattacagatgtgagccactgcgcctggcccctacgtattatttttaaacccatttctctcatcacctcccataaaaatgtaacagtatatttttatgcgagtaaatgccatttttaacaggtacatatttcatattattgacatcctatattttagttaataggcttaatttgttagagcagttttaggtttacagaaaagttgggcaaaaagtacagtgttcccgtataacccccatagcttccttattattagcaccttgtgttaggatgcttcattggttaggattggtgaagcaatatgataaccttattaactcaaggccatagtttacatgagggttcactcttagtgttgtaccttctgtgggctttgacaaatgcatgatgtcctgcattcaccattccaggatcacacaaagtggcttcactgcgctaaaaatgctgggctcccttcatccctcccaccagaccactggaaacgacaggtctttgaactatccatggagttttgccttttccagacagtttgggagttgggatcatacagtttgtagccttttcaagttgtcttcttttccgtagtaatatgcacttaaggtccctccatgtctttctgggacccaataacttgtttcttcttattgctgaataatattcctttgtctggaagtaccacagtttgtttgtccattcagctgccgaaggacagcttggttgcttctagtgtttggcagtgatgagtaaagcttctatcaacattcacgcgcaggttgttgtggacagcttctgggacataagttgtcacatctgctgagtcagtgccggggagcgcagttgtttggtcacgtgttaagagcacgcctcccctttgtaaggagctgccaggcgagcttccggggtggccgcgtccttttgcatttccccagtgaggaatgagagagagaaagtttatcatcttaatggctgcgtgttttgtcttatgacacactattatctttttaaagaccaaatcccaagctttggacattgagtttgtgtttttttttttcttttatgattataaaacaatgtattcaccttcgaactgaatgttggtactcatctgtaagttttatttatttatttattttttctttctttctttttttttttttttttgagatggagtcttgctctgttgcccagactggagtgcattggcgcaatctcagctcactgcaacctccacctcccaggttcaagtgattctcctgcctcatcctcctgagtagcatgattacaggtgcccgccaccatgcccggctaatttttctatttttattagagacggggtttctccatgttggccaggctgatctcaaactcctgacctcgtgatttgcccgccttggcctcccaaagtgctgggattacaggtgtgagccagcacgcctggccaagttttactttaatatgaaattctagatgtgaaatcgccagatcttttagggctttatcgtactttctgggaaggttgtctcatttatactcctagaaccgtctctgacatgcaacatccgtcagaggtatctccacatgctatggaactttaaaacatcatttaagtggatgcatattattccattattaaacattctcccctgattttcttactttttttttttttgagacggagtctcgctctgttgcccaggctggagtgcagtggcgtgatctcagctgactgcaacctctgcctcccaggttcaagcgattccccctgcctcaacctcctgaatagctgggattacaggtgcccgccatcacgcccagctaatttttgtattttttaatagagatggggtttcgccgtgttggccaggctggtcttgaactcctgacttcaggtgatctgcccgccttggccccccaaagtgctcatattacaggcgtgagtcactgcacccaggatttcttaaaatcttcagcacctttgttgcttccatttttatgtcattataagcaacaactacactctgcataaatttttgtcgaaagtatagattatttcttttcactcgtatttagagtgcttcattacagtgtaatttttaagaaaagtaacttaagtttttgatggttttatttcatctgtttattataagcaagtgtgatatgccgagtctatgagagctgagcctttacctacctgagaagtaaggcatgctggtgttccactcaccacctccgtgcggttggccagactctgtgggcaagaatgtaaattgctataatttttttgtgaaagtggtttgatgtatcaagagccttaaaatgtgtatgttcaagaattgttaataatactattaatgatagccccaagctggaaactggaaaccgaaatgcccatcaacagtaggaaatggtcagataattatggtatcttctactgtaatgaggaa

SEQ ID NO: 9392 - DNA, 6000 bp, Homo sapiens
gggataaataccgaagagcacaattgctggatgttttggtaagtgtaaattacttttatggttttttttgtttgtttttttgagacggagtcttgctctgtcgcccaggctggagtgcagtggcgcaaactcggctcactgcaagctctgcctcccgggttcatgccattctcctgcctcagcctcacgagcagctgggaccacaggcacatgccaccacccccggctaatttttttgtatttttagtagagacggggtttcaccgtgttagccaggatggtctccatctcccgaacttgtgatccgcccgcctcggcctcccaaagtgctgggactacagacgtgagccaccgcgcccggcgcaaattacttttaaaagaaactgccaaactattttccagagtgactgtaccattttacactctcacctgcaatgtatggatggtccagtttctctgcattctcaccagcaattgcaattggcatcatctctcttttttattctagccattctggtattttttttttttttttttttttgagatggagtctcgctctgtcgcccaggctggagtgcagtggcgcgatctcggctcactgcaagctccgcctcccgggttcacgccattctcctgcctcagcctcccgagtagctgggactacaggtgcccgccaccacacccggctaattttttgtatttttagtagagacggcgtttcaccgtgttagccaggatggtctccatctcctgacctcgtgatccacccgcctcggcctcccaaggtgctcggattacaggcgtgagccaccgcgcccagcctatcctagccattctggtaggtgtatagtggtatctcattgtgtttttgatgtgcattttcctaacgaataataatgttgaggatgctttcaggtacttatttgccatccatatatctttggggaagtatctgttcaaatcttttgcccagtgtggtttttttttttttttttttttttttttgagacagggtcttgccctgtcatgcaggctggagtgaagtggcgcgatctcagctgactgcaacctctgcctcctgggctcaagtgatcctttcatctcagactcccgagtagctgggaccacaggaatgcatcaccacacccagctaatttttttattttttgtagagacgcagtttcgtcatgttgctgaggctggtcttgaactcctgagctcaagcaatttgccagcctcggcctcccaaagtgctgggattgtaggtgtaagccactgtgcccagccttacacagatttttaagattgagttgttgaccttcttcttatttattgttttagagacagggtctcgctctgtcacctaggctggagcacagtggcacaatcatacctcactgaaacctcccaactgcttcactcaagcactcctgctgtctcagcttcccaagtagctgggactacagaggtacaccatcatgtctggctaatttttaaatttttttagttgagacaggggtctcactatgttgcccaggctggtctcaaactcccagcttcaagcaatcctcccacctcggcctcccaaagtgctgggaatacaggcttgggccaccgtgcctggccccttcttattgaactgtgagtgttcttgttatattctagattaggtccttggtctgacatatattttgcaaatttcttcagtctatgtcttgccctttaaattttgtagcaacatctgtcccttacacaacttcatttgtcttcatagcctcatcacgccctgacacccgggttcactgtccatttccccacccactacgctgtgaatggcagatggacctgacagcagtaacttaagcataccctgaaaatgaccctttggtctaagaagaaagtgtgtttggagtcttgagctaaggaatctgggagtggccaactaggagtctcacttcttttctatgaagagatctgaacccctggcctgttggtcccttggaatgcaggccgtacaggggatccaggccctttgttgtggcttaaatggaggttgctaggtggagagggctccacaaaaattgctatataaattgcatgctttgtacaaatgatagtgtttctcctgtccaggccactgccactggatcacttttgtatctaagtcctcaataaactccatgtctcattcactggctctgggtctcttcttcggcctcttggacatggtgccattcttattggagtcaataggggcctggcgcaccatgttgtcagctccacgagggcagtgctggttttcccgctatgtcctcggctccttacacagcgggtgttcagcagatattgttcagtgctcctgccagtcctcccggacatggcgtgtcttggtggcaggtgacatggactggtgagtggagacctcagagcagcctgttgcaaaacttccaggccagcagtaaggggtcctgagctggggcacgggtggggtctggggaaaggagacgagctgacggagaaggagggccagagagacttttccaaggtgcaggctcccctcttcccttcccctgcctgccatacacaccccgcctgctgctcagcaatggcatcacagcccctcctgccagcctgcccggatgcagggagcagcaggagagtttctacaggaaatagacatgggcatgggtggcatgtggggaggctctaaaaggcttgattagctcctttaccatgagtgtgtttacagcatgtatgtgtaatgacacacacagtgtgagggtgtatattgcatggtgcgtgttatctctgtggggtgtgttcttgtacaccggtgcagggcatatatgtgttatgatgtgggtttgtccagagaataaagcaacaacttcctctccaggatgggaggactgttatgtggtctctggtgtcctttctgtccattctttagagcatcccaccagggaccctgcctgtgaatctgttggctctctcttttctgacagtgcaaaacaaagctccttctgcagccagacagaccctggcagcaattccaagcagatgcccacttaccagctcggactagttgctctaacgcctctgagcctgttttttggtctgttaaaggagattaataacacctaccacgcagggtggcagcgacagtgaggaaaggtatgcctatgaagagcttagaatagcgcctgacacacagtaggtgctcaattcacagtagtgtatatgcccacacacaggtatgtacattccaaatgcaccaacgcccctcaagataccctcaatacacaaatagattgagtctgggctggatgcggtggctcatgcctgtaatcccagcactttgggaggctgaggtgggaggatcacttgagcccaggagttcaagaccagcctggactggtggagacatggtgagactctgtctccatgaaaaataattaaaaatttaaaaaatatattttaatttgaaaacttttaaaaaggaaagatatggactaggtctggtcgctgggctcctgacgacaaggcttgctgtgcacatacatcttcattagtgtgagctgtgctcacgtcggctgcgtggaggctgggacagacacggacaccccacagtgcccagtgatgtgtcacacccacacatcagcaccacgctgacctcttgccaacctgccatatctgcccccttatctactcagaatggtcaaggtgcccagggggcagtgtctctcagtaattttccacaacctgagaaaaagctgtgtttctctcagatgtggggaaaaggggagcccttgttcctgaggcatccttcctgctgtccttgctcttgtaaggctgactggctgagtttttgggtggaggggctgaggctcccagcctatctcagatggtgctgaatgtggctggaggttacgattgctttggtcccaccacccctcagaggatgccctgcgcagagtcttgggtctgactgacctcggcagcacccagcccataaggtcctgttaatcaaaatccttgctggggcctgggagctccatgagggaaggggccacatctcccacaggtctcgggcttcagcacccagtacaggagcaggtgttcatgaactgaattatatatcttttgcattaaaaaaaattttttttgagacagagtctcgctctgttgcccgggctggagtgaagtggcatgatctcagctcactgctgcctctgccacccgggttcaagtgattctcctgcctcagcctcccgagtagctgggattacaggtgtccgccaccacgcccggctaatttttgtattttcagtagagatgaggttttgccaggttgcccaggctggtctggaactgctgacttcaggtgatccacctgcctcagcctcccaaagtgctgagattacaggcgtgagccaccggcctttttttgcatttaagtcgcacctccaggggttggggagctgtatgcagtggtggttacatgtgtgggctgaggcatggaactacacaacctcttgggcctgagcttccccttgttaaactggaataacaatgaagacgccttcctcatagggttgttccaagaacaccatgaaggaacgcatgcaaagtgctcagggagtgcctgaccccacatacagagcacccaggggctgccctcttcatcccagagtcactgctcccactgttttctgggctctggccccccctaaaatttcacaggccgctaacacaacactaccttctgtcacaaaatgagagctttctggtgggctagggtagggggagatattaacagccaactttaaaatcaggcaggaaaaaaaggtgccaaggagacaggaagtaataaatgactccaggttgggcagggcaggctgggaagaggaagtggattgggtcttgtttaggtaaaagacttcagtggcagacaaaggaggagtaataagatcgctagggggcccgtgcccagcccacccacgcacaatctcagtcctcgcaatacccacaaggtaggtgctaggatcacaccctttacggacgcggcacctgcgacagggatgcgcgaggagtcagggggcctcgccggatcgaacctaagctggggaagagtatttcttgtatttttaggagaaattctcagcctcggggaagagtatttcttgatgagggaagagcgcggggaagacactcacgcacgcacaaacatgtgggcggccatggtgtgcccagcgccgtgctggcttctgggaacccccagtggacaagacggacaaggtaccggctctcaggggaagtgggagccagtcacaagcgtacctaatttcggagagtgacaagtactctgaaaaagaaagaaggtagggctggtgactggccaatttaagcgggcaggagtctgctgggggacggagaccagcctcaggtctgggttggggacagaagctgtgcctaagtgtggtgcaggatgcagttgcaaaggagcgcttccgatcgcacttgatgctcgccacgtccctgcaaagtgctcccgccccctttctgcaaatgaggaaacgggacgcgcggctcgccgggccaggtagggctaggacgcggactctaggcccaagcgctccccagcgcaagccctcccccgcacatccgaccgcgcctgcgctggagaccccgggggcgtggcctccccggtgggcgggaccgtggtcaccgaggtgggcggtgccagaggatctggcggcggggcggggcggggcgcgcgtcctggcttcgcccttccccggggcggggcctccggggaccgcggggccgttggtttcgggacggaacgttcacgcggctggggcgggcgcgcgggggaagggtttgcggcggcgccgctgccggctaacgcggaggggcgcctggaggcggcgtggcgtccgctctggctccgactccggctctcgctctcgcttctagcccgcgtgcctgcgcagtccc

SEQ ID NO: 9393 - DNA, 6000 bp, Homo sapiens
tagaacggattaagagttagtcattgcaaaggggctgctttcttaggagctcccctgggatctctgaactggcctccaatgaacaggcacgtcaccagtccctgggccactaggctttctcccactgatgacagtgcccttgagactggaggagggtcagaggcatcaggaaaagcagctaattggtgagaggatgtatccttctcacatattcacttcatgtgtcgtcagcaaaaaatgcagcttttggagatgcttcctggccccgtgggaggaggacaggagctggcgctgccatctgtgtgggcatggagtgtactgggctagcaggaatggcttgagggctctgggaacccagccactcacacgggggttgtgaagtgtctccttggggcaggcagtaggggtcctgcctgccgagattgttgcagaggtgggagtggccattcctagcttagcagggtccctgctggtgtggggtcctcctgcttccaggagctgatgggtcactcctcgttttgaagcctccctggccttcactcttggtctgtggaggaagctacttctgggaccacttcctggttccattattctgtgacttctgtgagttgccagtttacccaagtcaggagtgcatggaactgccagccatgttatagatgtgtggctggtagattctcctttcatgcctgctaccactcatgtcatctctgcctccccatgggcagctcatatcgagcccctgtccccagtgtgcactgcaccagggcagggtgtgtccctcttggcggtgttgacatttggaccagatactgtgtgttgggggctgtcctggaggatgttgaacagcaccccggcctccacctgctgaatactagtagcatcccagccaagtggtggtcacgaaaagcgtgaaatggttgaagaagagcagaggaaggcgcagcagcttagactcagtgctccttggcgtctagcctggctgggactcagcttcaagcttcatggcccctcctgcctactcacccagcaaagaggtggagtcgggtccacccagccctcctacacctgcgcttggtgcgtgtgtacccaatgtgtgggtgtggctgagccgggagagcatctcagtggggagcctgtgagacccagtgttgtgtccaggtgtcatctgcacgtgtatgccagggctgggtgcgtcaggggatgcgcattttctctgccatggcttgttaaggattggagtgacaggcttcacgcccaaccacagcagaggcacatttgtgaaatgatacctgagttgaccgtgcggctgcccacaggggctcactgttcccctacacagtccatcagggagttgtggcaatccgagtcccaagtgtaccttatactgtcacttctcccagtctgtcactacccggtccaggcctctgtcattcccttctctgctgcggcaggtcctcctcctggcttcctgatgccctatgctactcccttgcagcctgtcctccctacggcagccgcccgagccatgctccgcaggggcgtcacccccactccaaactgccagcaactgtcatccatgagacccctgcctacctggccaaccctggcctcctaccaggaaagggctgtccctcaccgccccctggctcattcttgctgggcaactgagcaccttcctcccaagagcccaggcctcagacaaaaggaaggctgctgttggacggacgtgggaggcctgtgtgcagccctggcccctggaaaaggatgtgcacctctgcaggagggccgctccccagccacacctggggtacacagcacatgagcgcagcctcctaggagtgctagtcctaggacaggaaatcctagtttgctccggtgatggtcagaggggtgttggcacacagcagcctggggccatggtgagatgctcctcctgacctgggattcgctcttctgcttctgtgctgtcaccatgttcttgattttgagcggccttatttcacatgtatcctaaagatggttgggtgcagggagacactgtgtgccttgtccacacagcccgcctgggcaggaggacgacagcatccccagcgtagcacgagggtggcccccttctcagagcggccatttcctcccctccccctcagatggcaacagtctgtttgactccatggccagcgggatgcgcctggtcgtcagctgcatctcctccttcctcatcctgtcactgctgctcttcatggtccaccggctgcgccagcggcgccgggagcgcatcgagtccctgattggagcaaactgtaagtgccctctgagggccacaaccctggtccccatccccaccccaggtcaccccatgtctccatgagctccccagccctggacagagaggggcagaggcaggtttgaaggccacatgttgtggggtctgtgtcctcacctgtgggccaggaaagttcttgccaagaccctccttattcccattgagccacagggtgggcagaactcggaggcctctgagggtcagaggcccggatcacccttccagctggaggggtgtggtcagccagaggctgggtctgacagaagtgtcagcccagagggacaggttggtgtggtgagggtgagacatgccacggagcacaccaggggtctcatggggatgccgaatgtggccgaggggtaggcagcggggcacaggtgtgtgcactcagggacggcaggcccagcctgggggtggggggctcaggagccaggcagcctgcccccagtgacttgtctctgttcccgttgcacacttttgatggcccagtgcaccacttcaacctcggccgcaggatccctggctttgattacggcccagacgggtttggcacgggcctcacgccgctgcatctttctgacgacggagagggtgggactttccatttccacgaccctccacctccctacacggcatacaagtacccggacatcggccagcccgacgaccctccgccgccctacgaggcctccatccacccggacagtgtgttctatgaccctgcaggtgcctgactccccagggagagggaacaccttgtcaagtaacctggcacgtggggctgagcccagcactcttgcccagctgcagaggcctagggacctcacttctttccggctttgtctttggtttttcctttaaggcttctcctggggctgcccgtgcagaaggggtcctgatctccctgcctggccgcccttggcaatctgtgcagagagctctgagaaggcctgggacccctccctcctacctccctgccttctgtgagcacctgtcatctgggcagccctcagggccctcagcccagctctagagacctggggagcccgacagtggtggttgtgaagacagggctggcccagacccaggagccaatcacttgtctgtagacacatgagctagagacaccatggtgacagcccctcctgtcgtgtcaggaggcagctctgtgaggtgggaggaaagcgtggcttctgtgctactggcccatagttggagcctaccacccatctgagagtgggcgccattcctcaaggctgtgtagctaaggagtggcaggcccctgacccctggcctgtctctgtctctgttgagcagtgcaggtgtcccatcccatctccctgtgcattaggccccctaacacacacaaacctgtagtatatttggtaggcagtgccaccccaaagtggctggctccttgcatgcctgcccatctcggcagaatgggcattgtgaggctggggctgctgtgcctaaaggtctcagtcctgttcgtttgtttagtcagctgccacagctcttgcatgatctgggggtgcagaaaagacttgcatttgacccctgccctcatgacacagattgtcacagtcttccagggtaggaccagcttcctgcaagggatggtggtgggtggcagcagatcccagacacctgtgtgggccaggctgcagagcagggtgggggctgtgaggggctggccgggagggaggtgcatcaccggggccttgtgctgttagctttcagagacagcctatggtaatgacaagcaggcagcccaggcgcagtggctcacacctgtaatccagcactctgggaggctgaggcgggaggaggggtctcactatgttgcccaggttggttcgagaccagcctgtgagacctccttctccacaaaaaattcagaactagccgtgcatagtgggcacagctgtagtcccagttactgggcaggctgagaatggaggatcacctgagcccagaattcaaggctgtcatgagccatggtcacgtcactgcacaccagtgtgcaatcttttaagatcctgtctcttaaaagaaaaaaaaagcaagtaataaagatcgggcaaaacaaagcgagtcgactgcctaccacacagcctgccttggatcagagcttcctgcaaacacctgtgtggttttccaggccgctcactgcagccctgttgcccacactccggttgccacattccagctgcagccctgaatgttcttccacccacctgggcccagtgcctccctgatgacaaatgcccctgccttcttgctgagccgggtcttcaccttactgagtctgagacggtttccctttgggcccctctgttctagtgactgctggtcagtgtgtctcccctacctcacaccgatggtgggacaggcccgtgtctgcctttgtgagatgggccctgcaccttgcatataccaggttcccagccacagggggcagtaggtacaacaggtgtcatgtggggcaggctcctccttcaaaatctgaggcccgggggagccacccaggtcctgctcaccacccagcttcaggggggccttcaggcaggaggagtgtctcctggttttgcctagctcccctgcatcccctgtgccaggcccgtacctgcctctgacacccctctgtctcttcctgcagacgatgatgcttttgagcctgtggaggtcagcctgccagcccctggggatggtgggagtgaaggtgcattactccggcgcctggagcagcctctgcccactgcgggggcctctctggcagacctggaagactctgccgacagcagcagcgccctgctcgtgccccctgaccctgcccagagcgggagcaccccagctgcagaggcactgccagggggtggccgccacagccgcagctccctcaatactgtggtgtagacggcctggcctgtaccccaacggtctgggagcacctgtctgttgtagaaaacaccggtccctggggagacttgaaaggcccctgtcccagcctggacgccacgcactgccgcacgtcactggcgggctcgcgtgtgtacatagagaccacagcccgccttctgccaaaagaagtgatggcctgcaccgagcttccttgagggcttcagaaacatgcatagctttggatcactgtcttctcctttataaatggcagaagagtgacaaaattcattcagaccgcacatgttagaggcagggaatgaagaaggtactgtgggccatggccacacctgatgcgtttttggtgggcttacttggtgcagtgtgctgtccagagagacctgctgacccagtctgggacaggcacagtgggagctgccacagtgccccttgctggccgccctcaggagggggcctctggaccgtcagtgtggcgtaggcagtgggtctgcttcagggaggcagcctcttgactttgtcacaacggttgcactgaagatggcccccacaagcccagttgtgaatatcaaggtgaccctgcccctggctgggagctcccctggggctctggaacctgaagccctgagaaggagagcttggaaggaggttgagctcttcactgtgtctttccatctgggctctgcagcccagctctgtggcaggaggcctgaccccaccccatcagtccctctcccagcattgctgtgcatggc

SEQ ID NO: 9394 - DNA, 6000 bp, Homo sapiens
ttcaccttgttagccaggatcctgacctcgtgatccgcccgcctcggcctcccaaagtactgggattacaggcgtgagccaccacgcccagccccaatgacctttttttttttttttaattttggttactgtattttagttctaaatttttttttttttttcagagacagagtctcgctgtgtcacccaggctggagtacagtggcacgatctcagctcactgcaatctctgcctcctgggttctggaaattctcctctctcagcctcctgagtagctgggattacaggtgcacgccgccacgcccagctaatttttttgtattttagtagagacagggtttcaccatgtttcccaggttggtctcgaactcctgagctcaggcaatgcatctacctcggcctcccaaagtgctaggattacaggcatgagccaccatggctggcctagttctaaaatttctatgtggttcttatttctttgtaagactttctatattttcatttgtttcaagcatatctgtaattgctcactgaagcatttttatcatttctgctttgaaatatgaagtaattctcacatctgtgacattgccatctttgtcgattttctttctttctttctttttttttttttttgaggcggggtcttgctctgttgcccaggaggagtgcagtagcacgatctcagctcacggcaacctccgcctcccaggctcaagctaatctcatgcctcagcctctggagtagctgggactacaggggtgcaccaccaagcctggctaattttttgtagagacagggtttcaccatattggccaggctggtctcgaacacctgacctcaagcgatctgcccacagcctcccaaagtgctgggattacaggcatgagccattgtacctggccaatttagtttaatatcttactgatacttggtatgatgacttttctttttttttttttttttttttttgagatagggtcttgatctgttgcccaggctggagtgcagtggcatgatctcggcttactgcagcctctgcctcccaggttcaagcaattctcctgcctcagcttcctgagtagcggggactagaggcgtgtgccaccatgcctggctaatttttttggatttttagtagagatggcatttcaccatgttggccaggatggtctcaatctcctgacctcatgatctgccggcctcagcctcccaaagtgctgggttacaggcgtgagacaccccgcccagcctgatgacttattttcaatcaaaacttggataatttggttattacaagactgtggatcttatttaaatcttgtattttagcaagcttcctctgacaccattctggcaatgacaggggacactttactgccaggcagaagtggaagtccaggttctccaccctacctccattgacacctggggccacggggatccttgtgactgctgggtggggctgggagttcctgctccccactcggcctcttgtgataccccaggcatggatgggaggaatgcctgctgctgatccccacgtggcctccactggcaccatgtgtgggcagggagagcctcatcacctctggaaaatgaagaatgtccttaccctctgctaggttcctctgacagtaccatagtgaggacctggagggggcccttattaccacattaggagtggaagtccaggctccccatgtggtctccactgacactgtggtcagggagggggacctatttccacccaagtcttccttggcctcctctgacaccccagtaggaggctggagcatctcattacagcctggcaagggtaggagtctaagctccccactggtctttgctattgagggcagggttggggccacagtttttttctgtagtagtatagcttgagtagagtggttattgtctaaaatatttttgtcttgttagtctgtctttgtcctgatcttttggctagacagaaccggctttgcttaggacttattttttgcctgtacccattggtgtttctgggtggccagctcctctgtatgcagtctgggatacatgagtcaaaaagataacccaggaggctgggcatggtggctcatgcctgtcatcccagtgctttgggaggctgaggcaggaggatcccttgagaccaggagttataagatcagcctgagcaacattgcaagaccgtctctacaaaaattttttaaaagtattaggtgggtggtggtgcatacctgtagtcccagctacttgggaggctgaggtgggagaatcacttgagcctaggagttcaaagttgcagtgagctatggttgtgtccctgcactccagcctgggtgacagaatgagaactatttctaaaataaataaataaaataagaaaaaaaaaaacaaaaaggcaacccagagaaacaccaccatttcgtccttggctctaagtctctagcttgtctgccttctttgtaacacttagcatcttcttatgtttgctttatttataacatttagggtttttttgtggaaggaatagggaaacatatgtttatctgtcttctaggaagcagaagtctgttttgtctttatttaaaaacattttttttgtttttgttttctgagatggagtctcgccctgtcatgccagctggagtgcagtggtgcaatctcagctcactgcaacctccgtctcctgggttcaagcgattctcctgcctcagcctctcaagtagctggaattacaggcacctgctaccatacatagctaatttttgtatttttagtagagacagggtttcaccatgttggccaggttggtctcaaactcctgacctcaggtgatccacctgtctcagcctcccaaagtgctgggatgacaggcgtgagccaccatacccagctgccttcatttatttttttcaggctcatccatggatgtggtattgccttcatttttggaatacatttttggtgagtatagaatttaggttaaggctgggcgtggtggctcacgctgtaatccgagcactgggattggcaaatggatcacttgagctcaggagtttgagaccagcctgcacaacatggtgaaaccccatcgctacaaaaaatttaaaaaacaaaaataaaataaaataaattagccgggtgtggtggcgcacgcctgtagtcctagctatttgggtgcttgggcggctgaagcgggaggatcccttgaacccggaggctgaggctgcagtgaaccatgtttgtgccgctgcactgcagcctcgatgacaaagtgaaacccggtctaaaaagaaaaaagaaaaagaattttaggttacagggatttttttcttgcagtactttaaagatattgctacactatcttcttgcttgcactgtttccaacaagaaatctccttcttcttgattcctctgcacacaatgtgtctttttcctctccatgcttttttttgttttgttttttagacggagtctcactctgttgcccaggttggagtgcagtgacacaatctcggctcactccaagctccgcctcctgggttcacgccattctcctgcctcagcctcctgagtaggtgggattacaggcgcctgccaccaagcccccggctgattttttgtgtttttagtagagacggggtttctccatgttggtcaggctggtctcgaactcctgacctgaggtgatccgcccgcctcggcctcccaaagtgctgggattacaggcctgagccactgcgcccggcctttcctctccatgcttttaagactttctctttagcaccagttttacgaaatttggtttatgatgtactttggtggacttttttttttttttgagatggagtcttgctgtgttgcccaggatggagtgcaatggcatgatctcggctcactgcaacctctgcctcccaggttcaagggattctcccacctcagctacccgagtaacggattacaggtgcgtgccaccacgcccagctaattttagtatttttagtagagacggggtttcaccgtgttggacaggctggtctcaaactcctgacctcaagtgatccgcccacctcggcctcctgaatggaattacaggcgtgagccactgcgcttggcctggcttgccattctatagaacccttgacccttcgtggatcacaccagagctccctgccccccactccctcacccgctggggaagttaaagccacagtgacctccaattctgactaacagccagcgatgactaccctgaggggtgcggctgaggttggatgagctgtgaaggccctgggagcctgggtggatggcactcaggaaaggcagaagagaaccgggactggcatcggcctcccctgcagcctcgcagcctccaccattggggggcttcgttaccagtgaggaactaaggcagagaggccacctcactagtccagaaagtttcttgcttgcgggagcgaatctgactccatgcctgtgtttaaccacaaagagtaacaacaatgcccgcaaaaccgccgagtctggcactgtccactctggatgctgctcacatcgtcacagccgcccaggggccccacacagggtgcctcgggcacctggtgcagtggtcagggatgcaggaggaccccagctgctgctctcggcctgcaggagtactggcttgtgtcaagaaagagcaccaggccacactgtgcttggaggctctgcaaacatttgcggaaatagaaggacacatccttaactgtttcaaaactgaaagatagaagaaacgctgttcttcacttcccctgaaatcaaatctgttaactaggagtttcccaaacccaaatccccaggaatcttgagcctaaatttagcttatccttggaaggtcacgggattaccctggggcagggtcagccagcagctgctcaagataaacttggcttttctgcagactcaggctcttctcacacacaattaatgagatcctgccattcttcccctgggaaagcagaacaatggctgggggtgagcaggtggccttggccagtgctctgccccaagggccctttaccagagatcaggggtttgtgtccctgcctaaccaggacacctccgatctccacctgcaggccctggaccactgtggcactgtggacacaaggccgcttctgccccttggacgccgagccccttcccacctctgggatcttgcactggctattgcttctgctctgcctggaacttcttccccggatccctgtgaaatgtcacctcttcagagaggccttcaccactgtctttcctgcccagttcttggttgataggttcctgtcagctccttctgggcaggagcttcttgtgctgtgtgctctgcctagagacagtgcttgccacgaagtaggtgagcagaccctccatgagtggcaggaaaggtgggtgcaccctcatgcccctccggagtctggcctgggctactcagaggccagcctccatctgaggtgggtttgtctggggtggcgtcagcccctgcggccctctctgggcctctctgcattggcattgttccactgcagcctggggcctcgaccaacatagtggggtcagggtagaaaccagattgtgaaaggtgaagcctgagactcctctgccacgtccctgagatgctgtgaggctgccgccaaagaaacatgagcttgctggggccaccctagggtgacagctaggagagaagaaaaacaggcagccaggtgagaagggagagccttgggctggctgcagctccaagctggctagagggcaacaggcagcctcctgtgcaggacagacgcatgaagacagccaccctgtggaggttattcctggatactaggtgggaaagtcggcaagcaaaaggacaggtccagctcaagcttctaaaagcaatgctgggggacggtgcagcaaggtgttcctggaaatgacctcggcaacacatcttagaagatgagcaggacccaacctgaca

SEQ ID NO: 9395 - DNA, 6000 bp, Homo sapiens
tcaggactgggggtcttggaatttcctctgatggcagctgggctgtggggaggtgcaagagagggccacaattgggacatccctgaactgcccatggctaaagacggcagggtcagagaggatggggcctgggcctgttgtcaccctgccagagagacagtagattcccagggcattcagaggacattggctttctctaggaaacctgaatgagtcagaagaggaggaggaagaggacgacaacaacgaaggtgatggtgatgaagagggagaaaatgaggaggaggaggaagatgcagaggctggttcagaaaaggaggaagaggcccggctggcagccctggaagagcagaggatggaggggaaggtagggggagctgcaatgcggggcttggcctgggaagcagccctgcttggtgcctgctctggcctagaaggtcaggagccagaggactgtggaggtcgggagaacctgcccccataagcaccctccttgtgtccccagaagcccagggtgatggcaggcaccttgaagctggaggataagcagcggctggcccaggaggaggagagtgaggccaagcgcctggccattatgatgatgaagaagcgggagaagtacctgtaccagaagatcatgtttggcaagaggcgaaaaatccgagaggtgagttcttgccacccacttgagatccaggtgtggccaccagacccaactgcacaggtgaacttatgtggcttggggccctcctctaggcagactgaggctctcctagccttttcctgaggttgcctgcctggcccagcccagcctttggggcccccgacctgggccagtgtaggcgtcttggtactgccatctccggcctgggctttccttacggcttccgtcccaccccgcatccggcttcctgagtctgctggggtctgcaaacagagccttcccggcagactcaaggactgggggcgggggtggcgggggggagctttgttaaacttctatctgttttgtattttcttgttcatgaagccatatatgctaattaaaaatacaaactcatgcaccctggaaccctgtgatgagtgatgcagaagtggctcacagccctgcccttggaatagagcagcctgtagtaacagcccccaggtttctcttgtgcccataatgacccgtgtttgggaggtcatgctataggttgttttgagatataatttgttttttgagacagagtcttcctctgtcacccaggctagagtgcagtggagcaatctctgctcactgcaaactgtgtctcacaggttcaagcaatcctcctgcctcagcctcccgagtagctgggattagggcgtgtgccaccacacctggctaatttctgtatttttagtagagacggggttttactgtcttggccaggctggtcttggactcctgacctcaagtgatctgcctgccttggcctcctaaagtgttggggttagaggcatgagccactgtacccagcctgagttgtaattttcatttaaccataatatggacttctcatccaaaacctggcctgtcccctgtgatgggattagattgttctccagtttcagtcattctcagaaaacatccctgagcatgttcctgcccgcctcttaatgattctgcaggctaaattcttagaagcataattgctgcagttttgaaatagttattgtcaaatgggtctgggcatggtggctcacgcctgtaatcccagcactttgggataccaagacaggaggatcacttgaggctaggagttcaagaccagcgttggcaacatattgagaccctgtctctaccccccaaaaaaaaaaagaaagggctacgcatggtggtgcacacctgtagtcaatcccagctactccggaggctgaagtgggaggatcgtttgaggctgcagtgagctatgattgtgccactgtgctccaggctgagcaacagagaaagaccctgtccctttaaaaaaattaaaaatatattgtcagatgaccccggaaagaaggttcttcctgttgtacccctttccaccagctcctggtgaaggttctagtggcatccagctttcccaggtggtgtagggaaatggggcagttgccaaggctccttccagctctgggagtttaggattctcttatctcgagatttgtgggcccatgaaataatgttgttaaagcagggctagcgcatgttttctcaccatgaagtgggtcaggtagatttttttcctgtgagaatttgtgaccttttcttgaagctctgcttttaagggatatagctttgagttctgtgccccccaccctcccttctacacatacctcagcctgaccttcgccttccccctcacaggccaacaagctggcggagaagcggaaagcccacgatgaggcggtgaggtctgagaagaaggccaagaaggcaaggccggagtgagtgcctgcggcccctcacagggctgaggccagcccctagcagctggatgtggcagaggcaggccagaggacctaagtgtgatggaccagagtcacttctcctcctcctttctccagccagccctgacccctcatgctctctggctgggccagtgggcagccctcgcttcccttggatggagctgccctgctggtgcctggtcagagaagaggcctctgtgcccagcctgattctctgctcccaggagccagtgacatgaggtgcagaggcccacccagccccctacctactgcccccattcatcctggctttccacagccccctcccacacagttggacccgtgattctcagggtgctgtgatggggtgagggtagggggagcatttgttattaaatgactggacttttgtgccaattgcattttgtgtccatgagccttcctagggttggaggaggcctacctagcactctatgctgcaggctgggccagccctgggtatttactgagacagagctgggcactgctcagagctctctggatgtccaaggacccctccaggtccagggatgccaaaaggtaggtgcagaggttctggacctgggcttcacagcctgtctgaccatggttcacattctaacccaggcattttccctctgcacctgcttcctcatgtgtcagttactggtagagattctgttctttgaaagggatgtgttgagggttctgtgataactttatagtctcagaccttatggacttggtaatatcaggtgtgtggtaagtacttggtaaacaccaactgatttatatcacttcctgctggactcggcccagaaggtaaaagccagaaccggaaggatctgtgggtctgcggtgaggtcctgccctcagcttgccttggcgcgttggcagaaccgctgagtacctcccagcgtaggattccgcagcagctgcacttacggtctgtgaggcctgcctgacagcttccccgctgaccttggcagtgtccctgctgacgcccattgggatatgcctttgcctggaaccgccagtgcatcatgatggagccaggaccacaacctgggtctcccagtgctcactcagcccctcccaggactcacttcccggggtgagtgctgtcgagggttggggccacgctgaggaagtgtgggtttggaatggctctactttccctgaatctaggcacctgagggccttgccctctgcctctcactgtttgctggctgtgtgggcagagaatgtttttgtggcagtggatgtaggtccaacctgtgcagggggaaggcaagagcttgggcaggctctggcctggggagcagaaaacctagggctccccctctcagctgggactggctgtgggtggaaggagagggctgtgtgccattcccactctgtcatgcacacggcgatgggagggagtgaggttgcctccagaggctgggacagagggtcaggacctctggagccagagcctgcagccccgggagacaactcaggcctgtctggggaactgtgcatccagggccacacggctagagcgcaggcccatcagatacggaaaaattcctggcagccatgctgatgtggaattttccccattccagaatcgcccagtaatggcgggggcagtggggctctgacgcatcccaggccccactgggtggccagctggttccttactgcccacagctggcgctgaggattcctggcccctggcaggcattggtcctcatccatggtcttgctcctctggggtgaagaaggaaaggccaggcctggaaaatgagacagggcctggatgggacacctgcctcctggtggccttgctcagccctcattggcaccctagagagtgacagctgagacctccaggtgacaggaccagttggagctcagtctcttgcttgagctccctccactcccatgagtgccaaaaatgtgtcgtccccagttggcactgactagagcaagaagccgtatgatccattggatcctaagggccccaggaccccccaaccaaagttaagcaatagtccgtccgccgcctttttcccagagccctggctcccctccccaccaccaccaagcctgggcatcctcaagtcttctgggctgggggctccgttgagccagaggaccggggcgggacaatggccccgttggcgcgtccgagacaaacgggccttgttgggccggcggcgggggcgcagcgttgcgccccagcgcgctgaatgcggcttctgtgcgtctcgggcgggcgcagaggggccgggatggggcggggagggggccggcccggggcggggaggggtctggggtccggggcgtccattggccccggcgccggaggctgggccaggctggcggcggcacctggccgggagcgggcgcggcgcgggagcgggcgcggcgcggcagcggcggcgggggcgggggcatggaccaggcctggtggagcggggggcccggccgggtgcgccccgccgcccagtgagcgcccgggcggcgcggcccgggccgagccagccacgctgaggcggaggaggacggggacaaggtacgtcccgggctccagcacccactgccagcttgagccctgcctcagtctactccctggggataccgcccacattacgctaacccccaaactgggaccacgcgccggaggaggggagtaggagtgcagtaccgctgttctaagcgctgggtacccctgcccactgccagagggtggcctggtaggggccagggagggcacaggttggtgccccccatgcccttggttttttcccctgtcccccaaccccccttccagggcttcccagtccctgaaggtgggatgggtggggcagaaggcaggctgctggggctgagctggagctgggagtgcgttaatgattaatcttggacacagtggccagagccctaggggaggaggggcagagatctcccctgtctccatcagcccttcctagaaaggggatcagagcaggaaccggagaccatagtaagggatggatcccctctgctgggggaaggccctggcctgtaccccagaggaagcaaagccaccaaggagaggtttgggagagtgggacaaaccctggcatccaggaggggtcctataggaaatcctacagttcctgtttcctagcccagtgcccaggaagggggtccagcttgatctgccccttcggtgccaggccagcattttggtaccagcacagagcacactacagaccgagccctgcccagtgggaactgccccgcccagctgcccagagccagagaggtgatgggcatgtctggctgctgtaacccacaccagggggaaggaaagggagagaaggcagcatgcctgacacctgatccccgggctgccgcggtgacaggtgcatgagaatcctccagaggggagagaggtgtagaggactgtccattccagttgggaaaacccaatctcttcctttactgacggggtgacctgaggcccagagagggtgaggctcatccaggccc

SEQ ID NO: 9396 - DNA, 6000 bp, Homo sapiens
ctaattggagcttacacctaccgagtgccagctgactgcaacctctgcctgccgggttcaagcaattctcttgcctcagcctcccaagtagctgggattataggcatatactaccatgcccagctaatttttttgtatttttagtagagacagggtttcaccatattggccaggctggtttcgaactcctgacctcaggggatctgcctgccttggcctcccaaagtgctgggattccaggcattcatcactgcacccggccaaaagattagaatgtcatcaggcagagaaacaaggaaaggcgttccaggctgaggcacagcctgagtaagggctcaggagtaggagaggccttggggtgaggccccaggagtgcaggtgaggcctgcaggagatctgcgtctgcaaccacactggggagctggtgatttaagactgggaagctgcagtcaggcagtcgctcgatgaacgtttattgagcatttattaggagccaggtactgtaataggtgtgggggacagaggtgactaaggcacagtcacccataagagtctggccaaatctctgcatgcctaagactgtccccctcagtcagggacccacgttgtgttcctggcaccctagctgacccactttgtaacctggatcccacgcctgcactcctcagagtagccttcttccataaaatgagtttaactgcggttgtcacctggtgatggagctctttgagctcttaggatgaaagattctgtaaatacgcagcctttgtcaccagactgggtggggtggaatagggagcccacatcagatccccaagggtgcagagaaacagcccccgggagttggagggagggtcggtcgccaagctcccctgaggttaccgccctctgacagctgccaagcgagttcctgcagccagaatgcctgacatgaaagtcccccgcccccgccaaggcctgcctgtgatggttaaatgacagacgccgacaccctggctgctgactgatgctgacagcagggagggagatgtggagctggcctgggttgcaggcaggtgactggaggctcttccttaactcgtgttcataggacgctgaacacccaccacgacctgtcactgtccagtgtccatgggggaggcagacaggcacacagcacattccaccatcacgtggggtgttagaggggaggccctgctctctggcagcacagagaagcccacctgacagatgatgggtccaggacaaaccaagggcccaacctcctcccgtctccccgcaaagatcatggtgataaaacccctttgggatgaagtagttcagaagtcctttgcccatgtgaccctcatgcaagagaaaatgaaggccagagagccccattgacttgtccaaggccacagagctcattggtgtggcacacaggacacttattattattctgattccttggcttgtggcttcatcactccaatctcttcctccatggtcacattgccctctgctcgtcttctctgcctctctttggttttttgtttgttttgaaacagagtcttgctctgtcacccaggctggagtgtggtggcttgatcttggctcactgtggccttgacttcccaggctcaagctatcctcccacctcagcctcctgagtagctgggattacaggtacacaccaccatgcccagctaattattttctttttttgtttttcttttttagagatgggtggtggggggggggggtctcactaatttggccaggctggtctcaaactcctgagctcaagcaatccacctgcctcagcctctcaaagtgctgggattacaggcgtgtgccacagtgcccagcccctatctttctcttaaagggttacttgtgttacacttagggcccaccctgataatctaggataatctcatttcaaaatctttagtcacatctgcaaagtctttgcatgtagataacagtcacagattccaagcattagtaccgaattcctgtagcgaccattattctgcctgctcccagcccccagaggatgcagagtttaagaggggcctgccttcagtcagcctgtgggcatgagcctcacatatccactcagcacatcctgggaggggacctggactcccccccgaccccagcaaggccagacccccctgtctgccaggacccccggagagggggaagcaggctgtgcaatggaggaggtaggatgtggcaactccatagaagtggttaggacagaattctggagttgcgcatcccagagatgaggagtcagagaggcccttcccctacctggatgctgcccctacgtctgatttgaattctcctttcattgctccatccagcagacactcagaccagagccaggctcggtaccaggctctggagagcttgtccatgtcctcaaagagcttgcagtctaaacctaggagtgataatggccagcaccgtggtctccaggagggtggaagagcaggagactcttctctttccagagcaggcaatggaggcccaggaaaggggactgttcttgtctggagttgggctgaagccgctttagcatgagggttttgcctttcctcaatcctccgaccccacagccttcctgttcctgcctcggtgattttgtcattcttgtctcgtttcctcttggtactttaaaagtaaaataacgactgttcatctgcccttagaagggctggcacagaaagagattcatcccaagctgtgcacctgctctatctgtacagttggcggatggggagccaaggaacaggacccccggagtcaggcagcattttactcaaacgctgagcactcgttccaagtctgagtaaggtagaagaatgagtggccagccctgccttcccacagctcaagtgcagcaagcaccgtccttaaaacagaagagctggccgggcgcggtggctcatacctgtaatcctagtactttgggaagccgaggcgggagaatcactggagctcaggagttcgtgaccagcctaggcaaacatagtgagatctcgtctctatttaaataaaatagaaaatctgtttaaaacaaacaaaaaatagaagagctgtcgtgaaacttgggtgctctgggtaaagcttgggaagaggcagggcctcccagcatgtctggaatccccaaattagcaacctgtttccttgtctgaaaaatgggtgtagaaatggccggctaagaggacaacggcactggtgccgggtgttgagcaagccctcgacagcctcaccgagagtgcaccaagggccacccgcgcgctgccgctcccagggctcccaccctcccctcggacgccggcctggtgaaccaggctgcaggcgcgcgtgggagcgctcagagctgtctcaggtgttctgagccgccagatcgggagtccagtgccctgctgagcccgagccccagcacaggctcccgtcgcgtcctcccgcagcccggggtccccgcccgcccagcgcctcccacgcgcggactcctaggctgagcgcgcagggcagcggggcccacgcgagggcggggcgagccggggctttgtgttcaaaccggccaatgggtggcggcggtgggcggtgacggccggcggggcctgaccaatgggctgcggcctgtcagcgttgactgacaggcgcacacatacagagtcggccacacgcgcgccgcccggccccactcgcgcagcgcgggcctccgccggccgcattgtccgcccgcccgccttgtcccgcgtcgccgctcttcgcgtgcccgcgcgccccgggcccggccgctgtgtcgccctgagcggagcgccgcccgcgggatccccacgcggaaagggggcgcgccccggcggcggcctggcctcggacgcccccggccgggctagaagccgccgcggcagcaggtgagtgcgggcgagctcaggagagggttggggggccgcggcccggcctgaccccgggtcaccgtcgggccactcgggcggggccgcgccgccaggcctgcttcctcctctccgggacgtgctgggccggatccagcctccacccgggtccgcggcccgcgccctgactcacctcctggcccccgccccgcctgccgcgccactggtcagccgggagggcggtgtctgcgggcgggacttcccgggcagcctcccgggaggaggagggcaaaggccgactgccccaacccggccccgggcagcgcctacgggttttgtgccagacaggccgtttccagggacaggcagttcccagcctctgcctgtcagaactcagggcctcagaggaaggcccgttttgttcagttctaaaacaaaacaaaacaaagcaatggggggcgcggtgtgacttagagagccaggaggcgcgcctttggtgacaatttctgcaggtttggcctgtgggaatgagggcagagggagttagcaccgggcgtttggcaggtcccacaagggcgtgtggcctggctgtgcccagggagtggaaatgtcacgaggaagatgccccagatctggtttaagtctgaagatggatggagatgtttgtgatggggaagggcggaattgagaaaggaagtcgcccagctgagaagtggggaaggatgctttccgatgagcgtttcctaactgattgttagggaggaggtggggcgggggtggtgtctattatgattcgcagtagtagatttcagctcccagaggctcacttcttgttttggagaatggggcctcgacctttttcatcttgtgaaacccagactcaatggtaaactgttttgtgatgccaggatgccgcaggaaagactgagaggcatctctgggagttctgggagggcggaggcgggtgctgacagttttcagcactccccgctcaacctccatcagaatatttagttcttcccagcggcagcttgggtatggtataaacatgttgccttgtttctgccctgggcaaaggtgtcacctccttcagcaggacagaggctaagaggagtccctgtgtgggcagctggagccttcaggtagggaccgtacgggcggggcagggaggggggaggggagattaccttataaggacaggaatagagacaaggacccaggccaacttcctgcttttcctactaccaatcggtcccttttccaacaccagctaaaagtagaggggatgccagatgggcgtctgacctgggaagatgccaacaaggccaggacatgaggctgcttgtttttcagaggaggactttctagctggactaaccagaccttcgggtttctgcagcctgggttgggaagtggacttctatactcaccacacaacccagagaactggtcatttaagtatcaaccaggaatattagaagtgatcaaaagtcacaagcaagtgctaggaattcccaagtgactttgttgtacgggccagcagaggcactaacgttgagactccccatgttggcagtcggggactttgaattcgggtgtctagacctgagtggttcattaatcttcctcatgtcacagaatgctacctcttgccagatctttgcactttggcttcctttgtcctcattatcagttccagagccttgatttctgccccacatggtgaccggaactgactgtaattcatgctgccctcctcctccctattttgttagtttgctaacaaatatttgttgtgtaacaagtttgtatacagccttgttttgcgcatgtgtgaggctaaaaaagattctagctgaggacacacaactagaatcttcaatacattcctgaaacaactggaaaactttatgcctgagtagaaagacccaggccctacagcctgtcagagctgagcccaaaccctggctttggcacttacaggctggggactgtggacaagttacccattgcctcagtgtccaggttcttcccttgtagatgggagtaatgatacctaccttgcttctaataatataaatgaggtatacaaggagcccggtcc

SEQ ID NO: 9397 - DNA, 6000 bp, Homo sapiens
catggtggcacgcacctgtagtcccagccactagggaagctgaggcaggagaatcgcttgaaccccggaggttgcagtgagccgcgattgcagtgagcctggcaacagagcaagactccgtctcaaaaaagaaaaaccaaccaaccaaccaaacaaacaaaaaaaacagtaggtcaggtgggtgggtaggcagacgggcatggtggctcatgcctgtaatcccagtgctccgggaggctgtggtgggaggatggcttgagctgcagtgagctgtgactgcatcactacactccagcctgggcatcagagcgagatctcttctctgggtaaataaacccagtgagtcactccctcagctacctagatcctgcagggctccccattctccttgacattccagttctttccacccggggctccacattgcctccccaacgtcacatcacaccccagctcggctgtatcagcccctctaaccttgcccatcaggcctctgttcacctgtctccacctccaggccctgccagcaaggcgcttctccctttctctgcctggtctgtgccacgttgcctgaacacacagcccaccccatcccctcagagcaccaggagctcacatctgggtccaagaccctaccaggagagcaaggcaagagaatgacgctaaggcccagcatgagcctacacagagaaggtgcccactgtctgtcaaattcatccattcaacaagtatttaggctgctcatcgtggctcacgcttataatcccagcactttgggaggccaaggtgggaggatggcttgaacccaggagttccggaccagcctgggcaacatagtgaaacccgtctctacaaaaaaatgcaaaaatggccgggcgcggtagttcccacctgtaatcccggcactttgggaagccgaggcaggtggatcacctgaggtcggaagttcgagaccagcctcaccaacatgttgaaacaccgtctctactaaaaatacaaaattaggccgggcgcggtggctcacgcctgtaatcccagcactttgggaggccgaggcgggcggatcacgaggtcaggagatcgagaccatcctcgctaacacggtgaaaccccgtccctactgaaaatacaaaaaattagccgggcgcggtggggtgcctgtagtgccagctactcgggaggctgagaatggcgtgaaccctggaggcggagcttgcattgagccgaaatggcgccactgcattccagcctgggggacagggcgagactctgtctcaaaaaaaaaaaaaaaaaaaaaaaaaaaaagattagctggttagccagatgtggtggcacatgcctgtaatttcgggaggctgaggcaggaggatctgttgaaccctggaggcggagtttgcggtgagccgagatcgcgtcaatgcataccagcctgggcaacaagagcgaaactgcgtctcaaaaaaaaaaacaattagccggacgtggtggcatgtgcccagctactcaggaggttgaggcaggaggaacacttgagcctgggaggttgaggctaaagtgagctgtgatcaggctcctgcattccagtctgggcaagagtgagaccctgctttaccaaaaaaaaaaaaaaaaaaaaaggtatttattgagcacctactatatgctaggctctgtgtggctaggctctggggatgtacgggacttcaaaccagatagggccttgccctccgggagcgcacagtccactgggatggggtgggagtgggggaaacacgcaggaggccttcagctaagtgggacaaagatcactccacagtgggacaatggcgtggggagcggaggcgccgccggcgaggaggctccgggcgggccgtgctgagaccgcagcatttaacccggcccgaggcagctgggaacagtgctgcccagggaactacaaattcaaaggcccggggaagggccgcgctgagcagctgcaggcacaggcccaggccaggccaggcaggaccggcccctgcagtctcggaggccgggggaagattccgcctcttattctcgctcccatccggggggcgccatcttgcttcctttatggcggcgaacgaggcccagagaggccaccgtcccgcgcggggcagcacagcggcgggagagctcggagcgcagagggccgcatccccagttcccagtctccatccccggcagaagcaggcggagcgacccggtccccgcccccgcgcccgccccgccccgcgcgcccgcctggcccctcggccccgcccctgctccggagtgacgcgggcccgggcgcgacggtctcggcggcggcggcggcggcgacagagcgagcgcggcgcggggccaccatgggggcccagctcagcacggtaggcggggagggggcgccggggccgcggggcgtcgcgagggactgggacccggcggcgagggggcgggctggcctgcgggaggtgacgcgggacccgggccgcacccggccgcacccacttcgcccgcccagcccgccgcgccccaccccaccccacaagggcctgggcgagctacgtggtgaccgctacttacgccctggcagtctgcagcggggacccagccctcctgcccggggggcgcgccagagcccagcacccgggggcacctgggccctgccctggccgccgtggggccttggctgctggagggacccgtggttgtgagcgtgtgtgccgctgagtgtgagtgtgtgagcgagcgtgtgaatggcttgagagtgaatgtgtgtgtgagtgtgaccgtgggtgtgaagggcgggcatggaaacgtgtgatggggtgtgtgtgtgtgtacgggagtatgtgaatgggcgatgtcactgactgcgactgaacgtgtgtgtgtgtgcgatgtcactatgtcagagggttttgcacgtttagcaacaaggaacagaacccggatgacacgggggcatcctcccaatgctcagtgggccaggctcccatcaaggccaggctcccactgaccctgcaagctgtgctggggacctcacactttgcggtgtcagtgctgtttgccccatttcacagatggggaaatgcaaactagtcttggccaccgtcccacaacgctgccgccggaaggagcctgctccatggggtttcaaagtccactctgctgctgtcactcctgggctggcctagagccaccttcccttccccccaggccacctcctctccccagtttctcaaaagttgaccatggtgaggctggaggcttgagtctgtgtggacatgtggaggctgcggctgcagagggcagctctcctgtcaactgtgacccgctaggcgtggggaggctggcacaggaggaatcagcccagtgctcctccacctccacctctacctctatgcctggcatctgccacttggagggcacctgggtcctccctccttggggaggacctggagtctcctccttggggatccaggcaaaaggcctcttggcttgggtggttgctaaggaaagtgtggcccaacccagaacttcgggatgttcagaccccaggcaaccttggccagggtgaacctgtgggcatcaccccaacctccatgcaacacccggcccatttttccccagaaagcatctgcctcctttattgttgaaatgtcctgcctgtgtctctaaagcttcccctggtctccacccaacccttccctgctgtttttggtggtgttccataccttccagctggtggttggatttatggccacgtcccctgcacctggctgctccatacatttcttttttcttttttcttttttgagaagagtctctcacccagacagtagtgcagtggcgcgatcatagctcactgcagcctcaacctcttgggcacaagtgatccttctacctcagtgtcctgagtacaggcacgtgccaatatgcctggctaagttttttttttttgagatggagtctctctctgtcacccaggttggagtgcagtggcatgatctcagctcactgcaacctccacttcctgggctccagcaattctcctgcctcagcctcccaagtagctgggattacaggcactcgccatcacacctgggcttcgccatcttggccaagctggtcccgaactcctgacctcagatgatccacctgcctcagcctcccaaagtgctgggattacaggagtgagccactgtgcctggcctaattttttgtatttttaatggagacaatgtcttgctatgttgcccaggctggccacaaactgagctcaagtgatcctcccatcccagctcctcaaagtgctgggattacaggtgtgaacgccgttcttggcctcattccatatatttctgttgaatggctgagcagtcctctgtaaggggcagagcactgcctgggagtcgggagacctccaccaaccctcccccgcccagccccatctctccaagggtgggtggggattaccctttgtgggtgctgctgggatcctcgcttggcccagaatgtctccagcacattctgagccaggcctcctggcttacgggctccccacagtctggaggaggctggctgggggcctggtgctctaggtgtcttatctaagacatgcaggccccatgggaggcctctcccaacactttgtgggatccaggccaggggttggccctggagtctgccagccacactgggaaaacattggagcttggtctgccatcctgaactgtggttcccctgcctcccagcccggctgtgagtgctcagcgaccctgacaggctgacaggtacagtctgccgggctttcctactgtccctggcagccccatgcttactctgcggcccagatcccagctctgtgtccacctgttccttctcctgggttcccttcccccacagttcccagccaagccagagccccccactgcagaacttcctccactccctcccacttcctcccggttagaacaggaccaggagggaggtgccgctcagattctggcaggaccgctggcgggcaggcaggggacaggtaagcaagtcacccgactggcttgtctaagctccagggcagggagctggcacctggggaggaccgggcctgccaggtcgggggccctggcagctctctctgcccacccctaacctggcctgggcagagtggaggccagggtcccagtggggaattccaggggtgggcagctgcgcagggcattctatgtgtggggagcagagctacgcagcccctcagctatggtgcatgagctgggggctccctgggactctggcaccctgtgtccctcttcccctctgtgttattagaggcaaggagaggcgggtgatgggttccctggtggggcagagcatggcttgtgggcattaggtcaggggctgggaggcagctgtctcctgggcccccaggtggctggggtgaggtggtctgtgtgtgtgagtgtgtgtgtgagtgtgcacgcagcacaggtgaggaggcacaggggtgggaccttggcctcagccacctgccttctgtttacttggcccactgctggtgagggttggggtggtgctgtggacgaggacggggcagagcctgttccaacccgtgtgggtaggaagagagtgcaccccaccgtgtgagtctggcagggcctctggctttctggaggtgaaaccttcgcccctccactgctcctggctgtggtgcgccctctctgccggtgtctgtctccccgtctggcttgaactcgggcggggcctcctggcctgtgtcccctgcgttgcacatgggacctgccacctcagtgcccactggggtttgtggactaaacgactgaccgacggtgatggtctgcctgtggctgcctccccagataagaacttttacctataaaaagcccaccccttctctttagtggccagaaagtgtccccgggctcaagtctgtcccctgaggcttggtttcctcacctgaagtgggaggagtcatgaacaggc

SEQ ID NO: 9398 - DNA, 6000 bp, Homo sapiens
ttttccaaatgtggtggaaggtgccggatgtagcgtgcccagacacacgatgcctatgatgcccatgatggcctaggcgtgcatggggcttgctgtccccatctctgtccccatggcctgcgcaggcagctgctgctgtgccagggatgaggactctgggggagggtcccacacccactgttggagtgggggctgagcacagggtctttccctgctggggttccctttaccccctgcaggggcctgatggaggagaaatgcaggcaggaaaggatggcagacaccttatcagtgactgtgcgtgtgcagggcactggtggcaggaccgttggtagagctggctgaagtgtgcactctcagcagccaccctcctgtccacacccctggctgagaccctcacccatgttagccccatgctccaaggcaggagcccactctaaggttagcagagcccaggccagccacgccttcaaccccacaggaaggcagggaccctcagcaagaaggctcgggctggcaacaagggctggtgccaggggttggggggcagagccagggcagctgcccagggagaggggatgcaaagggaaagaggcgccccaccggggaggggaggctgagtgcagacaacacagctggaaacgctgcgctctccccttacatttggtcccccagtttggccactgcaggctctgcaatggtggctacgccactgaacaagcagggactcctttcacctggcatatctccgcccccacccccacacagtgtattcagtaatatgcgaccagtgtaaatagaaccttaaataaatctaaacatagttgtcccaggccgcatgacctccctagtgaccatggagggcgcctgaatggtcatcctgtctctgctctgcctggggctgaggacacggggctgtggagacagctgcgcctttgtgaaggacactcacgtcctttccttttaagtcatgcagacttcagaacctccttctagctcctttccttttttaagtgaagaattggagaccataaaatcagaatatgtagaggcagatgctgtttgcgtcagtgcattaaagaactcggctgctgatgagcgatttccatcagtgcaaacagtgtcctgtttgacagcgtgaatccggcagcccccaagatcagaaggacgtgctagacgaatgactaagttctaagctgatggttctgagttatttgcttgttattgactgtaacagataaaccctgtatgatttgttttctgaaagtaaatgagtcctcaccccaggagtccgctgggggaaccagtgcctcagtcatttctcccagccaggctatgttagctggagggccaggcagaaaccgtctccaggtggcacctcagcgtcctcatgctgtgcttctcctcatgtccaaaccttttagagaaggacatgttgaatgtgtcattgtaaaagtaggtctcattctgaaacctctaattaatatgccaaaaaatattttgttaagcctttgaaatggaattttttcgtatgtgaaaagaatgtaaatacatctatatgtgccaagcatacgcactgcacctgcagctccatatttaaaaggtgatgatattcttgtctttcagatgctttgtttgcaggcaaagcaagcagcagctggaggaggagcagaagaaagcactgtatggtttggaagctgcgggtaattcctaaaacacaggctcagtgttgtcactgtgtgtgctggagtgcgggtttctgtcctctctcagggcactgcctcttctccctgcccacctgtgcttttcctttttcctgtctggcaccaggcatccatttcttcttagccccaggcagcgtcaggtcactgttacttgccgtgtgtggctgtgtggagcagtgggttttgtgaaaggccccgttaccctttctgaaacgctgttgtggtgctgagtctggactcctgtcccaggtgctctagaatgtgggggcagcagatgtcccattgagggcttgcttggtgaccacctcaggccctggcaaccacacagtctctgtccagcagaggcagcctaggcagtgtacagtgagtgggtatggccatctgccgatgaaactttatttatggacactgaaatttaagtttcatagaatttccacatgtcacaaaatattattattttgatttttttctctttctcttcttttttttttttttttttttggatggagtttcactcttgtcgcccaggctagagtgcaggggcacaatatcagctcactgcaacctccgcctcccgagttcaagcgattctcctccctcagcctccctagtagctgggactacaggcatgtgccaccatgcccagctaatctttgtatttttagtaaagatggggtttcaccatgttggccaggctggtctcaaactcctgacctcaggtgatctgactgcctcagcctcctaaagtgctgggaccacaggtctgagccaccatgcccagtcaataatatttatttatttattgggacagagtcttgttccatcacccaggctggattgcagtggcgcgatctcggctcactgcaacctccaccttctgggttcaagcgattctccttccttagcctcctgagtagctgggattacaggcgcctgccgccatacctggctaattttttttttttttttttttttttttaagacagagttttactcttgttgcccagtctggagtgcaatggcgcaatctcagctcactgcaacctctgccttccgggttcaagcagttctcctgcctcagcttccccagcagctgggattacaggcatgcaccgccacgcctggctaatttttgtatttttagtagagatggttttcaccatgttggccaggctggtctcgaactcctgacctcaggtgatctgcccgcctcggcctcccaaagtgctgggattacaggcgtgagccaccgcgccagacctttttcaaggatttaaaaacgtgaaaagcattcttagctctcaggccacacacagacgggcggcgggccggatctgacacacagccttggtttgctgacccttgttctaaattgtccaaaagtcaccaagtgaggagagggacaacagtcctgccttctgggaggtgatcctttgggtaccacttcctgcggggagcggacagttccgtggtggatgtttttggtgttgagctgaagagtcgattgcatgaagtgtctgctaaatgcatgagcaggtgagagcccgaatggcctcccaccgtcctggtgcagggcgctgcccggcgccattgtaactgtgacatctccgtggttctttgtgcttcagaggacgtggaggagtggcaagtcgtctgtgggaagtttctggccatcaatgccacaaacatgtcctgtgcttgtcgccggagccccaggggcctctccccggctgcccacttgggagacgggtcttctgacctcatcctcatccggaaatgctccaggttcaattttctgagatttctcatcaggcacaccaaccagcaggaccaggtaagtggggtgctcttgcatggagcctccactggcgagtaatttatgttccagcagtccctggtttatgtgttgtaggaattcattatttaattcaagggaaggaagggcaaacttttttttttttaatttcacaaactttaaactcctggttacaactactccttgtaaaatatcatttaaaacgataaatttttgaggccagatgcggtggctcatgcctgtaatcccagcactttgggaggctgaggcaggcggatcacccgaggtcaggagtttgagaccagcctgggcaacatggtgaaacctcatctctactaaaaatacaaaaaagccaggcgtggtggcgtgcgcctgtaatcccagctactcgggaggctgaagcatgagaatcgcttgaacccaggaggtggaggctacagtgagctgagatcacgcaactgcactccagcctgggtgacagagtgagactccatctcaaatatatgtgtgtgtgtgtgtgtgtgtgtgtgtgtatgtatgtatacatgtgtgtgtatgtgtatatatacatatatgtgtatatacatacacatacatacatatacacacatacatacatatacacacacatacatacatacatatacacacacatgtatttgagcacagaaactaagaggtatgaatctttataatacaacttcttacccgttgtttctcttcctatttaaaaacagaacaaagcgacacagtaaagatgtaagtggcccttgcaggccactgaaaatagactctttaggctcccagaaatgggttctgttcggacccttctaccacatctttctgtagcctatgcagaggaagacccgagtctagtcatgttgggggaagcggaacttttggtcacagtctccaaatttagtcacatttctttttttacttaagttctatttaagatctagtctaatgctatttttatgtggctttttaagtagtgcttgttaaaaagagaatacaaaattctaataatcactgctaattatttatcagaattctgtaaaaagcgttcgtcattgtagataagctgtggtttctaaaagcattagaagtcattttgacaagtgccgcggaaggtgggcaccggggaaggtaggcgccggggaaggtgggcgccgggaaaggtgggtgccaggtttcccttcatctctgagctgtcagttcagctggaaagggaactccaggggcctgcacaagcagtcgcatcctccgagaagggccgtgtgtgcacccaggcctgacagcgctcgctgtcaggcctggggtgttctgctgccccacccagacgatgacgtttagagctgaatggtccctctcactgtttcttggtagtttgacttcacttttgttgaagtttatcgcgtcaagaaattccagtttacgtcgaagcacatggaggatgaggacagcgacctcaaggagggggggaagaagcgctttgggcacatttgcagcagccacccctcctgctgctgcaccgtctccaacagctcctggaactgcgacggggaggtcctgcacagccctgccatcgaggtcaggtgcgtgcaggggtcctccagccaccagcgccatccccttgagccctgaggtgtctgtcacaagctgccccacccagggtggggggttccctggggctttataaacacaaaacgtaagaatgttttataaatgcacttttctctccctatgtcaaatatcgaatgagatgccgttacccacattctggaaagatgccagggtgccgagtcctcagcattttgttttgcagataattttcatgggtgtttgaagctcctccatttcattcttttcctcttccacaccctgtgctccaggctggcattgggctctttgccctggcattctctctctcttctcctaaataattcaaaaggtgggaggctgaggcgggcagatcacttgagatcaggagttcaagaccagcctcgccaacatggtgaaaccccgtctctactaaaaatacaaaaaaaattagtcgggtgtgatggtgcatgcctgtaatcccagctaccccggaggctgaggcaggagagtcgcttgaacccaggaggcagaagttgcagtgagccgagaccatgccactgcactccagccttggtgacagagcgagactccatctcaaaaaaatttcaaaaggcaaacaaaggaaaccgcctttacaggcagtcctttgtccactgaatccaccagggaaccgctggcctcaagggccacagtcaatcaccaagtgcaggtgctccgtgcagggaggggcaggaggcagcagggctgggaagggcaccccgaggatgggaaggagaggaggagccccagagggacgccccgtgctggaggccacgcagcctaggggacgcggggaggcaggtgtggccacacacg

SEQ ID NO: 9399 - DNA, 6000 bp, Homo sapiens; identical to SEQ ID NO: 2197

SEQ ID NO: 9400 - DNA, 6000 bp, Homo sapiens
tacctgtcatgggccttttcattggtccctttttgttgaagatgaagcactttgccctgtagctgattgcaagagatttcaggaaagcatcagagtaaaactctaatgacaaaagacttaaaatagtgtagttaaatatctaatgagagatcattacaaaatcaaacgatttacaaggaatgttggttgtttatgacacatagcattttaaataataaccagaatgatgattgctgttatatgaggacatgtcattggcagaagggtattcaccagtttgtgggaactttatacaatatctggaatccttatattaacatttaccaatatgcatgtaactcaaggaagtttaaatagcattaaaaaaaatttttttttagtttttttttttttttttttttttgagacagagtcccactgtgttgctcaggctggagtgcagtggcacgatctcggctcactgcaacctccgcctcctgggctcaagcgattctcctgcctcagccccccaagtagctgggattacaggtgtgcaccatcacacccagctaatttttgtatttttagtagagatggggtttcgccacactggccaggctggtcttgaactcctgaccccaggtgacctgcccaccttggccttccaaagtgttgggattacaggcgtgagtcaccgcgtccggccctaaataacattttttatttgacagcaccttgcatgaaattctgtagggtccagccctacagggtctgtgggtttttctccccgtgtgcagagatgagagatcgtagaaataaagacacaagacaaagagatagaagaaaagacagctgggcccggggaccactaccaccaagatgcggagaccagtagtggccccgaatgccaggctgcgctgttatttattggatacaagacaagggggcagggtaaggagtgtgagctatctccagtgacaggtaaggtcacatgggtcacgtgtccactggacgggggcccttccctgtttggcagccgaggcggacagcgagaggagacagcttatgtcattatttctgtatttcagagacctttagtactttcactaattttgttactgctagttagaaggcatagccaggtacagggtggaacatgaaagcggaccaggagcgtgactgcttaagcacagcatcacagggagacggttaggcctccggataactgtgggcaaacctgacactccacaagaggtggttgagcagagtcttctctaactcccacagggaaagggagacttcctttcccggtctgctaagtaacgggtgctttttctaggcactgacgcaactgctagaccaaggtccgctaagtaacaggcgtcttcccaggcgctgacgttaccactagaccaaggagccctctagtggccctgtccgggcataacagaaggctcacacgcttgtcttctggtcacttctcaccgtgtcccttcagctcttatcactgtatggcctggtttctcctaggttataattgtagagcgaagattattataatattggaataaagagtaattgctacaaactaatgattaacaatattcatatataatcatatctatgatctatatctaatgtaactattcttattttatatattttctttattatactggaacagctcgtgccctcggtctcttgcctcggcacctgggcgacttgctgcccacaaaattcaccattgaaataaacctaattagtttaacatctctcttataaggtcacaggacagatcctttgaggtcttccaggggccctccaggaaatctcaagtcagtctgagatcaagacaatgtcacaggccacatgcagtggttcacgcctataatcccaacactttgggagtccgaggagggaggactccttgagcccaggagtttgagaccagcctgagaaacatgctgaggccctgtctctacaaaacaaaaagttgaaaaattagctgggcatggtggtacatgtctgtagtcccatgtactctgaagactgaggcgggaggatcacttgagcccaggagttcaaggttgcagtgagctgtaattgcaccactgcactccagcctcagtaacagagtgagactctgtcactaaaaaaaatttaggctgggtgcagcggctcacgcctataatcccagcattttgggaggtcaaggtggacagatcacctgagatcaggagttcaagaccaggctggccaacatggcaaaaccccacctgtactaaaaatacaaaaattagctgggcgtggtgccatgtgcctgtggtcccagctacttgggaggctgagacagcagaattgcttaagcctgggaggcagaggttacagtgagcccagatcacaccatggcactccagcctgggtaacagagcgagactctgtctcaaaaaaaaaaaaaaaaaaaaaaaaatttaaagaaactttatacataaatccattcaatgattatgaggtcaattctagccagctttgacctcataacataaaatttcttttctgcagactttcttgaggccaggagttcaagaccagcctgggaaacatagggataactttctgtatccattcacagttgcttttgttttgagacagaatctcagtctgtcacccaggatggagtgcagtggtgagatctcagcttactgcagccttgacctcctgggctcaagcgatcctcctgcctcaccctcccaagtagctgggactacaggcatgtaccaccatgccaggctaataatttttgagtttttttatagaaacagggtttcatcatgtttcccaggcttgtctcgaattcctgggccattcaggctttgtcccatatttttcctctttttgtaattttacttcaggacaaaattacatccctttctttaacaaaaacactctacattctttgcatacttttcatataaaaacacatcctatcttcctcccatactttgtataggaaattgtttccctcattcttattgtttctaggagttttgttttcatatattgattataatttttaaccattagtaaccggtattttttttttaaagagacagcgtcttgctcttttgcccaggctggagtgcagtggcacaatcaggactcactgcacccttgaactcccgggctcaagtaattctccaacctcagccccctaaagcactgagattacaggcatgagtcaccacgcccggccataacttgtattttacaagtaaaactgggaagaagacaattggaaattgtctgtcatttaccagtttgttggcaaattttatgaatataccatcttataatctctagaggtatatcctttttatagtacaatgtttttaagtgccaagtacatgtttattaacagaccagaatacctttagccagtctgtaccatataaaaataagaagccaaaaagtacaaaaagttacgcttaataatgaatgtttcagcactttcttctcttcaggtattatttagatattcaatgaatgtctattatttaacttcacttagtatgactctgaggttgaaagttactgaaaacatcttgtaagcttttttaggccaatatattatcaaacgcaattaacaaaacacaactcactagtttatataagagctagttctcacttttttttttactctattttatatattttttcttttcttttcttttcttttttttttttttttttttttctgtagagacaaggtcttgctgtgttgcccaggctggtcttgaactcctagcctcaagtgatccacttaccttggcctcccaaagtgctgggattacaggtgtgagccaccacccagccctattttatatttttatctgaactgtgtttctggcaaattggacaagttaagggtcacttgctccatgtgaggggaaggctttctacctgtatttgtggataagacctttacgacttgttttgccctgatggatgactacatgtttccagtgagctcagctggttgcttttgtgggtccctgaggcactgcgagcccctgatggggcaggaagcctaaagttccagggaccgtggggagttgaggggctggagggggaagagagaggcctgcagcggggatccacaggtggaggaggccagacttgaagggggtgtctccttcaagagaaagtagggaagtatggaggtgataggaagggagaggcctgagaggagctagtttggggagatctcaagtatcccaaaggagccactgatgttccaaattatccttggtaaagtcacatcaacaaggaaggaagcagacagaggcgcacttgttccttgcagttttgttttgatgtgctgattaaagtagcgcagagggcatgatcagcagggctccagtaagacgctcccacgggaggagcaagaacacagaacagagggggcaagacagctccaccaggagtcaggagtgaatcccctctgggaacgaggcactaggaagaagaacttccagcccaggaggtaggtagcgttcagaagaagcctggggcgggcgcggtggcgcacgcctgtaatcccagcactttgggaggccgaggcgggcgaatcacgaggtcaggagatcaagaccatcctggctaacacggtgaaaccccatctctactaaaaatacaaaaaattagccgggcgttgtggtgggcacctatagtcccagctacttgggaggctgaggcaggagaatggcatgaacccgggggacggagcttgcaatgagccgagattatgccactgcactccagcctgggcgacagagcaagactctgtcccaaaaaaaaaaaaaaaaaaagcctgggactcttagcgcctcagagccttactcagaatcataaaatcattagaagcaatgtctgtcctcactgctgcatccgatattcttccggaccactggatcacaaatcaaaccatgtgactcccgcatgagcaggcagagtggagataacacggatcgctgtgtacactgtgtgctccggttgttgcatccgagggttgatcggatggtggttcccatccagatccaagtcctggcccctgatcacagagaaacacagctggacattaaagtggtgaggacggaaattataatatttggtgaccagtgacaggaggggagagagccgagctccgctccgagttgtgcaaagaagtggggagtggggaggaagaacagtggggactcagtggagtgaggaaagtggaaaattaccaaaagcaggaagggagggttagccttgggaaaccaatctgggtttgccacgggggcttactgaagtcaggcccccagtcccacagaggctgggagacaggggccccatcttcaggtgttggccagaacacaggaaattctcttggtagccatgactttctcaggcaggcgctttgaagggggctgggatcattttaggaatgtggccttgagctgttagaagccatgtgcagtatggcttacacctgtaatcccagcactttgggaggctgaggctggagaatcacttgaggccaggagtttaagaccagcctgggcaacatagcaagacgctgtctctacaaaaataatttttaaaaaattagccaggcactgcggcatgcccctgtgtagtcccagttactcaggaggctgaagcaggaggactgctggagcccaagagttcaaggttgcagcaagctgattgcaccactgcactccagcctgggcggcagaggtgatcacgccactgcactcccgcctgggcgacagagcaagaccctgtctttaaaaacaaaaaggccaggcaggtgcggtggctcatgcctgtaatcccagcactttgggaggccaaggcgggcggatcatgaggtcaggagatcgagaccatcctggctaacatggtgaaaccccgtctctaccaaaaacacaaaaaagttagccgggcgtggtggcgggcgcctgtagtcccagctac

SEQ ID NO: 9401 - DNA, 6000 bp, Homo sapiens
gtccaggtgaccagggtccttggagtgacagctcctagagccccacctgtagtcctgcaagctggggagagggcctgttaggagaggcatcccctgccctggggttgtagaggtgaactaggctcctcagaccttgtggggcctcagatgcttacatctccagcccctcctggcgtgggcatctggctgcagcccagctctgtggccccatctcccagggaacctttggtctaatctgcctcccgctgaaacccagcctcattcagccccaccgaggctttcagagttcaggtctctcattcagggtttgagaccccaccgggctcagagacacctgcagcctgcagcggtcccagatcacagcctcagggatgggaccaggagccagcccacatcccacctgcagcagttcctgtgcctttaaagcctcccctccccccgccccgcccccaggccactaggggagggaaggaggagctgggtcacagcagggaatcttagcttggttttggtgtgctgctggatgaccagaccgggcgtcgggtgagcccagaagtgagagcagttggctgtgccccagtgctgtgtgacccagaggcgccgctcaccctctctgagctggtggacatcataggtggggaagctcaggtcagggcactcccatgagtgtctggaggcctgagtcccattctcagctctgccatatgcttgctgcgctctagaggagttcctcttcctctccaagcctcggtttatgtacccgtgcagtgggagtgagttgcacttcggggtgaagggggcaagacttgtgtgggcgcatcctgcagaaggatcccacaggtgggcagagccctgggttctttatccgactgggtctgggctgggggcctctgtttcttggctgatgagtttatgtgagtttgagtgaggtatgcgagtgggtgaaggagggctggggggagtcacctgacttgtgcgaagaagctcttgagagagccgtggcttcttggaattaagaggaaagagtgcagcatgaacagacaggccctggaggatctggcagccctgagtgggggcggggggtcagctctggagtagagccagagctgtgatggggttgggggaccctgtgtccttgggccatgcttgcctcgctcctgggttctgtttgtggctgtggattggggtggggcagggccggttgtgcgaggggtcattgcccaactccagggggcgcctgccacctctcagctatatatatagggatatatatagttctttcgacaggtttccagcaggtagtggttattaaatcttactgaaggggtgttttttctgattctcggctctgtgccgcaagggtggaaactgtgagagacagattccaactccacgtctgggtagtaagcatccagtccagggctgtaggcagtcctggggaagacgccagagatctgtgcattctcatatcgagggatagcgactccaggctgggggctggcagggtaaggggtgggtgggtcctgggcttacccgcaggtctgcagacttcctggggccagctgacctcgtaaaatcccttttgtctaagcttcagtttcctgcctgtgaatggggttggggctgtgctctggtttcacccttgtggctctggggttgtggtgacaaagccatcaagctgggttgaaggattaaccaggaaacttcagactggctgccgtgtctacctcttcctcatactcctctctctgctgcatcctgggaagctgctctgctcagcctaaatgaggctcagttgtgtgtgtgcgcacgtgcttgcacgtgtgttggaagtgggtgatactgacaccagagtctgtgtctctgggtgagtgaggcttgcacatttctcgggacagggaactcactaccttatgtgcccaggacaagagctgtggggtctggagaagacttctaggccagcccctgcagtccttcctcaggtgacatggcttccccagacccacttccccctaggtgccctctctgcattcagggggtagagggctgactgggacagaatgtgacacactcagcatgtgaggaaaagcctccttcattctgtaggccctacctctattaacatgtcctttgataaagtgcctcccctcctgtctcccctctctggaatcctcagctgctgccaggcttcagctgtgccccattgaaggcagctctgtctccctactttccccagcccagggttttccttttggggtcagctgcagggatctgggccatcctttgcccactcagactttctttctgcccacctgctgctgtgaatcctgtatgtcatatatatatataaaatatgtaatatattatatattatatgtaatatataatatataaagtatattatataatatgtattatattatatattatataatatgtaatatattatataatatataatatgtattatattatatattatataatatgtaatatattatataatatataatatgtattatattatatattatataatatgtattatattatatattatataatatgtattatatattatataatatgtattatatattatataatatgtattatatattatataatatgtattatatattatataatatgtattatatattatataatatgtattatatattatataatattataatatgtattatatattatataatattatataatatgtattatatattatataacaatatataatgtgtattatatataatataatattatataatgtgtattatatattatataatattatataatgtgtattatatattatataatattatataatgtgtattatatattatataatattatataatgtgtattatatatataatattatataatgtgtattatatatataatattatataatgtgtattatatatataatattatataatgtgtattatatatttaatattatataatgtgtattatatatttaatattatataatgtgtattatatattatataatattatataatgtgtattatatattatataatattatataatgtgtattatatattatataatatatgatgtgtattatatattatatattatatgatgtgtattatatattatataatatatgatgtgtattatatattatataatatatgatgtgtattatatattatataatattatatgatgtgtattatatattatatataatatataatattatatataatatattacatataatatatcatatattatatttatataatttatataatatatcatatattatatttatataatttatataatatatcatatattatatttatataatttatataatatatcatatattatatttatataatttatataatatatcatataaatatattatatatagtattatatatataaaattatactttaagttctagggtacatgtgcacaacgtacaggtttgttacatatgtatacatgtgccatgttggtgtgctgcacccattaacttgtcatttacattaggtatatctcctaatgctatccctccccgttcccctcaccccacaacaggccccagtgtgtgatgttccccttcctgtgtccaagtgttctcattgtttaattccaacctatgagtgagaacatgcatgtcttatatgctctcaggcagagaggaaactgctgagcaggccggggcaggggacagagccctgtggctctccactttagacccctcctggctgactgccatggaatgcagccacttagcagggccaaatcccctgatgttcctgttggctgtctagccttcagggacaggtcatgggaccttggttcctgccctgtcatcttcccagtcaccctgatcttcacggggaggaatagcctgggaaaggacttggtcacagcacctccaccctagggctattgaggatctcacagttgtgtgtctggtgggttctgtccagagcccatttgagagcagtggatgacaggacaggcctatgtgacccaggcaggcagcaatattgggtcagccttcatgtccccttctgtcagctggggcagcctggaagcatgattgtggggtaggtgttatgggcacggaatagacctcaggtggaggctgcaggggctctccggcaccgtagacacagcaggcccaggagcaggggagggagccatgactcagggagactctggcccatatccttggcagatgagggccacaggggaatgggcagcactgtccaaagtcccctgggctgggtccgcagctgttcctggctcagacttcttggtgggctggtcagaaacatgcagtaacttggggcagttaccaggtggccaagcctgcactgctgggctctgtgagcttgggccagctcaggccctctctgggccctgcctttctgggctgttcgggtggttccttgggcctggggtgctaatgtttctggatgggcagcagaaccagtctgcactcagggccccaggccatgttcccggaacacacctttagcattgacagcagcgtgtggtgaggccccttaggctgggttctggtctagtgccaggggcaccactactccaccgcctccagagccatctctgggacactggctgtgagttcagatgttctgaacagggacagggagagccagagggaaccagcctggggctcactggaggggctcgtgggcagacagcgccctttggagggaactgagtctgaaaggaaggaaaccctttccccggctcatagcacctgccatccagggccctcccagggctgcgtgaactttagtcacgtggtgacaggccgagtcaccatgccaagtcactgtgcgcctccttgctgctgtgacgtcagcttccccatcctcccagccaggctggacctccgtgagaggcctgcctgtcctgcaccctgtgcagatgcctcccactgtccgccggggctgctgggcacgccctggctggtctcttggactaggtaagctcatgagtcctctggccgctcctgctccttccctgcctctgctcctcctcggaggtggccacccccagatcccagtcccaattcggaggccccctgaggagtgctgcagggggccacaggcgtggctctgagccactctggagagtggcggggggcccagccagttctgtggctgggactttcccaggcagacaagtctgtctcttcctccccagcgggtgcagcccagaactgtcttctgaggaagaggtgctctcctgggcccccactgtccccaggcctcaggtaagcccatcagggtcccaaggaagggggtctgggtttgaggccaaccatggcagctgacctactttctagcctcagtttcccctagtgtgtgcagctctcacgctgtttgggtgagaaccaggcctctgggcttggacattctttcagtgagtttttagggtggagggatgggaaatggaagcccaggacctcagcagggtgtcttcctccgatccggggacatctgcctgtgggaggctgggcccaccctcccttgctgacctgccctgggaggaagggacagggcccagcactgcctactcccctccctgttcttcccagcagtctgagcctggctgggtgtcccctgctcctccagcagcctacttgggcctttgggtagacagattaacagacaggcgaggctgggtcatggttggaccaccccaggaccctgaccgggggctcagctcatgaccctgagcctgggagagatgaggccatgccctccagggcactcagcatgacccggcccagtggacgggactgggtagcttccttggtgcagggggctgtcatgctaggacggggtcactgaccaggccaggcccctgccccatgacttgtggtggaaatgtccttttgtttttgtttttttgcattttttttgagacggagtttc

SEQ ID NO: 9402 - DNA, 6000 bp, Homo sapiens
cgagagttgggctgggcttggggtttgttggcactgtagttgccctcagtgcacctcaggctttcgtatttagcagcattgttgttctgggtggaggctggtttgccagagggtttttcttaatgtctgctccaccctctacttgaggtcatccctttgggctacatctctagagtctgtcttttgcagcccgcctagcagtagtccactgtgtgactcaaggcttgttagcatgctgatagtagggtctgatgttctaactgtatctgagccttaagcaggcccagtgccctgaggatccagggtggagccttcacaagtgcttctgaccctcctgcagctggagttgggtccagcacagtggcttttcaccagggccctaaaggctccaggtatgctctgattagaggcagcctgactagaagcagggcagtggaggtgattggtttggggaacatatttgactttccctggtgggtttccagttggaagtatggactcaaaatagagaagctggtggccactggccagatcctgactgccctagactggttgctacagaagtggtaggtcagaggcctttggtcatatgtggtctggcctttgtcaggtatcatcatgaggcagaaatgttctataaatggaatcatatagttgcaaccttttggggttggcttttttcactcataattccctggagagtcatccaaattgttacttttattaatgatttgttccttttttttttctttttggcgacaaggtctctgtcaccctagagtacagtggtgtgatcactgctcactgcagcctcaacctcccaggctcaggtgaacctcccacctcagcctcccgagtaactgggaccacaggtgcatgccactgtgcccaacttatttttgtattttttttttttttgtagaggcgggatttcgctatgttgcccaagctggtctcaaactataggcctcaagtgttgaaggacatctgggctgtttccagtctttggctattacaatgaaaactgccgtgaacatccgcatacaggtttttgtgcaaacgtgttttcttttttctttttttcttttgtgtgtgtgtgtgtgtgtgtgtgtgagacagagtctttctctgttgcccaggctggagtgcagtggcacagtcttggctcactgcagcttccgcctcttgggttcaagcgattcgcatgtctcagcctcccgagtagctgggattacaggcatgtgccactacgcccagctaatttttgtctttttagtagagatgggtttcaccatgttgaccaggctggtcttgaactcccagtctcagatgatccacctgcatcggcctcccaaagtgctgggattacaggcatgagccaccacgcctggctgcaaatgtgttttcacttctgtgtgatagatgcccaggattacagttgcttgattgtatcgtagttgcaggtttagtttttaaagaaacaagcaaattgttttccagagtggctgtactattttatagtcccactatcaacgtaggagtgattcaacgtaggagtgatttaatttctccatatcctccccagcgcttactgttttcactatttttcatcttagcccttctgttaggtatgcagatatgtatgtagacctgtggctccttatggtttcaatttgcatttccctgaggctactgatgttaaaacctcttcatgtttcatgtgcttatttgccatctgtatattctctgttgttcacattattcttccgttttctctttgcatcgtttgttcgttttgttttgagaaagggtcttgctctgtcacccaggctcaaacgcagtggtgcaatcatagttcactgtaacctccagctcccgggctcaggcagtcctcccacttcagtctcctgagtagctggaactgtaggtgtgcaccgtcatgcctggctaagttttttattttctatagagataggatctcactatgttgcctaggctggcttcaaacgcaactcctaggctcaagtgatcctcctgtattgagattacaggtgtgaactaatgatctgttttgttcttttttaaactgtggagttttgagagttctttatgtattctagataccagtcctttgtcagatatgtggtttgcaaatattttttctagtctgtagcttgccttcatcctcttcaggtgagctttcaggaacaaaagttttgttgttgctgttttttcctggcagtataagtttacccaaagaacaaaagttcttaattttaatgaagtcctagttatttctctctcctttcgtggatttttttttttttttttttttttttgtgacagaatttcactctgttgcccaggctggagtgaagtggtgcaatcttggctcactgcaacctccacctcctgggttcaagtgattcttgtgcctcaccttcccaagtagctgggattaccaacatgagccaccacgcctggctaatttttctatttttagtagagacagggtttcacagtgttggccaggctggtctcaaactcctgacctcaggtgatccacctacctcggcctcacaaagtgctgggattacaggtgcgagccactgaaaccagcttccttttatggattattcttttggtgtcaagtccaagtactctttgcctagccttacatttcttctgtgtttttttcctaaaattttaatcattttccgttttacatttaagtctaggacatgtttcgaatgagtgttttaataagatgtgagacttaggtgaagttctttagtccagtatagctttgctcccacacaccacctttgtgccattcttggcaaatctaagtgtgttatatttttgtatgtcatagacccaatactacattccatacatattattttatacaattgctttttaaatcagctaagagaataaaggaggaaaactatgcatgtaggctataatttataatcacgattgcctttactgttgctcttcagtttcttatttgtattcaaattactatctggggattgcatacttttggcctgaaaaacttcctttagtgtttcttataaggtggatctgcaaacaacttctctcacttgttgtttgtctgggaaagtttattttactttcatttttcagaagatatctttgctggatatggatcttggttgatggttttctgtgagcagttatcccactgccccagcctctgttgtttctgctgagaagtcagttgtttgtcttattggggttcccttagaagtaacaagtcacgtcccatttgctgcttttcgtattttcgccttgtctttcactttcagcattttcactctgatgtgtcagtttgtggctcctttgcatttatcctaggaatgtggaatttgttgagcttcctggatgtataggttattgtttttcaatgaatttgagtagtttgcagctgttagttcttcgactaatttttttttgcctctttctctctctcctctccatttgttactcctgtttcacatatgttggtgtacttaatggtgtttcacatttctctgggagctctgttcatttctgttcattcttttttctctattttagccagggaataattgtatgtgagtatcttgccctgggagttcctgaccacatgggtgacctagatttgatcccaatctttttttttttttttttttgagacagagtctcatgctgtcgcccaggctggagtgcagtggcacaatctctgctcactgcaacctacacctctggggttcaagagattctcatgcctcagcctcctgagtagctgggattacaggcacatgccaccacgcttggctaatttttgtatttttagtggagacagggttttgccatgttggccaggctggtcttgaactcctgacctcaggcaatctgcctgcctcggcctcccaaagtgctgggattacaggtgtgagccaccgcgcccagctgactacaatcttaagtgaggcatagacctgtgattgtgaaatttcggaagagtcttttttctagacatccttaccccatttggagactgtaagaagctaccttctcatgtctctttgcctttcactgagggtggctctcttggaggctccttcattccttgtctctcctccaggcatttgcaacgtctgcctaccagttgaagactctgggtttttagccatggccattcctcttactctcatcctaggtcagctctgtgcagagtgtgcctcaggtccagtggactgccttcccaagcagaactggcagcttccttacacacattctgattttgaaatggttaatactcatagcagctgcatcttagaattgagaaaatctcataagtaatctacttcagcaacttccaggcaaacacttctgcagtgaccctggagtctggcattgtgctccatcctggctctccggcctccatttgccctggctagatgtactttgttctaacagtgttgtagtgactgctcttggacagccactccctgtgccatgggccagagatccatggcattccagccctgggaagactctcagcacaatctggccaagtcttcagttgccttgttcgttccccaggcccaggtggggaaggtcagctcatgtcaagtggtgcagcagtgatggcagtgtttgctcacagagctgtcttagaggctttgatgccattactctagtgggcatgtctcacatgccccctccagctgcctccttcccattctaaggtaacaggtagcattcacaggcccacacggggaggctaccttttttggcagtgtggcccacacggggaggctaccttttttggcattgtatacatctgtacacaatgtatgctcattgcaggtcaaacatgtgttgacatcaaggacaacgtggtggatgaagggttctacttcacccctaagggggacgacccatgcctgagctgcacctgccatggaggggagcctgagatgtgtgtggctgctctctgtgagaggccccagggctgccaacagtaccgcaaggaccccaaagagtgctgcaagttcatgtgtctggacccaggtgagactcttgataggacgtcccaagtcagcctccctatttggggctggaggctgggcgtccctttgcttcctcagtggtgaggactcaggagagtttatggagcatcgcgcagcagcaatggcagcgtttgtcacagagatgtctcagagactttgatgccactactctagtgggcgtgtctgacacgacccctccagctgcctccttcccattctggggtgacaggcagcattcacaaatgaacttgaactcaagtgtggctgtttgttcacaagtcaccactgacagcttcaaacttgtcttcaaacttacgcctccagggtttaagccgttctcctgcctcagcctcaccagtagctggaactacaggcgcatgccaccatgcctggctagtttttgtatttttagtagagacggggtttcgccatgttgtccagaccaggtcttcaactcctggcctcgagtgatccacccacctcagcttcccaaagtgctgggattacaggcatgagccaccgcgtccagcctagacttctaatttatgtccacattggagctcttcctgttctctagtatgatgatatggagggtagtgacagttgtcattgcttacagtcatccatttttaccttagaatcttcgagaaaaagatgaagtattattctcagtttcgagatcagactcctcaccaccaggcgggggctttaaggtagacactacagggaatctgatctcagggtgatcctctcccttccacttgcaaaaagagaggagcaggtgggccactgctctctgagatgttaacacccctcacactccacgggcatgctttgtcattctgcacaccggtgtagctgcagctctgtgtgaattcagatctcaagagaaatgtaaatcaaaagtatgagt

SEQ ID NO: 9403 - DNA, 6000 bp, Homo sapiens
ctcccccccgaccccagcaaggccagacccccctgtctgccaggacccccggagagggggaagcaggctgtgcaatggaggaggtaggatgtggcaactccatagaagtggttaggacagaattctggagttgcgcatcccagagatgaggagtcagagaggcccttcccctacctggatgctgcccctacgtctgatttgaattctcctttcattgctccatccagcagacactcagaccagagccaggctcggtaccaggctctggagagcttgtccatgtcctcaaagagcttgcagtctaaacctaggagtgataatggccagcaccgtggtctccaggagggtggaagagcaggagactcttctctttccagagcaggcaatggaggcccaggaaaggggactgttcttgtctggagttgggctgaagccgctttagcatgagggttttgcctttcctcaatcctccgaccccacagccttcctgttcctgcctcggtgattttgtcattcttgtctcgtttcctcttggtactttaaaagtaaaataacgactgttcatctgcccttagaagggctggcacagaaagagattcatcccaagctgtgcacctgctctatctgtacagttggcggatggggagccaaggaacaggacccccggagtcaggcagcattttactcaaacgctgagcactcgttccaagtctgagtaaggtagaagaatgagtggccagccctgccttcccacagctcaagtgcagcaagcaccgtccttaaaacagaagagctggccgggcgcggtggctcatacctgtaatcctagtactttgggaagccgaggcgggagaatcactggagctcaggagttcgtgaccagcctaggcaaacatagtgagatctcgtctctatttaaataaaatagaaaatctgtttaaaacaaacaaaaaatagaagagctgtcgtgaaacttgggtgctctgggtaaagcttgggaagaggcagggcctcccagcatgtctggaatccccaaattagcaacctgtttccttgtctgaaaaatgggtgtagaaatggccggctaagaggacaacggcactggtgccgggtgttgagcaagccctcgacagcctcaccgagagtgcaccaagggccacccgcgcgctgccgctcccagggctcccaccctcccctcggacgccggcctggtgaaccaggctgcaggcgcgcgtgggagcgctcagagctgtctcaggtgttctgagccgccagatcgggagtccagtgccctgctgagcccgagccccagcacaggctcccgtcgcgtcctcccgcagcccggggtccccgcccgcccagcgcctcccacgcgcggactcctaggctgagcgcgcagggcagcggggcccacgcgagggcggggcgagccggggctttgtgttcaaaccggccaatgggtggcggcggtgggcggtgacggccggcggggcctgaccaatgggctgcggcctgtcagcgttgactgacaggcgcacacatacagagtcggccacacgcgcgccgcccggccccactcgcgcagcgcgggcctccgccggccgcattgtccgcccgcccgccttgtcccgcgtcgccgctcttcgcgtgcccgcgcgccccgggcccggccgctgtgtcgccctgagcggagcgccgcccgcgggatccccacgcggaaagggggcgcgccccggcggcggcctggcctcggacgcccccggccgggctagaagccgccgcggcagcaggtgagtgcgggcgagctcaggagagggttggggggccgcggcccggcctgaccccgggtcaccgtcgggccactcgggcggggccgcgccgccaggcctgcttcctcctctccgggacgtgctgggccggatccagcctccacccgggtccgcggcccgcgccctgactcacctcctggcccccgccccgcctgccgcgccactggtcagccgggagggcggtgtctgcgggcgggacttcccgggcagcctcccgggaggaggagggcaaaggccgactgccccaacccggccccgggcagcgcctacgggttttgtgccagacaggccgtttccagggacaggcagttcccagcctctgcctgtcagaactcagggcctcagaggaaggcccgttttgttcagttctaaaacaaaacaaaacaaagcaatggggggcgcggtgtgacttagagagccaggaggcgcgcctttggtgacaatttctgcaggtttggcctgtgggaatgagggcagagggagttagcaccgggcgtttggcaggtcccacaagggcgtgtggcctggctgtgcccagggagtggaaatgtcacgaggaagatgccccagatctggtttaagtctgaagatggatggagatgtttgtgatggggaagggcggaattgagaaaggaagtcgcccagctgagaagtggggaaggatgctttccgatgagcgtttcctaactgattgttagggaggaggtggggcgggggtggtgtctattatgattcgcagtagtagatttcagctcccagaggctcacttcttgttttggagaatggggcctcgacctttttcatcttgtgaaacccagactcaatggtaaactgttttgtgatgccaggatgccgcaggaaagactgagaggcatctctgggagttctgggagggcggaggcgggtgctgacagttttcagcactccccgctcaacctccatcagaatatttagttcttcccagcggcagcttgggtatggtataaacatgttgccttgtttctgccctgggcaaaggtgtcacctccttcagcaggacagaggctaagaggagtccctgtgtgggcagctggagccttcaggtagggaccgtacgggcggggcagggaggggggaggggagattaccttataaggacaggaatagagacaaggacccaggccaacttcctgcttttcctactaccaatcggtcccttttccaacaccagctaaaagtagaggggatgccagatgggcgtctgacctgggaagatgccaacaaggccaggacatgaggctgcttgtttttcagaggaggactttctagctggactaaccagaccttcgggtttctgcagcctgggttgggaagtggacttctatactcaccacacaacccagagaactggtcatttaagtatcaaccaggaatattagaagtgatcaaaagtcacaagcaagtgctaggaattcccaagtgactttgttgtacgggccagcagaggcactaacgttgagactccccatgttggcagtcggggactttgaattcgggtgtctagacctgagtggttcattaatcttcctcatgtcacagaatgctacctcttgccagatctttgcactttggcttcctttgtcctcattatcagttccagagccttgatttctgccccacatggtgaccggaactgactgtaattcatgctgccctcctcctccctattttgttagtttgctaacaaatatttgttgtgtaacaagtttgtatacagccttgttttgcgcatgtgtgaggctaaaaaagattctagctgaggacacacaactagaatcttcaatacattcctgaaacaactggaaaactttatgcctgagtagaaagacccaggccctacagcctgtcagagctgagcccaaaccctggctttggcacttacaggctggggactgtggacaagttacccattgcctcagtgtccaggttcttcccttgtagatgggagtaatgatacctaccttgcttctaataatataaatgaggtatacaaggagcccggtcccagcagacacttaccattttatcatcatcttaccaagatgtggcagcacagtgtgcaccgtggggacagacagtgcaagcgccatcaggacgtaggtgggagcctggccaacttggtgaaaccctgtctctattattaaaagaaaagaaaagaaaaatccttttggctgagcgtggtggctcatgcctgtaatcccagcactttgggaagccgaggtggacagatcacctgaggtcaggagttcgagaccagcctggccaacatggcgaaaccccgtctctattaaaaatacaaaaattagccagtcccggtggcgcacacctgtaatcccagctacttgggaggctgaggcaggagaatcgcatgaacctgggaggtagaggttgcagtgagccaagattgcaccactgcacttcagcctgggaggcagcgcgagactccatctcaaaaaaaaaaaaaaaaaaaaaaagaacataggtggggtctacatgggaaaggttttccatcaaggttcgttggggccctcgatgaacgagcacatgtcagcaaagggacacagctagagcgagactgggagaagtctctagggagaaggcaggtggggtggctggaccaccgggcgtgcaggcagtgaccagaagcaccagagtctctgctacttgtcagaggtcgaggaagacccaattctggcttgtgcggagctcagcaccatgaaggataaagacaaggaaactgagaattgggaagcctgtggaaagcgccctggaagaggctccagagtcacgaagtgagccccaggccgggcgtgactccagccgctgcacagtgcaggggtgcttcacagatccctgccttgccccccatcagggctgtttagactgaacgccgggggccgggggccgggggggtggtctgttctcggctgtgaggcgatgcctctgtcccacctcctctagagaggagctggggacagccccaggcctcacatccagtcctcctcctctctctccttagattctcttcaggggaagagtccacatcccacctcatcatgtcccgaagaagccagcgcctcacgcgctactcccagggtgacgatgacggcagcagcagcagcggagggagctcggtggctgggagtcagagcaccctgtttaaagacagtcctctcaggtagggacccaagggagtgccacggcccctgacagccccacaagcttttggtcactgcccgcacgccctgtggtccagccatccccctgccttcttgttgcaaccttgggtggaaatcgaaggacgtgggcccccgtccggtcgagggggtccttccttgctccatgtgtatgagcacacagcacccattcttctcccaccgactgtgagccggggctgctgccctcatgcttagaaaacaggaagtggtaggtcgggcgcggtggctcacgcctgtaatgccagctctttgggaggccaagggaggtggatcacctgaccctgaccaacatagtgaaactccgtctctactaaaaatacaaaaattagcccggcatggtggcaggcagctgtaatcccagctactcaggaggctgaggcaggagaatcgcttgaacctggcaggcagaggttgcagtgagcgagatcatggcattgcactccagcctgggttgacaagagtgaaactccatctcaatctcaaaaagaaaaaaaggaaagaaagaaaacaggaagtggagagaggcagcttcaaccataagccaggccggaaaccccaaaactgcaggctgggctcacaggaaccccccctgctctggacgggcgtgtcagccttaccatccttcctggccccacgcctgcatgtctcaccacctgtccggcctcagcagctggccagcgacatggctgagaacaggcgcagtcctcaggccactgggaaatgggctgtggcagcagctgcctggtcgtcctgcccggctcacaggcatggggcccagaagacaggccctgaggctttggctagctctgaggccaggtcaggtctgtctggtttcagtgggttgtaaagtttgaatgtggctccatccctagctgccgctgcccgtcttgcccatctgctggtgagattcagag

SEQ ID NO: 9404 - DNA, 6000 bp, Homo sapiens
cagaagttcgagaccagcctggccaacatgatgaaaactcgtctctactaatgatacaaaaattaactgggtgtggtggtgggcgcctgtaatcccacccacttgggatgctgaggcaggagaatcgattgaacccgggaggtggaggttgctgtgagttgagatctcaccactgcactccagcctgggtgacagagccagactccatctcaaaaaaacaaaacaaaacagaaaataaaaattagccaagtgtggtggcgtgcgcctgtaatcccagctacttgggaggttgaggcaggagaatcgctggagcccagaaggcggaggttggagtgagacaagatcgcgccactgcattccagcctgggccagatctgtcttaaataaaagaaaaaaaaaagaaaatccatgtataacttctggttcccccaaaactttcctactaatatactattgactagaagccttaccaataacatatttgtatattgtatgtattatatactatatttttacagtaaagtaagctagagaaaactgttattttaaaaatcataaggggccgggcgtggtggctcacgcctgtaaccccagcactttgggaggccgaggcaggaggatcaccaggtcaggacttcaagaccagcctggccaacatggtgaaaccctgtctctactaaaaatacaaaaatgagccaggagtggtgacgtgcgcctgtgatcccagctactcgggaggctgagacagaagaattgcttcaacctgggagttggaggttgcagtgagctgagaccgtgccactgcactccagcctgggtgacagcaagactccgtctcaaaaaataaataaagagaaaaaaaaatcataaggaagagaaaacatatttactattcattaagaggaagtggatcatcataaaggtcttcatccttgttctcacgttgagaaggctgaggaggaggcagggggtagtcttgctgtctcgggtgacagaagaggaagaagatccttgtataagtgaaccactcagggtcctggccgggcacagtggctcacgcctgtaatcccagcactttgggaggccgaggtgggtggatcatgaggtcaggagttcaagaccagcctggccaacatggcgaaacattgtctctactaaaagtacaaaaattagccagacgtggtggtgctcacctgtaatcccagctactcgggaggctgaggcaggaaaatcacttgaacccgggaggcggaggtcacagttagccaagatcacaccactgtactccagcctgggtgatagagtgagactccatctcaaataaataaataaataaataaataaataaataaataaataaataagtgaaccacgcagggtccttccggggggtgaccttcagctggccattcgggatgatggactttccatcccagaaccatggctccatttgtccgtaaccttgtggagaagaccccagcactggtgaatgctgctgtgacttacttgaagcctcgattggccgcattttggtactacaccacggttgagctggttcctcccacccctgctgagatccctagagctattcagagcctgaaaaaaatagtcagtagtgctcagactggtagcttcaaacagctcacagttaaggaagctttgctgaacggtttggtggccactgaggtgtcgacgtggttttatgtcagagagatcacaggcaagcgtggcatcattggctagaatgtttgaagaccagtcttaacatctgattatatttgatttattatttgagtgttgttggaccaggtgtgatcagactgctatctgaataaaataagatttgtcagaaattccaaaaaaaaaaaaaagtgaatcaagcagttccaacccatgttcaagggtcaactgtgtctatattttgaaccatttaagagtaagttgcccctttgcccctaaatatttcagtgtgtatctcctaagaacaaggacattcctttgcgtaaccacagaataattacaggaaagtaacattggtacaacactattatctaatccacaagccttattcaattttttttttttgagatggagtcttggctcttgtcacccaggctggagtccagtggcatgatctcggctcactgcaacctctgcctcctgggttcaagtgattctcatgcctcagcatcctgagtagctgggattgcagacgcccgctaccatacctggctaatttttgtatttttggtagagacgcggtttttccatgttgtccaggctggtctccaactcctgacctcaggtgattcacctgcctcggcctcccaaagtgctgggattacaggcgtgagccaccgtgcccggtccccccccactttttttttttttgagacagagtctcgctctgtcacccaggctggagtgcagtggcacgatctcagctcactgctacctccgcctcccaggttcagatgattctcctgctccagcttcctgagtagctggggtagcctgccaccacacccagctaatttttgtatttttggtagagacggggtttcaccatgttggccaggctggtctcgaacttctgacctcaagtaatctgcctgccttgggctcccaaagtgctcagattacaagtgtgagctacagcgcctggcctttttttttttttgagatggagtttcactcttgttgcccaagctggagtgcaatggcacgatctcggctcactgcaacctccatctcctagcttcaagcatttctcctgcctcagtttcctgagtagctgggattccaggcatgcgccaccacatccagctaattttttgtatttttagtagaaactgggtttcacgatgttagccaggctggtcttgaactcctgacctcagatgatccccccgcctcagcctcccaaagtgctgggattacaggcgtgagccaccgcgcccggccttttttttttttttttttttttatggagtcttgctctgtctcccaggctggagtgtggtggtgtgatcttggctcactgcaacctcctccacaggcaaccttctgcctcagcctcctgagtagctgggattacaggcatgcgccactgtgcccgcccagggattcaggttttctaaccaacttttagggtctttttttttttttttttcaacagagacagagttttgctatgttgcccaggctggtcgcgaactactgggctcaagcaatcttctgcctctgccatctgagtagctgggaccacgggcgtgtgacactgcaaccagctaactttttttttttttttttttttttgagatggagtttcactcttgttgcccaggctggagtgcaatggcatgatcttggctcactgcaacctccgcctcccaggttcaagcgattctcctgcctcaccctctcaagtagctgggattacaggcacctgccaccacgcccggctaatttttgtatttttagtagagatggggttttaccctgttggccaggctggtctcgaactcctgacctcaggtgatccacccaccttggcctcccaaattgctgggattataggcgtgagccactgcaccgggcctacaaccagctaactttttatattttttgtagagatggagtttcaccctgttgcccaggctggtcttgaactcgtggactcaaactgttcacctgcctccgcctctcagagtgttgggattacaggctggagccactatgcccagcccccttttagggccttcaggagactgagatgtcgggggcaggggctggggaggaacagcccctcagggccgtgtggcagggtccacttggtcatgaggtatcccagcgtggtataagggatgggtggactctgggtcagctcctcacctgccagctgtgtgactgggtgagtcgctttgcctttctgggctgtttcctcatctgcgaaatggtggtgatgacagtgcctaccacacggggttgctgcgagagccgtgcccgtgtggtacccgacgtggccctgggatcccagaggctgttggctttggtgatctgagctgtagggtctcagctctgggggccttgcagatcacctggtccactcaggttgagaggggaagggactttctcggggtcacacagccagtgaccttcccagtgcctggctcagtgcttcgcttccccttacacctgatggcagaaccccagggctcagggacactcatggatgtcatttgggggaagtggctcagtttactcagcttcactggcttgttctagtgtgctctgtgggagagcaaagaggagagcatcaatcccagtggccccaagggactggatttaaaggtgccatagagccatttggtcagtgtaggcctttcagatagattctgagttggggttattatttgtctgtttgtctaaatcaagctagaacttgacatcacttaataagaccagggaagttgactgaaggaagcaagagaaggaaggagcacaaatacattatgctcaagattaattttactctgagcttcctagtagccaaagtgaaaaaggatatgtgcttagacccacagctctttttggtcctggctcttcagaggaaatggagctttttctcatggtactgagcatagaagcccaggtaatgctcagtgacaggtgtcatgaggctggtctttatagcttctcctagtgggcaccaaaatggatgatgaagctttctggatgagggtggtggggagagggtgctcctggcagagggggcagcgtgagcagaggcctggtagtgtggacaagccggtgtgtttggggaaaggcaggctcctgcactgaccccgcgggtcctgtcgtttcagttgggccatatggtgctcttcccagtctggttcctgtacagtctgctcatgaagctgttccagcgctccacgccagccatcaccctcgagagcccggacatcaagtacccgctgcggctcatcgaccgggaggtgagtgccggccgccgccgctgcctcgtcagcatcacagcattgcccagcacctactctgtgctcagggcatggtcctgctctgaagtagatactgttgtccacccattttacagatggagaaagcaaggtgatgtctcttgctaaggccaccaggaagtagcagaggaatttaaaccctggtctctctgtccacagagccccttctctgaaccacactcactgcctcatgcaaggtcagaatggaaggaacccctcagaacttttaggttcaatcccccatttatggggtaggaatgcagggggtgagagatttgaagataaggtctcctccctcctccccctcccccagagtcattccccacagcctggtactactggacctggacacctttcacatctgtgcagattccctgggtgctctgagctgtgtgggcttcctctgccctgtttgattcttactttctttcattagtgagttcatacttttttttttttgagacagagtcttgccctgtgtcccaggctggagtgcagtggtgcgatctccgctcactgcaacctctgcctccccaggctcaagtgattctcctacctcagccccctgagtagctgcgattacaggcgtgagccaccgcgcccagcctaatttttgtattttttgtagaggtggggtttcgtcctgttgcccaggctggtctcaaactcctgggctctagtgatccccgcacctccacctcccaaagtgttgggattacaggcatgagccgtggtgcccggcctgactcctttttttcaaagctctgattatgatttaaaaccatcctctccctcttttgccttgcccccagtaaaggctgcttccatcggtcacttgccctcttcagagcccctcccttgctctatttctggccacccccagcaggcacaggaggggtgtggcagggaaaactgagtcacagcagagaacatcatctgccagggcccaagtctccaccct

SEQ ID NO: 9405 - DNA, 6000 bp, Homo sapiens
acatacatatacacacacatacatacatacatatacacacacatgtatttgagcacagaaactaagaggtatgaatctttataatacaacttcttacccgttgtttctcttcctatttaaaaacagaacaaagcgacacagtaaagatgtaagtggcccttgcaggccactgaaaatagactctttaggctcccagaaatgggttctgttcggacccttctaccacatctttctgtagcctatgcagaggaagacccgagtctagtcatgttgggggaagcggaacttttggtcacagtctccaaatttagtcacatttctttttttacttaagttctatttaagatctagtctaatgctatttttatgtggctttttaagtagtgcttgttaaaaagagaatacaaaattctaataatcactgctaattatttatcagaattctgtaaaaagcgttcgtcattgtagataagctgtggtttctaaaagcattagaagtcattttgacaagtgccgcggaaggtgggcaccggggaaggtaggcgccggggaaggtgggcgccgggaaaggtgggtgccaggtttcccttcatctctgagctgtcagttcagctggaaagggaactccaggggcctgcacaagcagtcgcatcctccgagaagggccgtgtgtgcacccaggcctgacagcgctcgctgtcaggcctggggtgttctgctgccccacccagacgatgacgtttagagctgaatggtccctctcactgtttcttggtagtttgacttcacttttgttgaagtttatcgcgtcaagaaattccagtttacgtcgaagcacatggaggatgaggacagcgacctcaaggagggggggaagaagcgctttgggcacatttgcagcagccacccctcctgctgctgcaccgtctccaacagctcctggaactgcgacggggaggtcctgcacagccctgccatcgaggtcaggtgcgtgcaggggtcctccagccaccagcgccatccccttgagccctgaggtgtctgtcacaagctgccccacccagggtggggggttccctggggctttataaacacaaaacgtaagaatgttttataaatgcacttttctctccctatgtcaaatatcgaatgagatgccgttacccacattctggaaagatgccagggtgccgagtcctcagcattttgttttgcagataattttcatgggtgtttgaagctcctccatttcattcttttcctcttccacaccctgtgctccaggctggcattgggctctttgccctggcattctctctctcttctcctaaataattcaaaaggtgggaggctgaggcgggcagatcacttgagatcaggagttcaagaccagcctcgccaacatggtgaaaccccgtctctactaaaaatacaaaaaaaattagtcgggtgtgatggtgcatgcctgtaatcccagctaccccggaggctgaggcaggagagtcgcttgaacccaggaggcagaagttgcagtgagccgagaccatgccactgcactccagccttggtgacagagcgagactccatctcaaaaaaatttcaaaaggcaaacaaaggaaaccgcctttacaggcagtcctttgtccactgaatccaccagggaaccgctggcctcaagggccacagtcaatcaccaagtgcaggtgctccgtgcagggaggggcaggaggcagcagggctgggaagggcaccccgaggatgggaaggagaggaggagccccagagggacgccccgtgctggaggccacgcagcctaggggacgcggggaggcaggtgtggccacacacggatgttcggtctccctggggcaggtgccacacccctcctctggctggctgggcggagggtgggaagtggtgtcctccccacacccactggggcccattgtatttggaagtctgtgatgtatcacataaccagatggaatctgagtgcaaagaaaattgtttctccatggaaagacccagtaacaagcaagttgattttttcaaaaggccactgaattaggtgtgggcgtgcaaattacatgagactggggaacggtagagctcaggtggattctgaactcttggcagatgttggtaagagctcggtctacttcaaggaagcccagcttgacgctcgttaacagagtgtggctggcgtgagagcgatagcaggctggtcagcaggcccacgcctgtctgcaacgaaagctgggtgtcagatggcccttgggtgccttaagtcacagcatgtaagaggatgcacgcatctctgtggacagcgccccactttcagtgactcctcagccagccagctgcggctctaagaaagcttctcccattcgcatccgaacaagcctaagggaggaggtctctgcccctccccaggcccagggccacgcgccccctttctttctgtcagggcggtggtgatggcaagaggctgtcgaaaggtcccaggaacaccggccaccccaggcagccgtgcacagggactttcctctgtcaactcatttgacaagtttgggaagtgggattatttttaatattggtgtatgtatttattaaagaaatagaataatttgaaaatcaggacaggcattcttgaaatacgtcctgtctatcttgataaatatggctatgccttgagcagcacgtcgcttttaaaaatataatttgtgtgtgtgtgagctcagctccatggaaacagcctgtcacttatttatttctatttttttattttttgagacagagttttgctcttgttgcccaggctggagtgcaatggcgaggtctcggctcactgcaacctctgcctcccaggttcaagcaattctcctgcctcagcctcccaagtagcaggcgcccgccaccacacctggctaatttttatatttttagtagagacggggtttcaccatgttggccaggctggtctcaaactcctgacctcaggtgatccgcccgcctggacctcccaaagtgctgggattataggcgtgagtcactgtgccctgccccagcctgtcacttaatgaaggggtttaggttactgaaatacgtctgaggaggctgtgatatcattaataaatgagataaatagagctgtcctgtgtgggaagatggcactcacccacggactcactgtggccaccgagcccctgggcaggggacctccagggacccccaacttgttcctcaagcccgaaggctcttgctggcgttgggccacctgtccttctcatctgagcattcctcacacatctcttacacgcattgagtcgccccgcacagactcctcgcaggccttgcgcgctcagtactgctgagaaaatggaggtgggtgggtgggtggagtgggcagacactggagcggacgctctgctttccatgggggtgctggagttcgagtcaggtctaccgatgcccagatttcccacctggccattggcaacccctttacaaactcggcatcccgggagtctaagtgaattattccacgcccagggcccgtcattgtgggctggactcctacagcccacggtgacgtctgaccgttccatgggggatggacccccacttcagcccctgtccaagagcggtgctcagggccagctttgagtgagggacacgtggggtttactgcagcccctgtccaggagtggggctcaggccagctttgagtgagggacacgtggggtttacacgtggccgcttgtctctgcagagtccactgccagctggttcgactctttgcacgaggaattgaagagaatccgaagccagactcacacagctgagaagccggcgtcctgctcacaaactgggaaagtgtgaaaactatttaagataattattacagaccaattatgttgatatatacatttaaatgtagaaatttatttttgatagttaaatcttgattttagaagaaaacccttttgtcaacaattttgtgtacatatttggcattttcagttctgtacgcatctgcgggttgcagcccacgccgcttactctcagcggatgcagctgctcacttgggggcactggcctcttaggttttaacgatgtcaacagtgtagtttagaaaatggcccgttagtggctctattgcaataatgttagggacattatatgatttccacgcaggtcacaccatctgggcctgaggtagcagtgggtcactttgatccactttgcaggacttattctgtaacggtttgtggccaagttttgggaagtggttgattctctttgccttcatttcaccttcctcttcgtttacggttaggacatcgctgcttgatccttacaatactgtgcaactgcaatgcaacgtggccctgcttcaggtgatccgcgggaggggcctccacgccagcgccgggaaggctgctggggcctccacacctgcctcatcacggcggcgaggctacgacaatccggctgggagcatgaccttggcgtctgttctgggagcacggatgataagctctggaagctggcagtgtgtaaagcactggcaagtttgttactgttaaaatgtcaaataccaatgctttatatcgacgcgaagtgcttaacacagccgggcttgggggcagtcaggaggaagctggccatccgtggaggaggggccggtcctggactcccgcaggactcctctgaggcagggcctgaagtctgtacacgtggtccagatttgtccttgtcttttcttcacactgagttctctatatttattgaacatcttgtccttttaagccagagtagtgtaaactgcgtctcggatgtctgtcttttgcctcgaagccacgatggatcgctggtttcctctgcagcgcgagggctccggcgaccagaggattcttcccggaaggcattcctgccgcgctccccggggcacccctcaattgtgtactacgtccttgtttagtgtgtatccgtgcccacgtagatgatgtctgtaacgtagttttgtttgaaatatgagaatatgcggcttaaactttgatctgtaaggagcggggccgtggccgtttggagcacgctgtagacaccgttcctcatgctgccgggtgggttttgcagaagctcccttagtgatttcatgtttaacaggcagcatccattttcagaatttcctggcattgatttatattttgaagcatacaggaaacttctcgtttcctcgtttagccccacccagatcaggtgaaagggcagctttaatggtggtttttatggaccacattatcagagagcactgtgcaagccaaatggttcaataatgaatgaaaattctgggtgtaaagagtaaatatgccctggctctttctaccaatgtttgctcctggttggaaagaaaccaaagatttaagacgggctgctcttccagactggctgtgcctgcctgtgcccagcaacctgtgcagccggcagtgtgcctggtgtcacgccaggaggctgtggctgctgtgggccctctggaattgtgctcctcacaaagtttccccaaaaggttcttctaagcctttattgtccctggtaaatgtttcccggctgggcgcggtggctcacgcctgtaatcccagcactttgggaggccgaggcgggtggatcacctaaggtcaggagtttgagatcagcctgcccaacatggtgaaacctcgtctctactaaaaatacacaacttagccagtcttgttggcgcacgcctgtaatctcagctactagggatgctgaggcaggagaatcgcttgaacccaagaaagaggtggaggttgcggtgagccaagattgcgccactgcactccagcctgggcaaacagagggagactccatcgccccccccaacaaaaaaaaaagtttcccatacactggcctgccccaaaacccactaacaattttagcaaaacagtccaggccaaagaggaagcatttcatgttcaa

SEQ ID NO: 9406 - DNA, 6000 bp, Homo sapiens; identical to SEQ ID NO: 1015

SEQ ID NO: 9407 - DNA, 6000 bp, Homo sapiens; identical to SEQ ID NO: 2196

SEQ ID NO: 9408 - DNA, 6000 bp, Homo sapiens
atctgggactacacgtgcggaccaccacgcctggctaatttttaagttttttgtagagatggggtcttgccatgtttcccagactggtatgggactcctgggctcaagcaatcctcccatcccaacctcccaaagtgctggaattacagtcatgagccaccaggtctgaccacatgtttaactttttgaagaactaccaaactgttttccacggcattcacaccagcaatgcaagagggttcccatttcatcacatccttgctaacacttgttattttccttaaaaaaaaaaaaaaaaaaaagccagctgggcacggtggctcatgcatgtaatcccagcactttggaaggccaagggggtggagcacttgagctcaggagactagcctgggcaaaatatcgagaccccacctccactccatctctaccaaaaaaaaaaaaaaaaaaaagctgggtgtgcggtggtgcacatctgtcgtcccagctacttgggggggctgaggcaggaggatcccttgagcccaggaggtcgagactgcagtgagctgcgaccgcgccactgcactccaggctgagcgacagagtgagaccctgtttcaaaaaaacaaaaaaaaagcacatttcaaacatacacaaaagcagagagaattcccctcggtcctccggcctgcaccccaccgccccccaccacaggggcattcaaaactgtctttttgcctctctgtaaggtaaggggggactcttgacgctccccagaccacacagccaaagtagggcgatcggatcatagggggtcccgagtcggacactgagctggcgtgcccactctcgagtcctgggaccccaaactaaaggagctgttccttttccccatggagggctgacggggcaaaatcccagggctgggaacatccgagcagctttgagtagcacaggtgggtttctacgtggctttctttaaagggaggcctgattctcggcttttcaggacccgccctccattttctcacttgcctgctctttcgtcctgcgaaactgggcagtggccggtgacagcgcagggtcagccctcggatggccaggtgggcgtgatcccaccctcctccgtggctgggtgggcgtggtcccaaagtcaattggatgtggtcccgcgtccctcccggcccagtgggcggggcctccccttctggggcctcccatcccacaccagcgagcagagaggagggtgggcggggaggccctacggggctggggcggggcggagcggaggtggttagctgtcgggaggtggggtgggcaggggccagggctctgttggtggcccggggcagccagtccctctgctcagggcttcagttcacactcacaagggaatcccagcgctcttctcctctggcggttgctggagggccttgtgaggtggccgtgggcactgtagcccccaggcactgcattgtggcctgggcgtgttggcctttgagcctttggccttgagcacttccccatcccccatggctcttggccgttggggcccagttggccgcagagcctttggccttgagcacttccccagcccccatggctcttggccattggaccccagttggccacagagccgcgggcaggtgggacaggcgggcactgggtgcctccttgcaccagccaggcccagcctgcagagtggagtgggccggtccctcctgccaggcaaaggaagggggcttcgggcccctccctgctgtggcctcctcccctctgctgcctcccactaggccctgggagacactgcctgcagatttatgaacagacagacctagagattagagattcaaaagccaaattcttacacaattcaagtattaacgcagatttggatttataatttgggactccaaggtctaccaagtaatttgctgtttcagaatagcccttttaatttggggtatatatttctaacactgttttttaaatatggagagtaaacaaaatggcccattatctgaccacacaaatactagtagtcattatagataaaccatagcagataaataatagtaaacaaagcaacaggctgtgtcataggaaatccccaccatgaagaaaggagcaaggtggaaagttctggctgcttcaggtctgcatggtccctctccaccatggttccccctgtcatcttcctgccagaataaggacactgtccttagggaagcaccatctcttgttttttccccacgagccctgtgggtcatggcacgtcctgccccgctgggaaacacagtgggccacgggtttccctgcaggcctgggacccttcccaagggtagcagcagaaggcagcacgattcccactcctgcagctgtggacaggggcacccccactgtcactgagccctgcaccgggttccatcacctgctcggggctctggcctttggccttttcctgtgagctgcatgttggccactgtgacctatctgtctcatcatctttttcttactggtttgtgtatgttcttggtaaactagcccttggtcttacacatcatttccaaggtactaaggactcttcaggggaaatacaacttgagcagagtggttccctcctcttgtggttcacaaggtgcaggtgcacacacacatagcccacagggcagtgtggacagggaccaggagactgcccctggggtccctggctgggggacactagtagggatgtcccttggcctctctgaggccttctgctgtctcttctgaggccggaaaggcgaagcactgccctcgccctgctagggaaggctcaggccaggctggccctatccggggaaggggctcaggtatctggaccttggtcatcgccaggttagggtttatgttgatgattatccaaaggcaaaattgatttccacagaaataacatctgctttgctgccgagctcagaggagaccccagacccctcccgcagccagagggctggagcctgctcagaggtgctttgaaggtgagttggccaacggaagccggggcagtgccagggtgggtacagattccggcccggtgcatgggcacaggtctgctgagcacatgtccactctgcctgtgtaaataggccacatggcctgaaatcccctagaagcctggtgtccgcatgacctccccctagggcggagcctctgcttccctgttctcttctgctctgtcctctggtgccctgaggctggcctccaggggtgtcccctctgtggccctaggcctgcctccttgcctgggtgtgcctttctaaaatggagcgtccagcagagagtgggatctcctatgccactgggagcccagggccccatcccagaaagacctctgagtgagcacaggggccctagaagaagtttccttgtgtccttcccgttttagggtctgtgacctgaacccctgggcttctgcctcaggcctcctgtgctctgctctctgcctgctgggtcccctcaccaggcttctgtctggttcccaggctacctgcctggagggtcacaccaggaggatttcaaacaggtttcaagtggggtcacttgccatcactgtgccccacgaggtacactgttgtgggcggcagggctggcctttctcatctgggacatgccacgttgctgttcccaaggggagtggtgagtgggtctgtcctggtgtgcctggcctggggactgccagtgtccttacttggacactcaatgaaaaggccacatgaatccctggggcgtccagagcatgggtgaccagcacgggctcaccacatgaggccaaggggctgcaccatacagcctctcctttggccacccgtgactacccccaactccgggccatggggcttccctacccctgggtgtcctctaagccagctgggagacaacagcctgagtccgtgtctgcttctgtattttgtgtggttttagaggatccctgggctgcctggggaagcacccagggccagggagtgtgaccctgcaggctccacacaggactgccagaggcacacacctgctctgtctacccgagggcaccagagggcacgagaaggctggctccctggcgctgacacgtcaggcaactgaggcacaaggctggcatttctgaaccttgcccctctgcaaacacaagggggcgatggtggcactccaagcaaaggggcgtgtgggtgctgcaggaggagcacagagcactggcgcccctcccctcccgccctgcagatgccggaggccccgcctctgctgttggcagctgtgttgctgggcctggtgctgctggtggtgctgctgctgcttctgaggcactggggctggggcctgtgccttatcggctggaacgagttcatcctgcagcccatccacaacctgctcatgggtgacaccaaggagcagcgcatcctgaaccacgtgctgcagcatgcggagcccgggaacgcacagagcgtgctggaggccattgacacctactgcgagcagaaggagtgggccatgaacgtgggcgacaagaaaggtggggtccgggccagcaggtgctcagctctgggacagggacccaggaccaggcatcaaagcccttacaggagaagctgttatcaccccatttccagggggctgggaaccctgggatatgcccagatagggctggggggctcctctggagtcccagggtgccagggtccctgatgacccctgcaggccctgctgcctgctgccccaggacaacaggcccccacactcacagggtctgacggtggtgcagttccccttgaactctgttctggccaccatgggacctgcctggggaccagtcagacaggttctcctgggcccgcctcccgcttgaacttcagcctggggcacaggatgtgttaccgggctcacggagtgactcagggaactagtgccgccccagggccccaaggtgggcggttcggtgattcagagagggcagctctgtgttaggacacactggggccagccaggaagggtggaaaagatagggaccagcgtgagcatagaggctaagggaccatgggagctccaagcgcgctcacagtggggaccaggtcctgggggctggggacaccagggaggtgaaatacccctccagcgggtagggagggtgggcagaggagggccagcggccaggcatttgggaggggctcctgctctttgggagaggtggggggccgtgcctggggatccaagttcccctctctccacctgtgctcacctctcctccgtccccaaccctgcacaggcaagatcgtggacgccgtgattcaggagcaccagccctccgtgctgctggagctgggggcctactgtggctactcagctgtgcgcatggcccgcctgctgtcaccaggggcgaggctcatcaccatcgagatcaaccccgactgtgccgccatcacccagcggatggtggatttcgctggcgtgaaggacaaggtgtgcatgcctgacccgttgtcagacctggaaaaagggccggctgtgggcagggagggcatgcgcactttgtcctccccaccaggtgttcacaccacgttcactgaaaacccactatcaccaggcccctcagtgcttcccagcctggggctgaggaaagacccccccagcagctcagtgagggtctcacagctctgggtaaactgccaaggtggcaccaggaggggcagggacagagtggggccttgtcatcccagaaccctaaagaaaactgatgaatgcttgtatgggtgtgtaaagatggcctcctgtctgtgtgggcgtgggcactgacaggcgctgttgtataggtgtgtagggatggcctcctgtctgtgaggacgtgggcactgacaggcgctgttccaggtcacccttgtggttggagcgtcccaggacatcatcccccagctgaagaagaagtatgatgtggacacactggacatggtcttcctcgaccactggaaggaccggtacctgccggacacgcttctc

SEQ ID NO: 9409 - DNA, 6000 bp, Homo sapiens
gtcccagctacttgggaggctgaggcaggagaatggcgtgaacctgggaggtggagcttgcagtgagccgatatcgcgccactgcactccagcctgggcgatagagcgagactccgtctcaaaaaacaaaaaaaaagtagcaaaacacaacaaaaaaattaaaatttgctgggtgtagttgtgcctttagtctcagctactggggagggtctgctggaggatcacttgagcccaggagttcaaggctgtgattaagccactgcactccagcctgggtgacagagcaagatcctatctctaaaaaaaaaaaagaaaagaaaacactctgtggccacagatgagagaaggcagacaggaagccagtaagccaagcaggcaaagggcaggtggccccagcccggctgttgggtggtgagcagtgtcagggagacaggagtgccggagctgatgaggttcccaaggaggtgaggttgcctgtggccccctcccagggcacagtcccacccctccagtagtgcactctgtcctccctggtaggtacaggcttttccccaccaccatggtgcagccatgcctgcccccaacaccactgctgcagctccatcctccacgcagtggtgcagccccatcccagcacccatttgagctgctgtcccattgcagggggcattgtgacagctgaggacctgaacaactaccgtgctgagctgatcgagcacccgctgaacatcagcctgggagacgtggtgctgtacatgcccagtgcgccgctcagcgggcccgtgctggccctcatcctcaacatcctcaaaggtgagtggtcgcaccacagccgtgtggtaggacccatgacactgcctctctctccccacgccccacccctcctgcatctctgctcgccccccatgccacgtctttccatcactgagctcccgaggtgtgtccctgcgtcacagttcaccatgtcctgaaggaggcagtgcagagcgacagggctgaagcgggcaatgctcaagggttggaggaggaacaggagtcatcaggagggagagaggtgcaggagctcagggctgcagggccggtccagagggtaccccggtccagtgggtgaccctgccacttggtcattgaatggccagagctgatgcgtgacgtgaggtccaggctcgggagccctcaccttacttcactctcaccacagccttctgaagcagctgctgctattggttattaaacgctccttgaggtgggcaaagtggctcaggcaggtgttaaccctctgagcccctcagagcctctggggctcagcaacatgcacctggctctgatcaaccagggtacaacttctcccgggagagcgtggagagccccgagcagaagggcctgacgtaccaccgcatcgtagaggctttccggtttgcctacgccaagaggaccctgcttggggaccccaagtttgtggatgtgactgaggtaaggggcaggggctggcccactgtgggtgtggggcctgccatagaggcatcaggtgggctccccagggtggctacagcctcacatatgctttatgaatccattcctgccacagacttcgattgcgggcctactgtgtgctcggatggactcgtgggtgacccccagtcttggcttctgccgcacagaactgacagtgtggggaattagtggccaccctcctacctcaggtcctttgcacatgctgtggttctcgagtgctcagtgctgagatgaggaatgcatgggggcattgcagccctcgggcatggtgagatggatgggtgaaagggagagggccaggtgaacagagaccttggccacccactccctgtcactccaaactaacgcttcccagatgccaccctcagccctgcaccacctgacccactcactcagtagttgccccagctccacactgggtccctataagaccctgtcatatcccttcccgctgaggatcctcacatccctccttacctacttgggtccttggcattcctgggcggatctgcagacccccccacactgaccagtgacctcccaggaggggcgtcagctgcccaggtggtgtcttctctttccccgtgagcattctgcacctctgactcccgctgcagccagtgacctggtgtcttgtctctctgaggggacagagccactgcagtgtgtccctctgccctcctttttggctaaggccagctccttcatctactcgctggctcggggtgctgttcctacaatgctcctttctgcctctgatgatttacttctttatcacggcttattcccgaaagaaaggcagctgttgttgctctagaaacttctatctgctgcctccttctgtcctttgctcctcttagagcaaacatggctgggctatgtcctctctcccttcagggtatcccctcccctgctctatccccatgccaccagatcgccatgtccagcctcagtttccccatcaggccccactcagcagcatctcacacagctcaccacactctcctcgagttttcattttgcaaattttcgcacctacaaaaatgtaaaaaaaccccaaaactgcccaagcatcaatgctcccttttcctggagtctgcagtgtggatgtttctgtcggatttcctaactctctccgtctccacccacatctattgggattcgtgtttttctgagggattccacagtaggttactgatgtcgcacctcagggtgtgtctcaaaagtgagacttgaacatagcacagcaggatgtcggggtgacacaacctgttgtcccttctctttacctacagtaggctcccttggctgttttgtttttgttgtgtttttgtttgtacacagagtctctgtcatccaggttggagtgcagtggtgtgatcttggctcactgcagcctcaacctccagggctcaagcaatcctcccacttcagccccctgaacagctgggaccagaggcacgtgccaccaaacctggataatttttgtattttttttagagacagggtcttgcccagactggtctcaaactcccgggatcaaactatcttcccacctcagcctcccaaagcgctgggattacaggtgtgtttttttttttgagacagagtctcgctctgttgcccaggctggagtgcagtggcgctatctcggctcactgtaagctccgcctcctgggttcacgccattctcctgcctcagcctcccgagtagctgggattacaggcgcccgccacaccgcccagctaattttttgtatttttagtagagagggggtttcaccgtgatcgcgatctcctgacctcgtgatccgcctgcctcggcctcccaaagtgctgggattacaggcatgagccaccgtgcctggcctgttttgttgatttttaaagcccagggcagtagtcttggaaaatgtcccacatcgtggatttgcctttctgtttccttgagggcagattcagacagaacacctttccctgggattggtcaactaatccgtggggtgttgctgaaactttattttattttattttatttttgagacggagtctcgctctgtcccccaggctgtcccccaggctggagtgcagtggcgggatctccgctcactgcaagctccgcctcccaggttcacgccattctcctgcctcagccccccaagtagctgggactacatgtgcccaccaccgcgcccagctaattttttgtatttttagtagagacggggtttcactgtgttagccaggatggtctcgatctcctgacgtcgtgatccgccctcccaaagtgctgggattacaggcctcggcctcccaaagtgctgggattacaggcgtgagccaccgcgcccggtgttgaaactcccttgaggcattttcttcggccttcgggtccatcctctgtctcctccttgacctcctcatctcctcgccactgccttggggaccttggccaggctcatggcatccagcagccactcaatgtcaatacctccatgttcatctctcagcccgcccttgcccgtgaacccatgcttatttatttattttttttaatacgtgcacccatgctcttcaggtctgatgaagtatccaaaatcaagctcctgaccatccccaaacctgccccttctgcagggtttacctcgctagtcggcgccatccttgattcttctctttctcccacccaggccatcatctcttgcctggttgatacccacagcctcccctttgggctttatccttatccccatcatagctgccagagggatcctgtgaaaacactccccagcctgctcattcctctgccctaagcctgcatggcacagagcaaaagccagttgttatgggacctaggaagtcctgtgggatgggccccagcctgcatcttcatcctcttctccccaccccactccattcactctctgcctatcactcaccagcctataccacctgcctcagggcctttgcactgaccatttaggccacattccaggctcttttcacacgttgcctcctctgagaagccctccctgaccactctgcccatacctcatgcctcttgattccccttacctggcttgtggtttcagcactttccctgtgtgtgtttgtttttcttggcatgagagcaggacctaagtgtctgttccctgttgattccccagtgccaggcatgcagtgcaaactctagaaatattttttgcatgaaggaatgagtgattgaatgcagcaagggtctggaggctgaggaccaggcagacagacattcagagttgctggaacgcgacagagacagggagtcagactggtcatgcaaggtcctgggcctgcccttgggtcctggggagccacggaaggttgtgggtgccagagggttgcggtcagagtcacagtcaagggccttctgagacctgtgccccctccccaccctccctccccacctcctcaggccagctctggggtctcggcaggtggtccgcaacatgacctccgagttcttcgctgcccagctccgggcccagatctctgacgacaccactcacccgatctcctactacaagcccgagttctacacgccggatgacgggggcactgctcacctgtctgtcgtcgcagaggacggcagtgctgtgtccgccaccagcaccatcaacctctagtaggggctgctgggccgcctgggtgggaaagggccaggggcgggtggcccagggactgcccacttatccagtaaggtggctccgtcacctcttttcctggtgggaaactgaggcccaaccttggtagcttatcctgggcctctcagtgagtatgtttgagcctcagtgggtggatagggaccaggctgggccaggcaaggtcgggcactgtctgacctggctgggcggtagctttggctccaaggtccgctccccggtcagcgggatcctgttcaataatgaaatggacgacttcagctctcccagcatcaccaacgagtttggggtacccccctcacctgccaatttcatccagccaggtatggggtggaggtccgggggtgggggactggggtggagaggggcgggtgtcctgggcaggcagctgacgggcatccctgtcttctcccatcggccgcagggaagcagccgctctcgtccatgtgcccgacgatcatggtgggccaggacggccaggtccggatggtggtgggagctgctgggggcacacagatcaccacggccactgcactggtatgtgtcacaccttttctccctggccgtgcccaccctgcacagcccccaagccatgctgatcacactcccatgccccaggccatcatctacaacctctggttcggctatgacgtgaagcgggccgtggaggagccccggctgcacaaccagcttctgcccaacgtcacgacagtggagagaaacattgaccaggtgggccgggggttggagaaactgagtcaaggtgtggggccccagggcatcctgg

SEQ ID NO: 9410 - DNA, 6000 bp, Homo sapiens
tcatatccagtggcaactgagcaccacccttaaaataataatgattcttcttctttttttttttttttttgagacggagttttgctctgttgcccaggctcgagtgctgtggcacaatcttggctcactgcaacctccacctcccgggttcaagcgattctcctgcctcagcctcccgagtagctgggattacaggtgcatgccaccacgcccagctaatttttatatttttagtagagacggggtttcgccatgttggccagtctggtctcaaactcctgacctcaagtgatccacctgcctcggcctcccgaagtgctggcattacaggtgtgagccaccacgcccagtcagtgattcttttttgtgtgtgtgtgatggagtctgtcgcccaggctggagtgcagtcgtgcgatcttgactcactgcaagctccacctcccaggttcacgccattctcctgcctcagcctcccgagtagctgggactacaggcggccgccaccacgcctggctaatttctttttgtatttttagtagagatggggtgtcaccatattagccaggatggtctcgatctcctgacctcgtgatccacccgcctcggcctcccaaagtgctgggattacaggcgtgagccaccgcgcccggcccagtcagtgattctttataattgcatagcaatgtacccagagagcactttcccgtgcattatctcagttcaatttgagcttcaccatggccttgtggggttgctgtagtcagtgctgtgaacccatcacatggagatgcacgtggagggggctcagtgacctgctcggggagtgtgtgcatgaaggccatgtccatgctggacttcaagccccatgggcatgagcttccttttgcacctgccaacctctggtgcttgagtagcgaatggagctttatcaggacagaaagccctccctcccccgctcccctgccacctgccccagagctcaggagtaaacaggtatcaaacagatggccctgaaaacagaatgaacatgtctctgtgtggctgcagcttggtgctcgtgtctgggcctcgagcagcctctcttagagggggtggtgctttctgttgcagtgactctcagccatggcggcccatgacagtcaccaggaagctttacaaactcacctacgcaggggccccaccccaggccaattagcttgctctccagagggcagggccagacctggttgtactaaaatctccccaggtgattctgacgaccagacagggctgagaaccaccatcaggtcctctgggctgtaccctggatcatccctaactcattcaaaatgttttctccaagttttgccacttacagaaagatgaaggattcccgtgggggtgtgagaatgaatatgctctgaggttgttgggtggaagttgccacctcagagaatgggggcacctgcatccctctgatgcctctggaagggcacagctccacgagtgggacaggccacaagcactggcagggatcaggtagccatcctccctggcgcgcgcctcttgctggaggcccagctggggtaacaccctctcccctgtgcacaggtgcttggtatttctacccctatgggctgcagacattccaccctgctttggtttcctggtgggcagcgaaggacagcaggaggccggatgagggctgggaagccagagactcatcgccacatttccaggtgagtctctgagggtggtagctcccaagagcttagcaataattaggtgacggtgaaagtggtgggtgcgccctcagcctgcctcacaccgtacacacaaagctgaggcgtactgttagttgccatcttacaaggcacagaaaacagaaagaaaaggaatccaacaaattatcttgtctgctttgttccttttcaatgctgtttcacaaatatttactgggcaccttctatgactaggataatatcccagtcagttacctcttaccaaagataatccacccctaaaagcagtggctcaaaactacaatggttgattagttcatgagtctgtgggttgtctgggtggtctttctggtctgagaaaagagaagcaatcttggctgggctcgtacttgcctgtgtggatctgtctgtctgcagttggctgggggggtcagctgggggccagctggtcaaggcccttgcctaggacagctgtactccatgtgcactttgctcacccggcaggctagccccagctgtttctcatcgcacccaggcagggtttcaagagagaaccaaggcaaccagacctttgaggccttgatccagaaccagcacaccgtcactcccgccacattctgttggctaccgcaaatctcagagccaaatccagattcaaggagagggaaatagacttcacctctcagcaagagagcccacaaggtcacatgacagaggtgcggctgcagggaggagtgagggatggtggccatttttataatctgccagagtctaaagatgaatcaggcccaggctgtgccctcaaggagcctgcagtcagcataaccagaaagcaatgtgagcacaggtactgatactgacaatttaaacctctaagccaagcctggtggctcacatctgtaatctcggcactttgggaggccaaggtgggaggatcacttaaggccaggagttcgagactagcctaggcaacacagtgaggccctgtctttatttttaataaaactcttcattttctaattatggttatttgacctgcacttgcatctcactgaatttaacttggtattacatttttattattcatttaaaaattttttgagacagggtctcattctgttgtccaggctgcagtgcagtagtataatcataactcattgtaaccttgaactcctgggctcaagcgatcctcctgcatcagcctgtgaagtagctgggactacaggtgtacaccaccatgtctgtcaaatttttaaaaaaaatttttgtagagacagggtctcactatgttgccaggctggtcttgaactcctggcttcaagcaatcctcctgcctcagccttccaaagggctgggattacaggcatgagtcactgcacctggcatagtatcactttttttttttttttttttttttttgagacagagtcttgctaagtcacccatgctggaatgctgcgtcacccaggctggagtgcagtggcacgatctgggctcactgcagcctacacctcccgggttcaagcgattctcccgcctcagcgtcccgagtagctgggactacaggcgcgcaccaccatgccagctaatttttttatttttagtagagacagggtttcaccatgttggccaggatggtctctgtctcctgacctcatgatccgcccgccttggcctcccaaagtgctgggattacaggcgtgagccaccacgcccagccggcatcacatgtttaaccatctatttttgtatatattactttccagaccatggtctttccaattttattatatgtgctgccaaagtgagtaccagaccatgatcttattattttacaaaataatgacatgtcatctatgacttttccttttttcaccattaaagacattaaatacagttcaatttcagaaccatcttttttgtaaaaaagggtaagttaaaaaaatgaatatatcttgtattagcaacatttgcatgaagttaaaataaaaacagcttcctggtctgggagaggctgttggtgaggcaactggggtgatggggcagaggattttttgctggtttttgtgggctttttttttttttttttttttgagacggagtcttgctcttgttgcccagactaaagtgcaatggcacgatcttagctcactgcaacctctgcctcccaggttcaagcgattctcctgcctcagcctcctgtgtagctgggactacaggagcctgccaccatctccagctaatttttgtatatttagtagacacagggtttcgccatactggccaggctggtctcgaacttctgacctcaggtaatccacctgcgtcggcctcccaaagtgttgggattacaggcgtgagccaccacgtcccgcctgtttgtgtgctttttgagtcatgcaaatgtagcgcctatttaaaaaccagaatttctaaaactcagaacctctgctgctcagtagctccctggcctttatttgacagtttttatcacttctcttggcaatgattttgttgttaagccaacaacattctcaaattcatgacacactatcaaatgccaccctcagtccaaatgacatttattccattttctctgtgggacatccagctaaagaggaaaaagaacgtattttcaaattattctgtctcttagccatagttacctagggaaggagtgaaagccattgagagtccacagacagaactcgcagccctggctcccctgcccctgtaggaggcggggaaggagtgagcttcaggccaggagggtccacggccccctgcagccatcctgcagcttccagtcctcctcctggaccatccctgcactcagaccttctccccggcccaccttccttcctcctctgggatcagacttcggtactgtgtcctcagggaccttcctctgtggccggcacccagtgatccctggctcccagcacacccagctcagaggtcggcagcccctgcccacgagctccagccggccctgcatggccttatgctggaacgtctctggaatcttttccctttctttctgtgttggctgtgtcggggtggtctttgggaagcactatcatccaagggtccctcactccgtggctctctctctgcccttccaggctgagcagcgtgttatgtcccgggtacactctctggagcggcgtctggaagctcttgctgctgaattttcctccaactggcagaaggaggccatgcggctggaacgtctggagctgcggcaaggggctcctggccagggaggtggtggtggcctgagccacgaggacaccctggcgctgctggaggggctagtgagccgccgtgaagctgccctgaaggaggatttccgcagggaaactgctgctcgcatccaggtaggaggtggaatacctcagggtgggaggtgggtgacacccataggaaagcgtgaaggtgcccagcagcagagagaacaagtgtcatttgggatcagacagctctgccattttgcagttactccctttctctttttttcttttttttttttctttttgagacaatatctcactctgtcacccagcctggagtgcagtggcgtgatctcgactcactacaacctgtgcctcccaggttcaagcgattctcttgcctcactcagcctcccgagtagctggattacaggcgtgcaccaccacatccagctaattttgtatttttagtagagacagggttttaccaagttggccaggctggtctcgaactcctgacctctagtgatctgcctgccttggcctcccaaagtcctgggattacaggcgtgagccaccacgccaggcctcctcaccttctctaagcctcagtttcctgctctttgatggaggccatcgtgtctcccccacccccatagtgagctgtgcgagtagaaagccccagcatggtacctgacaccgcagaggtgtgcagtggagctgaagcgggagtcttgcgtggttcagagaaggctgagagccagggctctggaagcaaacagaccttgtttgaattccagttccgccacttcctagtcatgagggtccctataagcatggctctgtccaacctgtcctctcactcccgtctcacaggaagaactgtctgccctgagagcagagcatcagcaagactcagaagacctcttcaagaagatcgtccgggcctcccaggtcagcgggcttgcggcactcagggcctgtgactgggtcctgaccccatccaacatgttcacctcggacccctcggcccttccaaagggact

SEQ ID NO: 9411 - DNA, 6000 bp, Homo sapiens
cagtatcagtcaatttccccctttatgggagcacctaccatcccccaaccctcaacccagtggcacacagaggaatacaaccctggtgcacagtagcactattcacaacagcaaaacggtgcaaacaaaacgtgatccatccatacagtggaatactattaagctataaaaaggaatgaagtactaatgcatgccatgacatggatgaactttgaaagtatgcaaaatcgaagaagccagtcacatgcatggaactggagaaacttatgttaagtgaaatgagacagaacagaaagttaaacaccgcatgttcttgctcatatgcggaagctaaaaaaagctggcctcatagaagtcaaaagtagaacagaggatagtagaggctgggaagggtggaaagaagggagggagagggagggagagatgtgttgaaggatacaaaattatagctacatggcaggaataagttctagtgttctacaccaatgtaggatgactctagttaacaacaacatattatgggtcaggtgtcacggctcacgcctgtaatcccagcactttgggaggcctagaggggtagaattgcttgagcccagcagttcacaaccagcctaggcaacatggtcaaatcccatcactacagaacatacaaaagttagccaggtgtggtggtacatgcctgtagtcccagctactcgggttgctgaggcaggaggatcacctgagccttgggaggtagaggctacagtgagtcgtgatggtgctactgcactccagcctgggcaacagagtgaggccctgtctcaaaaacaaaaaacaaaaaccaaaatccaaaccaaaacaaaaattatgtattttcagctagctagaaagagaatattgagtgttcgtaatgcaaagaaatgataaatgtttgagatgataggtgtgctaattaccctcatctgatcaccatacattgcatgtatagaaacatcactacgtaccccacgaatatgtacaattattatgtgtcaattaaaaaataaaaatagccaggtgtggtggctcacacctgtaatcccagcaatttgggaggccaaggcaggaggatcacttgagcccaagagttctagaccagtctgggcaacataataagacctcatctctataaaaaaatacaaaattaaccaggcatggtggtctatgtctgttatcccagctactcaggaggctgaggtgaggggattgcttgagcccaggaggttgaggctgcagtgagctatgatcgtgccactgcactccagcctgggcaatggaaggagaccctgtctctaaaataaaagtgaaatttttttaagaaaagaaagaaagatgccagacacagacggccacaagttttatggttcagtttatatgaagagttcagaataggcaaacccatagagacagaagtcacacgaagacaagcccataatgtagcctggtgactgtggcactggtaagggcctggaggtggaggacagggggagtgggaggggctgccaaggcccacggagtttctttggggtctggaaatactctggggctacagagtgttgatgtctgctcaaccttgtgtatagactaaaaaaccattcgattgtgccattgaaatggaaaaaattgcatggtataatgcaaaaggtaataaatgaatagtataatgaattatatctcaataaagctgttatctttttttaaaaagcaaagagctcaaagttctagcatttgcttcaaggaagcctgtggccctgcacagaggcgaaggtgggcaggggctgccaggggcagggctgcagagagggcagggggagaagcgaggggtacagggatcacagagatctctgctcacatccagaccatagcagggcaggcctagcgctgggtgcccaggcccacgggagagcccacctgtgggaacaaggctggcctgaaagtcactggctccatgtgacaatcaatgaaacaaccgagtttcacaggagctctgtaaatcctaggaagcaggtcttacgctcagctggggacccttggcaggtggctaccctgagccagctgatggctttttttttttttttttttttaagagacaaggtctctgttgcccaggctggagtgcagtgatgtgatcacagctcactgtagccttgaactcctgggcttgtgatccccctgcctcagcctcccaagtagctgggactataggctggactgcacccagctaatttttaaaaaatagttttttgtggagacagggtctggctgtgttaccccaggctgatctgaaactcctgggctcaagcaatcctcccaccttggcctttcaaagtgctgggattcaggcgtgagccactgaacacagtcatggattattttgaaagaatgatgccccaccagggccaggggatccaggtgggagttgtcggtgggggggtcctcagggagatcaactggatgggagatgagtgtcggggatggaggggtgggctccgttctccagctcaggagacaggcagatctgagagggccagacttgggcatgtggtggggacccagctgctgggcgcccccgaggttgggccagttaccagggcctgccactctcaaggaggaagcagacaagaaacagaccttcgagggtagagaggccgctgtgctgcctgtccgggcccctgggcacatgcagtcaaccgtgctcaggactccttccgttctctcacttgcactcattcccagcgagataattgtttctcctcagccgtgagcatgacattggagctctggcaaagtcaggttgttgttttttttgccatgtgcctcttacctgtactctgaaatatttgtttctctgccagaaacatggttccctgcgttcattctaatttgttgcatttttctgcttgccctgtagccacttttaccgatatttttggtctgtccgcaggcaaaggaattcattcacattcatttaatttggagtttgtctttccgttatcagcctgcaccaaacctgggctgctgggtatataaattccctcatcggtacgttatccccttatccactccatgctgccgttcacagatcctacttgagttctatttagctatgacattttattcacttttctcaaagctagtaaaatatgattgcatttcctgaagttaagattgtctgctagatcccagaacatgccactgtttatgtgaatgcaatcacacttcaccactttatataatcattttcaatgcgtgtataaggaaaggtatttagatcccccccacccctgccatattgtttccttgcaaaattagggtatattctgctgacaagcatggtgttcacaaccttcccatgcaggagctacgatcactgctccattttatgcgggggaaactgaagctcagagaggaggagggacttgcccgagagcccacagcaatatttgaagctgggatcgctgtcctcagagacatttacattttccaagaatcatacgtgtgctaggtccacggagcctactgcccccaacccccaccccagggagatgcaggtgtctggcaccaggtgagcccgggctggcatagtcttgagggcctgcaggccaggggtcaggaatgtgggagcccagctgaaggggcccgagccctccggcaactggaaggggaggggccgatggggttgaggctgggtaaacccatgcatctttgtggttgacgaagtgggattgtgtgtgtgaagagggaggcaggcttggggtgcaagacccctttgctggatggagcagatgtgagccttgggaaagctgaatgccacagtgacaacagcagccgcattgaccccagatgttgtgatgtcccaggcatgccccacgtgggagcacatggactgcagagggagactcggggcgctggctttgtgccagacggggtttgggacttcttcctcggggaagtgagaatagtaataataatgccccctcagattattgtcaagattcagggggcacccaagttgtttagcacgagctccagcacccactaagcacacaataacccagagccatgatctctctgcctgagcaggtagcagggtgggggactgagaggctgcagaaaagcctcagagcctcagaccccctgcaggctgggaggggccctggggaaggtcggctgctgacttggagaggtcgaggcagggcttgagctgggcggtttacaggtaggggtgctccctgtgagatgccccagctggcatcagtcttggggccccaggcaaggctgagcctcccagagcctctctgtagggtggctgggtgcctgtgatggccgggaaccagagaccttgtcaggagggctgacaggttccaggcagaatctcagagggccgcccctttcagaagtgaacaggaggtcagaggacatgccacatgggctcctgtggagtcgagatgcttaatagagccacatgtctggtgatgccaggacaaccgcccagaatggttcatcccatggcccggccacaccctctctccagcccgtctgaggcagtgcatgtgtctggagtgggcctggtgacactcttgctcaggtggagctctcctcagggaggggtgcccggccatcccctgacgtctccccagcctgacctagctctctcccccaggtgggcagtccccagtgtgcagggataagcttgtctactgtccccagagcctgacctggccttgtgttccctgccgggtgccggcagggcttgtagcctcagcactgaccatgcctgctgggcacccactcaagggcttgggggcttcccggaggaggtgacagctgagctgagacaagaaggacccaggctggtgagggagaaccagggtctcagggagcacagggagacagtccataaagtcacggggagactttggcccaggagggtgaaatcagcaccccagactcacccccaagcctgccccactctagccagggaagggtcggggcggggggctggcggcctctacttctcacttctttgctgtggacacccccatgcccccatcttcctccagcagcacgggaatccccaagggccccatcagtcccagctcctgaaccagaggtctcaaactgcaggctctgctggaggtccgaatgtcaggggtcagaatgtcagcaacctgtgccttccagcagggtcaccaaggtgagttcccttgggtggaggacagacggtgctgtgcacatcacagctgaaggcttgggctctcctcctgtcccagagcccttcaggggcttcaggcctcatgcagagcctgtttccttggctgatgtgggatgtgtttcagccccaggtctcagccagcggtcgcccagcggcacggtcagagccgggcctgcctggttccctgggccggcactctgagtccaaggtggcacggttgggcagtgacctctccctgggcccccaacctctgacctcctaggcactggcccgagccatggctcctgaaaaggaaaacctgggaactccttcaacgtccaccataggtgatgatgggctcagagcaccatggggtgtgcccaagatgatgagcccctccctgcatgtcagtaacagggacacacatctctgatgcgtggggagggaagagtctgagtgtgtgaagctgtctgtccatgcaggccacacatggatggggtgcaaggacacggaatggaggaagacaggactcggaggactcccgtcttacatggcaatgtttttgtttttgcatccaccgctcttgtataaagagcagtctttacaaagtaataccgccttgagttaaccccacagtttatcttgtaatgtggaacagtcagggtcaattgaagatgagcatccccctgaggctgacccatagcaggggccgctggagccaggcccttcggggtatttgagatttctttagccaggcctggggggcactggcagggagggcctcc

SEQ ID NO: 9412 - DNA, 6000 bp, Homo sapiens
taccctgccttccactccccacccactcctgctgacagctatcaccatgccttccctgccttccctgccccactgggagcttgtgggtgttttcagcgggtgcccctcccccccgacccggttttgactgcccgctgggctcctggtgtgaacagcggctcccaatttagctgtcactgccaggtgggtggctctagaaggatccacactccctgcaggggcgggggaggggcgtgaagccacagcggatgccttgggcacagcccagggacccccgccttccggagctctgcccctgcaccagatttgggccttcagggaccagaagccgcctactccccagcccccaccagccggcctccccagagagaggccaccaactcggttgtgcccactgagagaagaccctgagcccatctgctggcaaacacaagtggcccgaggctcatctcaaggtccaggagccctggggactcaccccttcctctaggcaccaggaagagtggcggaccagggtccaggtgccagcctggcatgtcccacttggccgagtgtcctttcatctccgttcaggctcccatcctggagatgggccacaagggatccagtccagggctgggggacgcagaggtaagggccatcactgtgcaatgcatacgtcccattgacggtccccagcagcctccaggtggtgggaggtgcgcatggtccgtcagggggcctgcctagtgtggcacaatccaggatgccattctgtgggaggaggccctcgctagtgaagggtcagaggcatttggagatgggcaggcccagtgggattcttggggccactgccagggtttggttgtcggtcccttccttgtgccagccccctttgctgctgctgtggctttgatgaataagagatgaggaagcagattaattatggcttaacatgcaccaaagttgggcagagggactcctagggatgggagtcctcaggggtgcagagctgataggggaaggccaggacaccctctgcagccccggggatgggggatggtgagaggcttctggaggaggcggaggctgtggacaaagagagggcagaaaggggctgccaagatgtgggtccacctaagctccccagacctccttctctggtctggaaaatgggtagtggtagtagtgtctacactgtaggattgaatgggatgactcactcagcaggcctggcacagagtcctcttaggccttgggcatgcagccgccctccatggtgagagcagatggcaggccaacaccccccagctccctggcactgggaccacatccccagccgcccactcagagtgcagggaaggtcagtcacattgacacacttgggcagcaggcatgtgcttgccacatgaccttctagcttccttcttggtctctccttgcattggcctggagtggcccagaatgtgtggagcaaagacccagtttccttgctgccccatccctccccaggagacactgagggcctggatgtccgtgagtaccgcacaggcatgccaaggaaagccatggcacgcctatctctccaggcaggagatgagtcttcccaagccctgggaagcagtgaccttccaaggaggctgaaccgtgtccctgtcagcccaagacaggccaccgcgaaagttcccctcatctcaagctggcttctatgggcagtcctggagttttgagtgaaaaccctgcatgatcctctcaggggacaggcgaggtgaacaaaggagggatggtgaccagctgaccaggacctgaggcattagcgtctgcctcgtccacatgctgtgcaagctcagcgaggccaagggactgggctgaggtcacacagctgggcagggccctcatgaccggcatgctggtcgtggaggctgagccccacattttgggtgtgggtgtgggtgggaggtgagacagcccctggcctcactgtagaggggtggtgggctggggaagctggcaaagaatgtgccccacatggtgggtgtgaggtggggaacgattcgggcagatgcccgtgtggccctgctgacccagtccaggcagggtgtgacaggtctgtgtggccctgagggcacagctgtctgcagtctccagctcactcctgatccccagggccacgtgtccagaaagcctgggagcttgcatcagctgggcacagatggcctgtcctcccagcacccctgatggggcttcctaggaactgactggtgtagactccgggcagcagacggccaggctctgcccacagggtccctggctcctcccacaaggtgacccgatagaactggttgtgccccttgaccaggggctccagcccttgtcaagccctccctgctagcccctcaccagccgtcagctgctccccttcttgcccgttgggccctggggggtgatggctccgtggtcgcctgcccaaagagtacaccactccccatgctacccctcacccggctacaccctgaaaaatgtggcttaccaaaccctcccacatgcgcagcctgagaagtgggctgtgccttgctggtagcagacccaccggctgcctagccctgctcaactctgcctctgcacccccataactccctatcagcgctggccgacgcctaaccatcccagctagcacccaggagtgggcccagcttccagtggggagggtgctggccaacgtgctgaccgaggtggcggacacaggaaaccagcccatcccccagcgctccctctgcaggcctcagccctgctcccatgcagagacctgtggggaggtggaggcccaggtcccagcgcagagcaaccgggaacagccaggttggtggctggagagggtgctggtgccagaagcctccagggccacccctgctccccatttcaccccatgcccatcccatgccccagaatggtcacttcggctgcggcaggaggggtgggaggggctttaaacctatgagatagggtgtggggtcacaatcttcagctatagtgggctgctctgggtcactggtaattgaagagacgcctgcggagtaagcaagcaagtgtcctctcaaggcctttctgcaagcacagagcagcccgagactggagcctggtccaccccagcgctgtcctcagactgatggtcagtgccacgtgactcatctagggtctgatacatccctgtggagagagctcagttcctagcctgggggctgctgtgtgcagggaccctggagaagaatgcttgtctgggggtcaggcctcagcctcccactggctctgtgagcttcgcctgaggttccctatctgtgcaatgggtgatgacgtcttggtgtggctctgggaggacctgttgagccacctcaggggctgagctggtggcactcggcagccagcaccctctggggaggtggcagtgtgtgcacagcccaccccttcaggaggccaggggacagagtggctgggggtgtctgggccccacctcaccttctgtgtggctgggaatggcatgcactccacaatgccctcataagcctaggctgggacaagggtgatagggataaagcaggccaaagtgatgagggccacagagcggcagccagaggcatgtgggcagtgcagcctccacaccaggcagagggcccacccagcatggctccaccctgcgaagctgcctgccactgggatcagatgggagcaccagggctctgggaggtcctcacttcctctgcacaaggcaggcaggtcaccggccctgcgccctgctcatctccctcagggccacctccatggccaggggcaggcagagggcacaggggtgcccagtcaccaggtctctctgcttcatatcagtggacctgggctctgaggggggccatcaaggcatcaggctggcccactccgtccttgagtcagggtcctacagactgacaccaggtgggcctgcaagaccctcatctgcatggtcctctcatgcagggtgggcctggggaggacccagcccggctgagctgactcccagcacttctccaggtgcaggggcagcctggcagttgtctgaagaccccgggatgcacttaggagctcatcggtgaggcccggtaggtgccccgagcagaagattgagaagggacacctgcacccctgtgtggtgtgtgcaggggcgtcactggattctctggccccatgcctcacaccgcccgtggggggctggcttggtagagtggggggatactaagcaggtgacctcggagagcgtcttctgggtttggagcccccattccgcagaagggaagaggtgggggacccctgcagggttacgggtaacatcaggcctaggtcccttctctaggatggtgcagagagggccacaaaggcccaggagggcccccagaactctcttaagccctgagcctgtttcttactgaaaaatgggggcgatcgtgctgcagcaaggggcttctgtgcagggggcgggggattcatgggtttcgtgaggccaggaagggagtgggtcaggcagaggccattcctaggcctcgggacaaagcccttgcccgcttggggaccgggccagcctaggccgccacaccctcgggcccgcgtccccggccggctccggcccgggccgccatcccctccgccgcctgcaggggccgccgcctcttcaggaatgcgccgcctttgtctgggaccgcgcggcgccggtgcaccgggcgggctgagcgcctcctgcggcccggcctgcgcgccccggcccgccgcgccgcccacgccccaacccccgcgccgccgccgccctcgccctgtgcgccctgcgcgccctgcgcacccgcggcccgagcccagccagagccgggcggagcggagcgcgccgagcctcgtcccgcggccgggccggggccgggccgtagcggcggcgcctggatgcggacccggccgcggggagacgggcgcccgccccgaaacgactttcagtccccgacgcgccccgcccaacccctacgatgaagagggcgtccgctggaggtgagtgtccgcgctgcacccgagcccggccggcggcggggcgcggaggggggcggctcgccccctccccggagccgcagggcccgtcccgggctgccgaggcgagggaagcgtagccgggcggcagggaaagccaccgcagtgccgcgccaggctggggccgctggcgccccggccccgggagggcggagccggaggcggcaggaaaagttgccgcttcccgggaaagttgacggcttcggcagggccgagggtggcggtccgagggtccccgatgctgggccaagtcgagggcgggggccgtgggctggaagggcggggcccggcctcggagcgccccggccaccaaggggttaacgagcgggtttttgcagaaacgtgggtaccgagggtgggtgggggtgtcgggccgcctccaccccagcctcacggtctgggctcagaacctcccgtttctccgaggtcagtccacagtgggatgaatgggggcgttggcggcagtagagggcgtgggggacagggttgtcccagcgctgcctccagggcgggcggtgagaggaggcagcaacgcccaccatctgcagcccgagggacattgagaggcttggctgggggaatcaggggcggtggggcaatcagcaacccctccctagcagccctcgtgggactcccccgccccaccggctgtgaggtcccgcggtgcgggcaagggagggtgggctccatgtgagttgggcatgccccgcctggagggtgctccccaggtgcccacccaggctgccctgctgatgtccatggtgccgcaggctgcacacacgtttccttgcacgtgcacttgtctacacggactgcacacttgcacacctctggtgcacatgcaagccaacgccgccccagtgtgcacatgcacaaacactgggtgcacacacggactctgagggtgcatatctgtgtcctcgcccccgc

SEQ ID NO: 9413 - DNA, 6000 bp, Homo sapiens
accccccaagtggccatttcagaggcctaccctcagggacgcattctctttctcaggggcgttccttgctgagaaaaagaattcagcgatatttctcccatttgcttttgaaagaagagaaatatggctctgttccgcccggctcactggcagtcaagagtttaaggttatctctcttgttccctgaacgttgctgttatcctgttcttttttcaaggtgcccagatttcatattattcaaacacacatgctctacaaacaatttgtgcagttaatgcaatcatcacagggtcctgaggcgacatacatcctcctcagcttacgaagatgacgggattaagagattaaagacaggaataggaaatcacaaggctattgattggggaagtgataagtgtccatgaaatcttcacaatttatgttcagagactgcagtaaagacaggtgtaagaaattataaaagtattaatttggggaactaacaaatgtccgtgaaatcttcacaatttatgttcttctgccacggcttcagccggtccctccgttcggggttcctgacttccctcaacagatgcagtctcactatgttgcccaagctgttctcaaactcctggcctcaagcaatcctgacattataggaatgagccaccatgcctgggtgacagaccaccttctgtttatccacttatcaacagatagccatttgggtgtttttagtttttggctatggtgaataatgctgctatgaacatttgcatacaagtctttgtgtggaaaaaaatttcttcagggtaaatacctaggattggaattgctggatcatatagtaagtccacgtttaacttttttttttttttttaaatacggtctcattattttgcctagtctggtctcaaactcctaagctcaagcaatgcttctgcctcggcctcttacaagtgagtaccaccactcctggccatatttaactgtttaagaaactgccagactgttttcccaaatggctacaccattttacattcccaccagcaaagtatagaaagttctaatttctctatatccttgccaacactatcttttgtctttttttttttttttttgagatggagtcttgctctgtcacccaagctggagtgaaatggcatgatctgggctcactgcaacctccacctcccgggtcaagcaattctcctgcctcagcctccctagtagctgggattacaggcatgcactaccatgcccagctaattttcctatttttagtagagaggaggttttaccacgttggccaggctggtctcaaactcctgaacccaagtgatctactggccttggcctctcaaaatgctgggattacaggtgtgagccaccgtgactggctgtgtctgcctttttcactctagccattctactgggtgagaaatggtatctcacgagggttttgatttttatttccctaatggctcatgatgttgaatgtcttttcatgtacttattggtcacccgtatatcctctttggagaaatggttattcaaatactttacccattaaaataaaaatttcatctttaagagcagtttcgagttcacagcaaaactgaacagaaaatacagggttcccccaccccacacacactcatagcctccccccaccaacaacatcaggcaccagaggatatatttgttataagcaatgaagctacattgacacaccagtatcacccatatcccatagtttacattaggtttcattcttggtgttgtacatcctgtagggtttgacaaatgtgtaataacatgtatccaccattataacatccagagtaatttcactaccctaaatattctctgtgcaccacctctgtgcatttctccccactcccagcccctgccatcttttttattgtctccatagttttgccttttccaggatgtaatatagttggaatcatacagtatgtagctctttcagattgtcttctttcacttactaatatgcatttaaggtttctccatgccttttcatggcttaatagctcatttctttctagtgctgaatatagtccattgtctggatataccaaggtttatttatccatttacctgctaaaggacatcttggttgctttcaagttttggcaattacaaataaagctgctgctggccgggagcggtggctcacgcctgtagtcccagaactttgggaggccaaggcgggcagatcacgaggtcaggagatcgagaccatcctggctaacatggtgaaaccccgtctctacttaaaatacaaaaaattagctgggcttcgtggcaggcgcctgtagtcccagctacttggaggctgaggcaggagaatggcgtgaacccaggaggcagagcttccagtgagccgagatcgcgccactgcactccaccctgggtgacagagcgagactccatctcaaaaacaaaaacaaaaacaaaagctgctgtaaacatccatgtgcaggtttctgtgtggacataagttttcagctcatttgggtaaacactaaggaatgcaatggctggatcttctgatgggagtatgtttagttttgtcagaaagccaaactgtcttccaaagctgctgtaccattttgcgttcctaccagtaaggagagttcctgttgcttcacatcctcaccagcatttggtgttgtctcccttgcccatttctaaacttggctatttgtcttttcattactgagttgtaagaattttatgtatcctagatacaagtcccttatggaacatgtgatttgcaaaaattttctcccagtttgtgggttgtttagaggtcttttttttcttttccttttgagacagggtctcactctgtcgcccagactggagtccagcggcgcaatcttggctcaccgcaacctccacctcgcgggctcaagcgatcctcctgcctcagcctcccgagtagctgagattacaggtgcccaccaccatgccggctaatttttgtatttttagtagagacgggggtttcaccatgttggccaggctggtctcgaactcctgacatcaggtgatacacctgccttggcctcccaaagtgttgggattacaggagtgagccactgcgccccattttttttttgaatgttgaacacaatgaatttatcatgatagtgggtacttctgaaggaggcaggggtatacacaaggttagaatcatacaggtagatatcatggtataggtgctgcgagagtcagaaaactgactctggcaccagctgcctgggcttcaaccccaatgctgtaaagtaacttagtctctttgtgcctcagttttctcatctataaaatgagtatatcagccgggggcagtggctcacacctgtaatcccagcactttgggaggctgaggtgggtggatcacctgaagtcaggagtttgagaccagcctggccaacatagcaaaaccccgtctctactaaaatacaagcattagccatgcatggtggtgcgcacctgtaatcccagcgattcggaaagctgaggcaggagaatggcttgaacatgagaggcggaggttgcagtgagccgagattgcaccattgcagtccagcctaggtgagtctcactctgtctcaaaaaaaaaaaaaaaaaagggtatatcaacacaatctcactggtgtgttgtgaagcctagccaagttaatgtacctagagaactagagaacagtggctactaaggacatctaaggacactttatacaaaccttaactgtgttacaacttcttaagtcagtactgaggttcaaaagcttccattttattattatgctttataatttatatatgttacgtgctttcttttgtatagctcacttgaatatatatatacattttagaagataataaggaagaaaaaaagtatatctggttttttaacccttcgaaatgggaaagtttggagtagatgctcagccccggcccctggcccttccccaatactcacaggctcctgtcaactacaccttcagaaaaagacggagcctcttaggcagcagtcaggcaggtgggggcgatctgtcaggtgacctagactctgggccatctcagtttcctcacctgtaaaatggggatgctgaggtacctacctgacctatgagagcggagaacactgagatatcttgcccatggcctgccctgtggttagctgtcgttttttccttgacacttgtaggctcctcttcatgtttacataacctcagtgggaaaacgccagcgaagagagacactcagaatggacgatctaaagttccttccagcttccaaattctgggctggttttcagagatccagggctcgggatgcgaatgtccctgtctacgatggggctgccgttacagccttcctcccggggctctggagacgcgccagctctttgacacctctcctgcgctaaggaagagttggtttacagaaaagtaagtatatcctggccctgcagaaagccgccaggcggcaggacaagccccaccgcagcccaggcgccattatctgcctcagcagttacctcggggtcccgccacgaggaggttcttcaaggcctgcgcgcccacggacactaccaaggagcgcggcgggcagccggatagcaggacgctgagggaaaccccgcagtcgctcggcgtccccggcgccagctcacgacccagcgacctcctgcggcccgagcgtcccctggcggcaacgccggctcgttagagcgagcgacagatggtgtagtccaaaggccaagcggcgtttctgtagatgagcatgcgcagcacccaccgttcgctcagccagagagaggcttcccagccaatccgagagcctcagagtcatcctcccgcccacccagcatacaggcggggcgttcctccttagccaatgggaaaagacattcgcccgcggtccgcacgcgctgcttgcaaaggggtggggttgtggagtggatgctttggcaagatggcggggagcggcgtccgccaagctacttctaccgccagcaccttcgtgaagcccattttcagtcgggacatgaacgaggccaagcggagggtgcgcgagctctaccgcgcctggtatcgggaggtgccgaacactggtgagaggtagcggcttacgtggggacccggaggccgccgctcaaggtcgtagccggcccggccggggtttctcatgggcccagctgaggtcaccaacttgggcagaggcgactgcgggtgcttcaggggaagagggtcacccgagcctaccatgggccggacctggcggcggcgcggtggtcagaccggccgtgcctagcattcgtacgtgctatcggagctttggtctcttttgtccttcgcaattggcgggaggacgatgactgtcagtgacacactcactttgtgggtgaggcagcggaggcaccgagaggtgaagtgatgtgcccagggcccaggccgagccactgttgtacccagaacccaaagtctagagttgcagagtgtaattatagatgcccgttggatttttttgtttgtgacagagtctcgctgtgtcgctcaggctggagtgcagtggtgcgatctcggctcactgcaagctccgcctcccggattcacgtcattctcctgcctcagcctcagcctcccgaatagctgggattacaggcgcccgccaccacgccggccatttttttttgtatttttagtagagacgggatttcaccgtgttagccagaatggtctcgatctcctgacctcgtgatccgcccgtctcggcctcccaaagtgcgagaaagaggtgtttttgagtgagctggagcacggtgccactcctcagggctgtcgagtccctgcttgtgtgtgtgaaaaggcggtagaatgtggtggttaggagcacggacttttcttcaggcgctgccctcaactagctgtgtgaccttgggccagttatttcatctattcctcagtttcttcatctttaaaa

SEQ ID NO: 9414 - DNA, 6000 bp, Homo sapiens
cttatttgtttatttatatttaagatgaagtcttggccgggctcatgcctgtaatcccaacactttgaaaggctgatgtgggcagatcacttgaggccaggagttggagaccagcctagccaacatggtgaaaccctgtctctactaaatacaaaaattagccaggtgtggtggcaggtgcctgtaatcccagctacttgggaggttgaggcaggagaatggctttaacctggggaagcagaggttgcagtgagccgagattgcatcactgcactccagcctgggtgacagagtgagactgtgtctaaaaaaaaaaaagaaaaaaaaaagtcttgctctatctcccaggctgaagtgcagtgacatgatctcagctcactgcaacctccacttcctggcttcagacaattctgcctcctcagcctcctgagttgctgggactacaggcacccaccaccatgcccagttaatttttttatttttagtagagacggggtttcaccgtgttggccagggtggtctcgaattcctgacctcaagtaatccgccaacctctgcatcccaaagtgcagggattacaggcatgaaccaccacacctggccactaattttttttgtatttttagtagagatggcgtttcactatgttggacaggctggtctcgaactcctgacctcagttgatttgcccgcttcagcctcccaaagtgctgggattacacgcatgaactaccacacctggcttttatttttatttttattttttgagatggattcttgctctgttgcccaggctggagtgccttggtgcgatcccggctcaccacaacctctacctcccgggttcaagggattctcctgcctcagcctcttgagtagctgggactacaggcgtgcgccaccatgtcgggctaaattttttttgttgtttttttggagacggagtcttgctctgtcgcccagggtggagtgcagtggcgtgatctctgctcactgcaagctccgcctcctgggttcatgccattctcctgcctcagcctcctgagtagctgggactacaggcacccaccaccatgcccggctaatttttttgtatttttagtagagacggggtttcaccgtgttagccagggtggtctcgatctcctgacctcgtgatccatctgcctcggcctcccaaagtgctgggattacaggcgtgagccactgcgccctgccaattttgtatttttgatagagacagggtttcactgtattggccaggctggtctcgaactcctgggctcaagcgatccgcccacctcggcctgccaaagcactgggattaacggcatgagcaactgtgccccgcccaacactggagtttgaccggctcagtggagtagtggtgtacattggagttgctcatgtgactgctttcagctgctcattgaactgaggctggagcattccagggtccctctctatgtggcctcttaccacgtagtaatctggcacttcattacagtaaggtgcattctctagcttcctagaaggataaagccagacctgccagcgttcttatggccggtgctcagaagtccccaaacagcacttcttcggcattcgattggtcaaaacaagttgcgtagcggggctcggtggctccagcctgtaatcccagcactttgggaggccgaggcgggcggatcacgaggtcaggagatcgagaccacggtgaaaccccgtctctactaaaaatacaaaaaattagccgggctcggtggcgggcgcctgtaggcccagctactcgggaggctgaggcaggagaatggcgtgaacccgggaggcggagcttgcagtgagccgagatcgcgccactgtactccagcctgggcgacagagcgagactccgtctcaaaaaaacaaaacaaaacaaaacaaaacaaaacaagttgcgctacctactcagattcaaggaaaggcgaaatggactccatgtcttttctttggcttatggggatgggaggaattgttagtggtcatatttggagactagctaccacccttcctcctctccacagctgattgtaccttgagcagcccttgttgagccaatcagattctctcttgagaacctgaaccttaagacaaattatagttggtaggtggagggcactggagatgccataatcagccctgaggagctgcccatagggtgagcaggggaaggtggtctgcagcaggaggccggagaagggaacagcaaagagaggcgaccaggctgcccctgagagtcaagggagtgctacgttggcttccccaactctgggtctggtatctcagcctacttagaatcctatcttgcttgtcaggaagattgcctgctgtgtcctcagcctcctacggtcctaaatgcaattgggaaatggctggcaggttctagcagggaactggcatgatcttttgatctatgcttttaccacttttcttttgagacgaagtcttactttattgcccaggatggaggacagtggcgcgatcttggctcactgcaacctctgcctcctgggttcaagtgattctcccacctccgccctccgagcagctgggattacaggcacatgagaccatgcctggctaatttttgcatttttagtagagacggggtttcaccatgtctggtctggaattcctgacctcaggtgatcctcctgccttcgcctcccaaagtgctgggattacaggtgtgggccaccgggcccggcctatacctgtaatcttaacactttggaaggccaaggcgggtggatcacctgaggtcaggagttcaagaccagccaggccaacatggtgaaaccccgtctcaactaaaagtacacaaattagccaggccaacatggtgaaaacccgtctctactaaaaatacaaaaattagctgggtgtggtgatacatgcctgtaatcccagctactcagggggctgaggcaggagaattgcctgaacccgggaggcagaggttgcagcagtgagccgagatcgtgccactgcactccagcctgagtgacagagtaagactccgtctcaaaaaaaaaaaaaaaaaaaaaaaaaaaaagacttcttgaatgatgcacatgggagactcaaaagtttgaaaaaaaaaaaaaaaaaggctgggtgccgtggtggctcatgcctgtaatcccagcactttgggaggctgaggcaggtggatcacctgaggtcagaagtttgagaccagcctggtcaacatggtgaaaccctgtctctactaaatatatttaaaaaagtagccgggcgtgatgatgcatgcctgtaatcccagatactcaggaggctgaggcaggagaatcacttgaacccaggaggtggaggttgcagtgagccgagatcgcgccattacactccagcctgggtaacaagagcgaaactccgtattaaagaaaaaaaaattgttgaatgagatgtgaggagcaaggtaaagagacgaatgaaagaagaatcccaagttttgggcctgagcatctgcagaatggaggtgccatttactgagactcataagcctgggggaggggtagtttgagggcggagaccaggaattctgctttggatgtgctgattttgagatgatggctgacatgtccaagagtatatatccatcgcctctcagatagtacttcagctcttccaccctagactggagacccctcaagtgcagggactaccaaatccagggcagactgacttttaaccgtttggacacctaaatgctgaaaagatcaaggtgtcttatactacatgtaactcaaaatcaaaacagtattaaacacgaaacccccaaaataacatgttgctgtaatgaaaatggctttactctggattttctgaacgcaaaattctggatgatttaattaaatatgaacttttctctctgctttgcctgtgcttcaactacaccctagtcagactcttgagcccagagctatttgctctgtgaccccacaggatctggagtgaagctgctgtaacaatgtcccatgaatgaataaataaacagaggtgtaagttttcctcccttgaaggttgagctgacaacactctgagaaggcggcaagaaggagacctactcatggccaggagacctgggacacggtcgcccaggcatggttcccacagccccttggtctcctttgactctggtttcctaagacagctttgggactttctggtgagaagctgccattattctcaacgctacagctccctgctgccctctcctgcccgatgacccagtgaccacgagatttagccacgaaaggagtcaaatgtataagtggccaggggaattcagaaaccccagggtctagggactgtggtgacccagtatcagagagggcctagggccgaatgactggaggtttcattaatcccggggtccagggacttaaggactgatcccgattcagtgaccccgggatctgtcgactttgtgaccacaaaatctagcgatccaacaacctcaagaccctgcagctgcgggcccaggttctgaggggagagactcattactgagtgcccaggagtccaggatcaaggggcgtcgtgaaaacgtgcctgcagggtcctaggatcctgagccggtgtccagggactcaccggctgcgaggagccgcgtcttcaccaactgttcacgctcactctccgcggctcggagactcagccgcccttccctgggcactcattggtaagtcctcggaagcgtggaccaatcaaaaccctcctcgtgtctccagtccccgcccagctacggctctcgcgaaccgggggcgggccctccccgcgctgacccagtggcagtgcaagcggagtgccgcgcgggccgactattggctgccgcaagcgggcgctgtcagaaccggattgggccgcggcggggacggaagcggcccctgggcccgaggggctggagccgggccggggcgatgtggagcgcgggccgcggcggggctgcctggccggtgctgttggggctgctgctggcgctgttagtgccgggcggtggtgccgccaagaccggtgcggagctcgtgacctgcgggtcggtgctgaagctgctcaatacgcaccaccgcgtgcggctgcactcgcacgacatcaaatacggatccggtgcgtggggccagcgactgggagagcgcggggaaccggggctcggggttgggagtgtggagacagggtggtcatgggggtctgtgggccgtctggaagccgggcggcgggggctctagagtcgttgggaggtcgaggggccaaagctttgagggtgtcgaggatattgagggtggggacggtcgtcggggaactgcgggcccaaagactgagggggtgtcaggcgggggctgggggtgagcccttggggtcccctgggacatgttctggtcccagggcgagggtccggggttccgcgattgacggagaccctgggtgtgtggggtgtcactcctcaggcagcggccagcaatcggtgaccggcgtagaggcgtcggacgacgccaatagctactggcggatccgcggcggctcggagggcgggtgcccgcgcgggtccccggtgcgctgcgggcaggcggtgaggctcacgcatgtgcttacgggcaagaacctgcacacgcaccacttcccgtcgccgctgtccaacaaccaggtgagcccctcccggagcccccagagagactcctggcctgtgtgaggggccagagacagagccctgggttccaatccgagcctcagcttcttcgtgaaatggaaatttcacttcagagatggttactgagcgccccctcgggggacacagagtaactccgccaggatcctgccctcaggtgctcccggcccggcagggagaacgacgggagagagatccggagagatacgcctggatagctcttcctctggtggcaagtgggacccaggaggggaatccacacagccttgagggtg

SEQ ID NO: 9415 - DNA, 6000 bp, Homo sapiens
tcaaaaatgggggaggggagacaggagatggcatctatgctaatttacagagattaagaaacataacaaaggccgtggttttttttttgtttgtttgtttgtttttttttttttttattgatcattcttgggtgtttctcgcagagggggatttcgcagggtcataggacaatagtggaaggaaggtcagcagataaacaagtgaacaaaggtctctggttttcctaggcagaggaccctgcggccttccgcagtgtttgtgtccctgggtacttgagattagggagtggtgatgacacgagcatgctgccttcaagcatctgtttaacaaagcacatcttgcaccgcccttaatccatttaaccctgagtggacacagcacatgtttcagagagcacagggttgggggtaaggtcacagatcaacaggatcccaaggcagaagaatttttcttagtacagaacaaaatgaaaagtctcccatgtctacttctttctacacagacacggcaaccatccgatttctcaatcttttccctacctttccccctcttctattccacaaaaccgccattgtcatcatggcccgttctcaatgagctgctgggcacacctcccagacagggtggtggccgggcagaggggctcctcacctcccagtaggggtggccgggcagaggcgcccctcacctccaggacggggcggctggccgggcgggggctgacccccacctccctcccggacggggtggctgccggcggagacgctcctcacttcacagacggggtggctgccgggcggaggggctcctcacttctcagacggggcggctgccgggcggaggggctcctcacttctcagacggggcggccgggcagagacgctcctcacctcccagacggggttgcggccgggcagaggcgctcctcacatcccagacggggcggcagggcagaggcgctccccacatctcagacgatgggcagccgggcagagacgctcctcacttcctagatgggatggcggctgggaagaggcgctcctcacttcctagatgggatggcggccgggcagagacgctcctcactttccagactgggcagccaggcagaggggctcctcacgtcccagacgatgggtggccaggcagagacgctcctcacttcccagacggggtggcggctgagcagaggctgcactcccggcactttgggaggccaaggcaggcagctgggaggtggaggttgtagcgagccgagatcacgccactgcactccagcctgggcaacattgagcactgagtgaaccagactccgtctgcaatcccggcacctcgggaggccgaggctggcagatcactcgcggttaggagctggagaccagcccggccaacacagcaaaaccccgtctccaccaaaaaaatacgaaaaccagtcaggcgtggcggcgcgtgcctgcaatcgcgggcactcggcaggctgaggcaggagaatcaggcagagaggttgcagtgagctgagatggcagcagtacagtccagcttcggctcggcatcagagggagacggtggaaagagagggagagggagaccgtggggagagggagagggagagggcaataaaatttatgtatatataaattattattgttgctgagcaaggtggctcatgcctgtaatcccagcactttgggaggccaaggtgggtggatcacctgaggtcaggagttcgagaccagcctggccaacatggtgaaaccccatctctagtaaaaatacaaaaattagccaggcatgatggcaggtacttgggaggctgaggcaggagaatcacttgaacccggggtcggggggtgtcagaggttgcagtgagctgagattgtgccactgcactccagcctgggtgacaagagcgaaactccatctcaaaaaaaaaatattactgttgttggttttttctctcttattattttttaattaaatttaaaaaagttttggtcgggtgcggtggctcacccctgtaatgccagcactttgggaggccaaggcgggtggatcacaaggtcaggagatcgagaccatcctggctgacacggtgaaaccctgtctctactaaaaatacaaaaaattagccgggcgtggtggcgtgaacctgtagtcccagctactcaggaggctgaggcaggaggatagcatgaacccaggaggcggagcttgtagtgagctgagatcgtgccactgcactccagcctgggcgacagagcgagactctctcaaaaaaaaaaaaaaatttttttttgaggcagggtctttgtcacccaggctggagtgcagtggtgcaatcttagctcactgcagcctccatctcctgggctcaagggatcctccctcccaatcccctgagtagctgggactacaggcagacaccaccatgccaagctcatgtttgtttgtttgtttgtttgtttttgagatgcagtcttgctctttcgtccaggctggagtgcagtagtgcgatttcttccaggctggagtgcagtggtgtgattttggctcactgcaagctctgcctcccgggttcaagcgattcccctgcctcagccacctgagtagctgggactacaggcgcccaccgccacacccagctaatttttgtatttttagtagagacggggtttcaccatgttggccaggctgtctccaactcctgaccttaagtgatccgccagcctcggcctcctaaagtgctgggattacaggcgtgaacctcttcggccagcctcccagcttatttttgtattttctgtagacacgaggctttgccctgttgcccaagctggtctccaactcctgagctcaagtgatcctcatgcctcagcctcccaacgtgctgggactacaggcatgagccactgtacccagactattgttttttactaaaggagacttactagaaaactgacaaaatccaggctgggcgtggtggtttacgcctgtaatctcagcactttgggaggccagggtgggtggatcacctgaggtcaagagtttgagaccaacctgaccaacatggtgaaaccctgtctctactaaaaatacaaaaattagccgggtttggtggcgcacgcctgtaatcccagctactcgggaggctgaggtaggagaaccacctgaacctgggaggcagaggttgcagtgagctgagatcgtgccattgcactccagcctgggcaacaagagcgaaactcggtcttggaaaacaaacaaacaaaaaaacctgacaaaatatcaaagataattataacccttaggggtcccagatttctcttcctcaggaaatggcaagggggtgcgggagaggggccatccgctttggctggcttagtttcctttccacaaccctttctggagaaacactaaatgccaccattttttggtccttggcctggaaatttccctatctgcaccccctgcgctgtagcttaggctattcagcagagatctgcaggctccagcgggcgtcggacttacagaggcaaatgtgaccatgtaaattcccaggcccacccgtgacagagagcctctgattcagcaggcctcctttgaggctggggattttaaacccgcgtcctgtgattgggatggggattgagggctatattcagcgcctggccaccagagggcgcagcgggctgggttcagcggtacccctttgagatcttgtgtctcaagacaggttgctgtcatcaaggatttgctggttagacaacaggcaaggggtgagctgggtcctcttgggcaggagcctagtaggaagaccgacaacaggaaagaggctcacatctgatactgggcacatggctgggccttggtcctcgtgctcccggacttcagagctcagaggggccagggcctggcctagcctggaatctggatggacctcttctgccctggggcgcgccgtttacccaatcctgacctcagagagcgtctgtcgttctggtgggaaaaccgagacccagacaggaacaagggctcagtggcaaccgctctgcctcccagcccagggctctgtcttgccggggctggggcacagggtggaccccaggaagttctgctatgagtcagcttcgagtgctcaggggaccggacagaggctgctggccggggaaggatgccggccggcggtacctacttccgcagctgtgggtatccctgcctggtgattcagcttccctctgagggtccccagggggcgccgccctggactgggaggctggggaggatgctggggctacggaggggcgatggaggtgccttaagggaccccgtaatccagctctgctggatgctgaggtcccacgagataattgtggccagagatcaggtgggcgtaagactggtcctaggatgggggctgtgggcccctcctcactaccctgcttcttgaagatagcctgggcggctgtgcgggataccccagtgtctccagcaatgcgcgttcatctccatggagggctcgccttggcgctgggtggggagcgacttggtcccccctggcggcgaagagaggctgaccacgccagctcgtgggggggtctactgggcagatgcgcaggccccgggcggaggagggctgatgggggaaatgccaggccgatgggggaggggctgtgagcgggaggcgttggggcggggcaagaccgccctcccggtccgggggcggggcttggcctggggcggggcttggctggggtgctcagcccaattttccgtgtagggagcgggcggcggcgggggaggcagaggcggaggcggagtcaagagcgcaccgccgcgcccgccgtgccgggcctgagctggagccgggcgtgagtcgcagcaggagccgcagccggagtcacagccgcagccagagccgcagccaaagcctcagagagcaggagttggagcgcaggccctgctggatccgcgcctagctcgccgccaggcaccggccggaggacgggccgtggtgtcagctcactgcccgggcgctgtgggaggcagcgagcccgcgaccccccgggccgggcaccgccaggcgcggagcccagatcgcccccctgccaggcctggtcacggccagagcacgcaggagttcccagggtctggatctgcgcgcaccctaatgacctggggactgaagagaaaaaaggaacgaggatttcatctaaaagcataacgtgggcactaggcgaggaggaaagtggagaccacctggcacggggcagaggtgcctggagcccacgcttgagcatcggagaccctggcatcctagcagccgcgaccttggctctgccctgtctgagctggaaacacagcttagcttctagacatcgctggcacaggcctggcacaagtaagcagtgtcctcacctgtctgaaacgggacacggggtcggaggaaccaggatctagcctggccccaagcggaactctctggtggcccagaggtcgtcactggggagcccgcctcctgccctagcctcactggtgcggatgtgccgctgcccgccggagcaccatgatggcaggatgacctcagccgaagtaggagcagcagctggtggtgctcaggcggctgggccccccgagtggccccctggcagccctcaggccctccggcagcctggccgggcccgagtggccatggcagcactggtgtggctgctggcgggagccagcatgtcaagcctcaacaagtggatcttcacagtgcacggctttgggcggcccctgctgctgtcggccctgcacatgctggtggcagccctggcatgccaccggggggcacggcgccccatgccaggcggcactcgctgccgagtcctactgctcagtctcacctttggcacgtccatggcctgcggcaacgtgggcctaagggctgtgcccctggacctggcacaactggttactaccaccacacctctgttcaccctggccctgtcggcgctgct

SEQ ID NO: 9416 - DNA, 6000 bp, Homo sapiens
aattttctagaattttatataattctatatacattatgcgtatgtgtgtgtgtattgctttggcgagctcttttattaggaatgttcatcttttgtctgttatatgtgtggcaaacacttccttccagtctgttggtagggtttcaaccttatttatggggtgttttggcatcagaagggttcggtgttttgcacttcagcctatggatttttttctttttcttttttttttttttgagatggagtcttgctctttcacccaggctggaatgcagtggtgcaatctcagctcactgcaacctccacctcccgggttcaagcgattctcctgcctcagctcccccgagtagctgggattacgggcacctgccactacgcccggctaatttttgtatttttagtagagatggggtttcaccatgttggccaggctggtcttgaactcctgacctcaggtgatccacccacctcagctcccagagtgctaggattacaggcgtgagccaccacaattggcccagtctatggatttttaaaaaataacttgggcttgtcttccttgctgaagaaggctgttttccagcctgtcacacagcagttaggctgtagaccctcactggagcccctgccctgcagaatcgagcacatgttctttctgggtctgtgtggggtgtgggtgtggtcaggacaccgtctgtgaccttatttactggggacgtcccctgcttgaggagaatatccaggcaaggtctcctcactctccttagccaccatccagcttggccaagaggcctccccatgattcctcccacgccagggcctcgcctttgtttttcactgttaggggctggcgagtcactgacccgcccccctccctgctgcccaaaccacttctgtttcctgaaggcgccttgggaatgctgagtcgcgatttcctcatcccctcgtgcagctgcatttctgctgcgtcatgtttgggaggggggactcgcggaaacaaagggaaggcggattttgctagattttgctgagtcaccagtgcctcctcagcttctctttaggtgggaggtgaaagggcagctttaatggtaggcaggaggaagtgaaacttctagaaaacggcagaagcctcttgtttgtcttttctaagtctgtgcctttcccctgctgggtcccccagctcccaccctgtgaagtccacctcaatctgcccctgatttaatgttgcaatccaccgaggccttcttatgcttcacatctctctgacttctgcatctgcctcatctcttctgcctccagcaggagaaagttctctactttttttgcctggataattattgtatttttagtagagatgggggtttcaccatgttggtcaggctggtcttgaactcctgacctcaggtgatcagcccacctcagcctcccaaagtgctgggattataggtatgagccaccgtgcccagcctcatcctccatcttcaaagctagcagcatggcatctcccagtctctctctctgtcctctgctttctttgtcaccttctgtatgtgcaaccatccagcctccctcttataaggcccaagaggataatccaagataattccccatctcaacatccttgacttaatcacttctgcaagatccttttgctatgtaaggtagcaaaaaggtaacctattcacaggttctggtgattagaatgtggacacctttaaggggcttttatttggcccagcaggaggagagagaatagcatttggatcatcctgttgcttgactaaaaagaaggggaagtcaggaggctgaatcagcatgcgaaagggccacaaattcagccctgggacagcctagaggaccagaacaactctggcctggcctcttgcaccccagcaacccactgtgtggggggctgttctaacgaagtctggggctcccagagaacagttagaaaagaaagcaagcccagaccggcagccaggaaccctgggtcactggaggttctctttccaatggggggcatagcctggccaagtccctcctgctcttggggtccctgcttccctgtgttaaataaaaagggttcagatctcatgagttttaccctctagggtcgctgaatggacagactctggatctatacacgcaaactcatctcccctaaactcctggaccctctgtgagaagggttggagtgtggtggtcaggactgtggggactggcttcaaagtgctgtagtttgaatcctggctcttccatcattaactgtatgacttgggaaaatgacttatcctctttgtccctcagtgctcatgtgggcaaaatagagatgaaaatagcttgcaaggctgttgtcaggatgggctgcaatcacgcgcgtgaagtctctgcacatagtaaattctcaataaaggctggttagaatgacagtttggaattgtggcttggttccagcccattctatcagcccagcaatattacagcctaacaatattattattttttcccagaaagagaccttgaagcatctattcattcaggcatgcattcagtattaactgtgacctaccaggcactattccaggaactgggaatttacaaagcaaagtagtaggcaaggtctccacctttgtgctttacatgccactgttggggctcagaaagtgataccaggacaactggtgctttgacatgatgagaggccttaggagctgcctcagagtcaaggtccctgtaagcttgtcttgttcccccgacaagcacagggagagacgctctctggaatttccttatctgaccaagaacacttctttacaaaagaaatgcaattgtgttaagtctttttttcctttgagacagagtctcgctcttgtcacccaggctggagtgcagtggcactatcttggctcactgcaacctcctcctcctcccgggttcaagcgattctcctgcctcagcctcccaaagtgctgggattacaggtgtgagccaccgcgcccggccagtgttaagccctttttctagtaatctcatcaaatatccaggaaagatcaaccactggagagagaaagagactgggagtcatcaccagacccagacagatttacctgttcttctgaggacagtgccaagagattacctgggggactttatctgcctaggacaacctttgtccctgtgcggctccacctccaccttcccttaaagtcggcctttcacctccagggccattccttcttgctaatgatttactgtctttcaaaagaattgtctgcattccctatctcccttctcccctataaaaaaggctgggtagcctctgtactccactgggttacagggtcaccattcttccgtgattaccccattacaatacatttttgtatgtcttttctcctcttaacctgacttttgtcggttggttttcggggaaccttcagaggaagaaggggaatttttttcaaggccccttagctcacccttgggaggatgatcctttccaatacaatctcagaagtgcctctgggctgtagtggccctaggctgaattccaggaagttttttttttttttttttgtttttttttttttttgagggacagcgtcttgttctgttgcccaggttagaatacagtagcgtggtcacagctcactccagcctctacatcccaggctcaagtgaacctccagcctcagcctcccaagtagctgggaccacaggcatgtgccaccatgcccagctaatttattttatattttgtagagacagggtctccctatgttgcccaggccagtctcgaactcaaagcaatcttcccacctcgactgggctcaaagcgctcttcccacctcaacctcccaaagtactgggactacaggtgtgagctaccatgccaggcctgaaagccatcttaaaaaaaaaatcttagaatgagaatcacagtattgggaaaggactgtatgaatcatctggtccattcgttttgtcctctgggttcacccagtgaccctatttcccccgagttctaaggagtccacctcatgcagaattgattcaataggcgatcagcaagggccagctctgctctgggccctgagcaggcactgagtataagtcagacctgaatgtgcctggaagagtgtcccacgcattccagcagggaagcagtttgtatgacaggtgtcccagtccaggcggataccaggtgctgccagagtgtggaggaggcaggcggggacttagtctcctccctgggtttggacactggcatcctgctttatgtgtgacaccactgcacccctctgagcctcggtttccccatctgtaaaatagaagcgatctaccctcacaggtcagttgtagggatgaaccatgaaaatactagagtctctgttttttgacaggaactcaaaaaacagatcctaaatgtacatttaaagagggtgtgaggaggcaagcagtcagcagaggattccagcaggtgacattttagggagctggagacagcagagcctggggttgctaagttcctgatgttgcccaccaggctattgctctgagcagcgctgcctcccagctttctggaaccttctgggacgcctggggtgcatcaagtcccaaggggacagggagcagaagggggggctctggaaggagcaaaatcacacccagagcctgcagcttctcagatttccttaaaggttttgtgtgtgtgtgtgtgtgtgtgtgtgtgtgtatgtgtgtgtgtgtgtgtgtgtgtgtgtgttttctctaaaagtcctatggccagactttgtttcccaagggtcatatgactgctcctctccaccccacactggcccggggcgggctgggcgcgggcccctgcgggtgttgcaacgcccggccagaaagtgggcatcagctgttccgcctggcccacgtgacccgccgagcataaatgtgaccggccgcggctccggcagtcaacgcctgcctcctctcgagcgtcctcagcgcagccgccgcccgcggagccagcacgaacgagcccagcaccggccggatggagcgtccgcaacccgacaggcaagcgcggggcgcgggacgcgggacgggcgcctttctctcccaaccctgcttgcgtcctagccccaccccgggacactgccacacagcgacagagcccaggagccagaaacttgggctctggagtcaggaggtgcggggttctgatcctgcctgtgcccgtagggtagttggagggaggaacggtaatttacatgcctggcaccctggtatgcggttggtgaccaagatgggagtgtccctagagtatccagtctttgaggtagccaattttttttttaatcctactttcgaggtgtgtttggagttgctctctgctgaatctagatctctggggctctgccagcctgggggagcatgcttggttctcttggtggcatctgtccctcactagctacggaggacctgagccagacatcaccctggctgcggtgttccatgtctcacagatagcccagttcagggaggcgacatgcccaagagtgctcagttagctggtgtcagaactgggccttgaaccttggtctgcccacctccaggtctcactcattcccttctttcaataatttgttagtatttttttttttaactcctgggcttaagcatcctcccacctcagcctccagagtagctgggacttacagacatgtgccatttctcctgagactttgaccagctgtgttgtagaacagggaagcagggcaggagaaaagggaaaaatgacaattctgtggggaggcagggatacggacccatgacagaaatactcccagaaagactttttctttgactaaagcagactttctcaggctttttaaccctgacgccttcatgatgagcataacatgatagggggtcatgagatttgcatctggaactttaacaaaataactgaattaaatattgggtctaaaagccaatcaaagcaattac

SEQ ID NO: 9417 - DNA, 6000 bp, Homo sapiens
gtccgagcccagggcaaggtaaataggagaggagatgagcatttcatgctgcctgaaagtcagggaggtcttaaagaacgatggggatcattgaaaaggacacaggagcccatttgaaggagctgtcactggccaaagttggcatgatttgagcattaaaataaatcatggtaggtactgactgtaagccatttaataaaatagaaatccgtgagtccacactgattatataagttaacaaagaacacaagaaggaaaacaaactcttccttaggtagaatgccaactattaaatacaaaaggaatggtgacattttatttatttatttatttaacaatagcaacttttattttagactcagggggtgtacgtgcccctttgttatctcataatactttagcattttagaatagttttttctaattctgtgaaaaatgataattcatatcccaaaccacatggtaagtgtagtacccgggtagttagttcttcaatccttgcctctctgcctcacccctctaagtagttccctgtgtctattgttgccatctttatgcccattagcacccaatgtttagctcccacttataagtgaaaatatacagtatttggttttctgttcctgcattaatttgcttaggataatggcttccagctgcatctatgctgctgcaaaggacatatttcattctttttatggctgtgtagtattccgtgggtgtatatataccgcatttcctttatccagtccactgttaacgggcaaccaggttgattccatgtctttgctattgtgaatagtgccgcaatgaacatacgagcacaggtgtctttttggatatatactcagtaatgggattgctgggtcaaatggttgttctgctttaagttttttaagaaatctccaaactgctttccacaatggctgaactaatttacattcctatcaatagcatataagcatttgcttttctctgctgcctcaccagcgtctattgttttatgactttttaataatagtcattccaactgatgtgagatagcatctcattgtggttttgatttgcatctctctgatgattagtgatattgagcatttttcatatctgttggctgcttgtatgtcttctttggagaagtgtctgttcatttcttttgcccactttttattggggttattttattttattttattttttgcttgctgaattgcctaagttctgtacagattctgaatattagacccttgctgcatgcagtgtgcgaatattttctcccattctgtaggttgtctgtttactctgttgatagtgtcctttgctgtgcagaagctttttagtttacttaggacccacttgtcaatttttgtttatattgcaattgcttttaagaacttagtcataaatttttccccaagaatgatgtctagagtggtgcttcctaggttttcttctaggattcttataatttgaggtcctacatttaaacttttaatccatcttgagttaatttttgtatatggtgaaaggtaagggtccagtttcattcttttgtgtatggctggccagctatcgtatcaccatttattgaatagggagtgcttcccccattgcttatttctgtcagctttgttgaagatcagatggctgcgggtattcagctttatttctgtgttccattggtctatgtgtctgtttttataccagtgctatgctgcttcgattattgtagccttagtatagttttaatttgtgtaatgtgatgcctcaggctttgttcttttggctcaggattgttttggctattcgagcttttttttggttccatatgaattttagaatagttttttctaattctgtgaaaaatgacagtggtagtttgacaggaatagcattgagtttgtggaatgctttgggtgtatggccattgtaatgatactgattcttccaatccatgagcatggaatgtttttccaattgtttgtgtcatctatgatgtcttttaccagtgctttgtggttctccttgtagagatcttttatgaccttgcttagctgcattcctaagtattttatttgtgtgtgtgtgtgtgtgactattgcaaatgggattgcattcttgatttggctctcagcttgaactttattggtgcacagaaatactactgatttgtgcacattgattttgtttccaactttatagaagttgttcatcagttcccggggacttttggtggagtctttagggttttctaggtataaaatcatatcatcaaggaagagagaaagtttgacttcttcttttcctatttggatgtcttttatttctttctcttgttagattgctctggctaggacttctgaatgacagaatttttaaaagtcaccatttggcaatgatcatcatgataatgtttaattaaattaaggaacatcattgcatactgaaattatacaagtgtgggagtgggatgagaaagcttaaaagtatctccctaccaaatgcttataaattacgatgtggaaggggaagtaactttacaatagagaaacttgattggtgtcaagttaatcaaatgatcagagcgaacgacattagtgatgggacagattgacaatgaaagctaataggactcaccaagaataatccagcatcacttctgtgctattttggccaaaaaagcataacccagttctaatcatcagacagagccaaatcgagggacattattcaaaacaaccaacctgcagtcttcgagatgtcgaggaaaaaacaaggcatctgtttcaaactggaggcccgaaagacatggcaactaagagccatgcatttagagagaatgcaaagtcccggatggattttcttgttacaaaaccattattgagaagcttagcgaaactcaaagggggtttccacatgaagggtatgtgagagttctttgtatcattcctttaacgctctgtattttgaaatagtttcagaataaaaatggaaatggaaaaaaatgcaatgttaacatatacgagttactactttcaacaagttatcttccttttcatgcctcaatttcttcatctgtaaggtgaagacagtaacagctacataaaggttattgggaagagatggagaagcccccagccgaaggtctgctcacagcgtaaatgctcaagccctggtcattatgagtactacgttcttgccaacattttcttgggtttcttagtctctaaaagatcgtcaattgcaagacacggtattttacataccactgaaggaaaaaacaaacaaacaaacgaaaacattcaatgaattcctgacggtgtgattcttctcgcttagaacttttaatacttattgagagaactctgttagactcattcaaatgtagatttttatcccctgctgctctatgatgacttttaaaaggaaagggtcagtcaagtgaattggctgaggtgttcctaaagctccttcacattttgggtctggtgtccggagtgattttgactcagagtctcgggttcttcgtttctccaccagacagcatcctctgtgctcctgagggcatccaggcccgcagcctcccagtcccacagaggacctcagcaaagacaggcagagtggggacacctgggagaaaagagagcccgggacgtcactttaattccatcctctccagccctggagaagcccctgcagggtttttccatgccaggcagggacctcacactgaccggagtgcctgagagaaccacacatgccttcctctaccctgggctttctctgctagggtgaggccctgccagctcttcctggccaaccctgcccttcctggtaggaggaaagcaaagaacaacaatcaggccagaattccagtggcttcgaggcaggttcctgcccctccatttcctccattcccctcattcttgccctccattcccctcattcctgcctgctgccctttctcctgggaggcagccccatgtaggagaaatatgactgcgttttgttgtgtcttggcactgtgattcatcttgtctttattcaaacttttcatatttggttcaccgtgaatagtttctgcatcagttgggatttttttaaaccatattgcattaaaatattacttacaacaattactgaatttttaaatgcctgtttaaattttgagcacgagagactgcctcactcacctgaccttaattctgctggccctgctgtgctcagggagccactcattcattcattcattcattcattcattcattcattcatctattcatttgcacacagtcaaaggtgcaatttctcctctgtaccaggccatgtgctaggtatttgggagggaagtgcaagccggacacaagccagcactgaagatagtgtcagaagaaagacagccatgaacacacatgaccatatgacacatggtggggtggggcggcagggcaaagaggacatcggggaaatcaacatgccaccagctaccacttgtagggggttctcctgtggccagctctgagctaaggtcttcctgcacagaatctcactggattccctcaacagtccttccaggtttgtagatgcttctgcaaaagtaacagacagatggatgtcccgaggcttggggaagtaacacgcagatgatttgcacaaggacacgctttaagaagcagtggacttggaagtccaacacagatctgtctggctctgggctcaaaccagctatggttattgcagccacttccacctgcatccccatcaagcagtcagggaaggctgcatggaggaggccctgcgtcagctgaggcttgaaggaggcctaggagtttataggaaggtaaattggagtaggaggctttctggaagtaagaaaagtcacgtgcactattagcaaagtaggcctgggccggcactgcttcctctttctgcttctctgtttcctgatgacatcaacataaataggaaacgtgggaggctcactctgcctagaggctccagaagaagactggtctctcccaccacacagaggtatggcccggcgtccaggagcagggctgaggggtggggtcagagcaggggggaatgtggggagtccaggatgaaaaaggacagggggagcctggggggcgtcctgtgggtagctgtgccctggggacttggaggagttagggcttggcctcttaggatgacctgagcccagactcctagggcggccagtggatggggaggcagccaggggtgccaagctgcttgggtgttgtaggagagctctggggaggactcagcctcgctagcgggatctggttggtcctggtgggaaggacgcctagtggggtgaagagagctcaggcctgggagtcaggcacctatagtctgtcttcgctttgtcactaagatgctggtggtagtgagagcaccccctgtccaccctgggcttctgtctcctcatctgtggaatggggagcatggatagtccctgacatcttggtttagaaagagagagaacgcatgctcgtgtgtttgcccgtgtgtgcatttgtgtgtgtgcctgtgtgtgtatgtgcatgtgcggatgtctggggatgcaggagtgcagagagactaagaggcagagggtgaaacctggaagcttgctgcgctgaggcccagagctgggtgcggtgtggcttgagaagctcactttgaacttgagaaagagcccagcactttgcccagagacataccaggcactatccagcaatctctctctctctctctctctctctcagtctctctctctgtctgtctgtctttttagttatgacactctgccctgctgatttgggttgctgatttgggttggggcccaggtgtgtgtgttctgtacccaagtatgctggctgggtgggtgggtatctggggtgcctgcttcagggtgtgtgcaggtgtgtgtactggccctgagaatgaaagggcaggtgtttcactgggaccttgtcagacaggtgctagcgacaa

SEQ ID NO: 9418 - DNA, 6000 bp, Homo sapiens; identical to SEQ ID NO: 2982

SEQ ID NO: 9419 - DNA, 6000 bp, Homo sapiens
tgcccgtggtcagctggccctggaccgtgagtgcctgggacccggctcctcggcctggtcttgtatgggcggcactcagcacagcacctgggacaggggccacttcacaccttgccaaggtacggagggagggccaagcgagtggatgatcctgcacggtgtggcccacgttgatgtgtccttggggtgagggtgccatccagggctgccagctctcacctgggccaggccatcctctgctagcttcagtgtctgtgacttgaaaggtgtaccctctcaggtgccctgctggctggaaacaggactgtggagctcaggttaggagcgggggtggctgagcctttactgcccagcaagaccttttcgcacccctggggccatgagactgggaagcccgctagccctggggctgtggcttctcctgctttacttgttattatttttctgataatatctttaattgcaagattttgtgtacttttaggcatgtttcttgtaagtagcatatggttggatttgaccttggattgtgtttgctattgattatacccacaccagttcttatgttcctcatttgtaaaatgggtcaataaacttgacaccccctccaagagaatttgctggattgaagggcccagcctctggcctggcctgctggccctggacctacctacatctcgttgtctctggtgagcccagcatcacggggcagggacgagccctgccggccagggcaaagagtggagccgagggggctgaggaagcactaggcacactcaggaggccagtcctgaaggctctgcccacactgggcctcagtttcccccacagcatgtagctagctaggcctggagctgcttcagtctgggtccagtgacctctcaccatggcaggtgtccttgcctgttattgacctggtctgcctaccctgcccctgcagccaagatcaacaaggagcaggggccagggccagggcatcaggggctggtactcacttccctaggagactcaggacccctcaagggcagactgcccccaccagaagctgctgccaatctcctgccgcagcacctggagccctggaagggcacaggaaacaccatgggaattctggctgcccctgcacgtgtctgtgggcctgaggatggatggcgggtgggtgtacatgtgagaagcaagcgaggatcgggggacagatgggtggggggcggggggagtgagtcagtggtggagggccaggagtggggagcaggcgtgggaggggtgccctgaccctctgtggtgtggggatgacataggcccgccacccccgcctggagctatttctggccttggtgcactgagctgtggcctcctgttctgcctcataactgtggtctgtgacgtgaccgcctgacggggacatggctggtgtccgagaggatcctgagctgactgatgtcccggctgtgctacagctggtcccacccccagccccagccctctgcagcctcttaccccagccctgggaagcagcagctcagagcctccctggagattcccctcccggccacccatgacacaggagggcgctgcctgcccctctgcacgtggcctgcagcccagcccctccacaccctcccccattactagccaggccgccagccttcctgcttgggcaggacatgcctcgtggcccctccgggcagcactgtgagtgtctcccttggccgcctctccacctgggtagtctggagtgggagcagggcagggcttaaccactcactgcctcagtttcctaatctgtaaatgtattgctgtctcactttttatagcaggtgatgggaccctccggtgatcccagcccaggggcggcattggggcccgagggcaccaagctgtgcgtggatgaaagccggtgctcggcgcctccacagctgcctgccctgtgctgcctcctggcatcgctgggcagaggcaaaggcatccctgtggaacttcagcccaagcttgggagggcacggaggtgggcggggccccaggaacagtgggggccagggaccacatgaagaaggccatccctgctcggctcggctcagctccctgggctgctggggtgagctgctgacctcagcagccgcctgcctgcccaatggctgggcatatccccagagcctcccaccgccacctccccatcccccttctccacccctcccctctgctcctgccctcctcgctctcctcccacctcctcctccccccgccacactccctcctgcagtgaacgtgaacagccctccactcaccagaactgatggtgcaggtgcccacctgggctgcctgttgctcccgtcagggggatgcgtcctggactgtttgctgcccagcctcctgggccttcagcctggtgatcctgggtcctaccctgcccagtctggctgccgcagggagaggctctgggtcagtatccggtcactgtccccgctgggaaagctcagagccttccaggcaggagagccagccctcccctgactgtggctcctgagccaggcctgggctgagacaggagctcctagctatgacccagccctgacagccagcagggccatcctccggggaggtcccaggaggagaccctggaggaaagaagagatgttaattggcctgggagggtgggagaggcacagatgtaccagtttgtgtgcagcttggaggctgaggagagccctctggggccctcgcaggctcaggtggccgcagggccaacctgggtggggacggtggacaggcacgctatccatggtttctctgtgagagctggggccatggcagggctggttgctcaccccgtgtgcaaggggcaggaaggacagagctcatactggaggctccgtgagaactggggccagggtgagactgggtgagagtggaaagtggggtgatggcaggcagggaggccatgctatctccagaaggacagtagagcatcctattagagttggccaggcagatagaggagagagaaaggtgggcgagagggccagagaggccttgtggccttgaggctgcagagcccaggggacaggtcaggggccacgggccagggaggtcttttggggtggggaggggctgcagtccaccatggggccagggaggaggctggtgagtcaccagtctggcccctgggatggggtcagaggacaccctccccccacctggctgcgtctccctcatcccagggccccggctgtgaagacaaacccatgctgcaaagttgggtttgattatctcataaaaagatgccccctcctgctcgctcagcagaggggttgccatggagaccagcgggcaggccccaaggggggccaggctggagccaattaccatggctgcagcgaggagagagcccacctcacccgactctcagaagttggtttacgaaaagcagttgtctcggcaggaaccgagccgtgtctttgcgcccaatacccacttcctggcagaactgagcgccacgtggccactcccccatgtcctcccctgtctcccccgaccccgcaccaccgtgtggctcagttctggcacctcactgggggcatgtttagagtggacacacagctgcttcgggagggagatccatgagcacagggctcggttcaaggcgagtgagctgagccctgaccacagccagactcacagcccacagcttcgggcctggagccacaggacagtggtgggatggtggcatggctcagtggtaatgtggcgggcgtggccaccatgggtggctagtcttggtgggtgcagtcagccgcatggtatggttggtgacaaggctcagttggtgacccccacagtcagtggtgtggtgtggtcgataatgtggcagtgagtcctgaccctgccccatgagcatgtggggcctccaccccacctggccccaggacaggaagtgccatttacatagcacagttttccctctggtgacagcaggtgagacagcagtggggagctgacatggtcaggccccaccttcctaggaagagtgtgtagaaagagagcagagagggtgtccgcagtttaaacagaacacgaggccaggtgctttcctcacccagcccacccagggaggggcctccggacccccatccctgggctgccatctccctggtagccaacaaatggccctggggcagggggtttggcagaggaggcccccaggctgtggggagggggtctgaggacctatgaacctgagtctgggaggacgcacatgcccagcggtcactgcgcgtgctgggcttgctgggctctgcgtttagggcgactgcactgtctgcccaagtagagaggacccagtggggcaggggccccatgtgggtaggagggccccagggtcacagttctaggttggggaagctggcctgtggtccactccttcctcctgcccggctccaaccccagcacttagccggcctcatgtctgcagaatcctgctcttagccagctgccgtggaaggtgttagctgtcaacgcaggtgttagctgataactcaagtgttagctgataagccataaccttcccagggggattcacattttaatagactcactgctgaaggcagaaagaatcttcagcattccaaaggggtgggggctcaatggtggaatgagaggcaggaaagcttactccggagtgggtgaccccgctggtgagaccagctctggatgcggcaccccgggagggactactgcccatgtagggccttggtgaagccccaggtgtatctggccctgtaatggaggaggggttgcaggcacctggggctgggggagaacccactgggaggctatccctgctgatggcgtctgggtgggaggggtgcaggcagctggcactgcaggggttggctggggaggagtgaactcctcccagggaggagatggagcagagaatgaggccagggggcggaggcttcaggagggttcctgccaagtcaggaagtgcttgaaaggaggatgtgtggaggagggagcaggctgcctgggtggttgtgggacgcgactcctcctaagccctggacacacttgccctccacccccgccctcgggcatccaggcgcccgtttttgagatagacgtgcccagagggaccccagccccattgcagtgtttcctaggccctgtgggtggaacccccactgggaccccccggggactcctgcaatgcgggctctgtgttcactggagtcctgaggaggtacctgcagtcaccagtgtccattccaggaggccttcaagtgagtgcccctggtgacccagtgggctgctcctgggtgtggtatggggagtctgcagatgtggcttccagggtggagtgcatggctccaaggcatgttctagcccagcatcgtccatgaggcctgtgaagcagggatcccaacactgcgattcccgggggtggtggccacatcttggacccagccccaggtcctcctgagacccaatctccggggcccacctggctctagcaaaacctccagcttctccagtacccctgcccttcctgctaaccactctgtcttctgcccacagggagccggctgctggcatgggtgctgtggctgcaggcctggcaggtggcagccccatgcccaggtgcctgcgtatgctacaatgagcccaaggtgacgacaagctgcccccagcagggcctgcaggctgtgcccgtgggcatccctgctgccagccagcgcatcttcctgcacggcaaccgcatctcgcatgtgccagctgccagcttccgtgcctgccgcaacctcaccatcctgtggctgcactcgaatgtgctggcccgaattgatgcggctgccttcactggcctggccctcctggagcagctggacctcagcgataatgcacagctccggtctgtggaccctgccacattccacggcctgggccgcctacacacgctgcacctggaccgctgcggcctgcaggagctgggcccggggctgt

SEQ ID NO: 9420 - DNA, 6000 bp, Homo sapiens
cctcccagacagggtggtggccgggcagaggggctcctcacctcccagtaggggtggccgggcagaggcgcccctcacctccaggacggggcggctggccgggcgggggctgacccccacctccctcccggacggggtggctgccggcggagacgctcctcacttcacagacggggtggctgccgggcggaggggctcctcacttctcagacggggcggctgccgggcggaggggctcctcacttctcagacggggcggccgggcagagacgctcctcacctcccagacggggttgcggccgggcagaggcgctcctcacatcccagacggggcggcagggcagaggcgctccccacatctcagacgatgggcagccgggcagagacgctcctcacttcctagatgggatggcggctgggaagaggcgctcctcacttcctagatgggatggcggccgggcagagacgctcctcactttccagactgggcagccaggcagaggggctcctcacgtcccagacgatgggtggccaggcagagacgctcctcacttcccagacggggtggcggctgagcagaggctgcactcccggcactttgggaggccaaggcaggcagctgggaggtggaggttgtagcgagccgagatcacgccactgcactccagcctgggcaacattgagcactgagtgaaccagactccgtctgcaatcccggcacctcgggaggccgaggctggcagatcactcgcggttaggagctggagaccagcccggccaacacagcaaaaccccgtctccaccaaaaaaatacgaaaaccagtcaggcgtggcggcgcgtgcctgcaatcgcgggcactcggcaggctgaggcaggagaatcaggcagagaggttgcagtgagctgagatggcagcagtacagtccagcttcggctcggcatcagagggagacggtggaaagagagggagagggagaccgtggggagagggagagggagagggcaataaaatttatgtatatataaattattattgttgctgagcaaggtggctcatgcctgtaatcccagcactttgggaggccaaggtgggtggatcacctgaggtcaggagttcgagaccagcctggccaacatggtgaaaccccatctctagtaaaaatacaaaaattagccaggcatgatggcaggtacttgggaggctgaggcaggagaatcacttgaacccggggtcggggggtgtcagaggttgcagtgagctgagattgtgccactgcactccagcctgggtgacaagagcgaaactccatctcaaaaaaaaaatattactgttgttggttttttctctcttattattttttaattaaatttaaaaaagttttggtcgggtgcggtggctcacccctgtaatgccagcactttgggaggccaaggcgggtggatcacaaggtcaggagatcgagaccatcctggctgacacggtgaaaccctgtctctactaaaaatacaaaaaattagccgggcgtggtggcgtgaacctgtagtcccagctactcaggaggctgaggcaggaggatagcatgaacccaggaggcggagcttgtagtgagctgagatcgtgccactgcactccagcctgggcgacagagcgagactctctcaaaaaaaaaaaaaaatttttttttgaggcagggtctttgtcacccaggctggagtgcagtggtgcaatcttagctcactgcagcctccatctcctgggctcaagggatcctccctcccaatcccctgagtagctgggactacaggcagacaccaccatgccaagctcatgtttgtttgtttgtttgtttgtttttgagatgcagtcttgctctttcgtccaggctggagtgcagtagtgcgatttcttccaggctggagtgcagtggtgtgattttggctcactgcaagctctgcctcccgggttcaagcgattcccctgcctcagccacctgagtagctgggactacaggcgcccaccgccacacccagctaatttttgtatttttagtagagacggggtttcaccatgttggccaggctgtctccaactcctgaccttaagtgatccgccagcctcggcctcctaaagtgctgggattacaggcgtgaacctcttcggccagcctcccagcttatttttgtattttctgtagacacgaggctttgccctgttgcccaagctggtctccaactcctgagctcaagtgatcctcatgcctcagcctcccaacgtgctgggactacaggcatgagccactgtacccagactattgttttttactaaaggagacttactagaaaactgacaaaatccaggctgggcgtggtggtttacgcctgtaatctcagcactttgggaggccagggtgggtggatcacctgaggtcaagagtttgagaccaacctgaccaacatggtgaaaccctgtctctactaaaaatacaaaaattagccgggtttggtggcgcacgcctgtaatcccagctactcgggaggctgaggtaggagaaccacctgaacctgggaggcagaggttgcagtgagctgagatcgtgccattgcactccagcctgggcaacaagagcgaaactcggtcttggaaaacaaacaaacaaaaaaacctgacaaaatatcaaagataattataacccttaggggtcccagatttctcttcctcaggaaatggcaagggggtgcgggagaggggccatccgctttggctggcttagtttcctttccacaaccctttctggagaaacactaaatgccaccattttttggtccttggcctggaaatttccctatctgcaccccctgcgctgtagcttaggctattcagcagagatctgcaggctccagcgggcgtcggacttacagaggcaaatgtgaccatgtaaattcccaggcccacccgtgacagagagcctctgattcagcaggcctcctttgaggctggggattttaaacccgcgtcctgtgattgggatggggattgagggctatattcagcgcctggccaccagagggcgcagcgggctgggttcagcggtacccctttgagatcttgtgtctcaagacaggttgctgtcatcaaggatttgctggttagacaacaggcaaggggtgagctgggtcctcttgggcaggagcctagtaggaagaccgacaacaggaaagaggctcacatctgatactgggcacatggctgggccttggtcctcgtgctcccggacttcagagctcagaggggccagggcctggcctagcctggaatctggatggacctcttctgccctggggcgcgccgtttacccaatcctgacctcagagagcgtctgtcgttctggtgggaaaaccgagacccagacaggaacaagggctcagtggcaaccgctctgcctcccagcccagggctctgtcttgccggggctggggcacagggtggaccccaggaagttctgctatgagtcagcttcgagtgctcaggggaccggacagaggctgctggccggggaaggatgccggccggcggtacctacttccgcagctgtgggtatccctgcctggtgattcagcttccctctgagggtccccagggggcgccgccctggactgggaggctggggaggatgctggggctacggaggggcgatggaggtgccttaagggaccccgtaatccagctctgctggatgctgaggtcccacgagataattgtggccagagatcaggtgggcgtaagactggtcctaggatgggggctgtgggcccctcctcactaccctgcttcttgaagatagcctgggcggctgtgcgggataccccagtgtctccagcaatgcgcgttcatctccatggagggctcgccttggcgctgggtggggagcgacttggtcccccctggcggcgaagagaggctgaccacgccagctcgtgggggggtctactgggcagatgcgcaggccccgggcggaggagggctgatgggggaaatgccaggccgatgggggaggggctgtgagcgggaggcgttggggcggggcaagaccgccctcccggtccgggggcggggcttggcctggggcggggcttggctggggtgctcagcccaattttccgtgtagggagcgggcggcggcgggggaggcagaggcggaggcggagtcaagagcgcaccgccgcgcccgccgtgccgggcctgagctggagccgggcgtgagtcgcagcaggagccgcagccggagtcacagccgcagccagagccgcagccaaagcctcagagagcaggagttggagcgcaggccctgctggatccgcgcctagctcgccgccaggcaccggccggaggacgggccgtggtgtcagctcactgcccgggcgctgtgggaggcagcgagcccgcgaccccccgggccgggcaccgccaggcgcggagcccagatcgcccccctgccaggcctggtcacggccagagcacgcaggagttcccagggtctggatctgcgcgcaccctaatgacctggggactgaagagaaaaaaggaacgaggatttcatctaaaagcataacgtgggcactaggcgaggaggaaagtggagaccacctggcacggggcagaggtgcctggagcccacgcttgagcatcggagaccctggcatcctagcagccgcgaccttggctctgccctgtctgagctggaaacacagcttagcttctagacatcgctggcacaggcctggcacaagtaagcagtgtcctcacctgtctgaaacgggacacggggtcggaggaaccaggatctagcctggccccaagcggaactctctggtggcccagaggtcgtcactggggagcccgcctcctgccctagcctcactggtgcggatgtgccgctgcccgccggagcaccatgatggcaggatgacctcagccgaagtaggagcagcagctggtggtgctcaggcggctgggccccccgagtggccccctggcagccctcaggccctccggcagcctggccgggcccgagtggccatggcagcactggtgtggctgctggcgggagccagcatgtcaagcctcaacaagtggatcttcacagtgcacggctttgggcggcccctgctgctgtcggccctgcacatgctggtggcagccctggcatgccaccggggggcacggcgccccatgccaggcggcactcgctgccgagtcctactgctcagtctcacctttggcacgtccatggcctgcggcaacgtgggcctaagggctgtgcccctggacctggcacaactggttactaccaccacacctctgttcaccctggccctgtcggcgctgctgctgggccgccgccaccacccacttcagttggccgccatgggtccgctctgcctgggggccgcctgcagcctggctggagagttccggacaccccctaccggctgtggcttcctgctcgcagccacctgcctccgcggactcaagtcggttcagcaaagtaagtgcctgggtggccaattgagaaggtgggggtccgggtgggtgcatggcctggatggccctgtgaggggtatggctgttgtcccattttacaaatgaggaaactgaggttcatggctgtggaggaagcagaactgaggctcagagagggccaacagttcagtgagttccaggccccagactcaggctctggaggcccaactcgtgtttatttgtttatttacttatttagacagggtctggctctgtcacccaggctgcattggtgagatctcagctcaatacagcctccgcatcctgggttcaagtgattcttctgcctcagcctcccaagtaagtgggactacaggtgcacaccaccacgctaagctaatttttgtatttttagtagagacagcattttaccatgttggccaggctgatcttgaactcctgacctcccaaggtgcta

SEQ ID NO: 9421 - DNA, 6000 bp, Homo sapiens
atccttttttcccttttaatccgttcatctgtttgtttgaatcataaataggtttcttaagggttctccttccatgtatggagtaccctctacttggccatgatgtcttcttcttttaaaagtctttgtcaggttgacctatgaaattgtttttgtctggagtgaatttgtattttgcttttcccccctagtttttatccctgccattcaatttcttcataagcttgggaatgtttatccctgccattcaatttcttcatgagcttgggaatgtaatatgtgcatgtttattttgagtaagaaggtgtttggtttttctcttctcttttctctctcttcctttctctgtccctcccatcccttctctgtcatcctcctgtccccatgcttactcttcattcttagtgatttttaatctttatgtttttagggatttaaaatgtattgaacttatattttctgggtcgggcacagtggctcacgcctgtaatcccagcactttgggaggccaaggtgggcagatcacttgaggccaggagttgagaccaacctggccaacatggtgaaacccagcctctactaaagatacaaaaactagccaggcgtggtggtgcatgcctgtagtcccagctacttgggaggctaagtcacaagagtcgcttgaaccccggaggcagagattgcagtgagccgagatcatgccattgcactccagcctgggtgatggggtgagattctgtctcaaaaaaaaaaaatagtattttttttaaagaaaccatatttgctaccagcatttgggtttatttagcacatatatgatcttccaaaacaagaggagatctttagcaagttttcagttctcttccattctccaccccagcctcacagcaaactcccacattaaaatcatctgagttttagttcaatattcttctttaacttatctgtaagtgttacaggtttatttacctcagtatttcagctttcttggatttttttttcctgaaatataacctagagtaatttctttcagaaaagatctgaaaaactttctttgtccttacatactcaaaattttttgtgtcctttaaatgtcaaagaaaacttggcattttgtgattctaggtttaagcataattttcccttggtattttcaagacatctatttaaagttcagagtctcttatgtgaaatctttagccaatctgacccttgttgcattcaaagtatcctatttgttttcttctggaagcatttctgggatcatcctcatattcttgcaagacgaaaagtttaccagtgagaactaggcatggctttattaaaaggaatcttgggagttaaccctgatctctgtcccctactacaaaacctcatcgtagtagcctccccccttgaatacagattccttactgtctttgaaaaatattttaaaaaggagtcttgttctttattgagtggcctcttgtctccttgaaagccctgtgaagctttccccatttgctgttgtatctgtttggctgcacatggaaaatccctaagcaacagaggcttaacaacatagaagtttctttttcccagcatataaaagatgcccagaggtagcagtttcaggctagtatggttgctccagagtgagagtgggaatccagcttcctctctttctgttgcatcatcttcacatatggcttccatcctcaaggtaacctcatggtccaaaatagctgctgaagctccagctatcacctccaagttgcaggctggaagaaggaagaaagacagagggacaaaaatgaacccctcccacctaagtcaactgccattgagcagccttttttggaagacatacacaatgtttctattctcatctccttggatcacgtttagtcacttgactgcacctagtggcaacggagtataggaaggaaatagacctttttattctgtgtagcaataaactcagctaaaaccttggcttctgttgccaggaggaaagggacacggtcttccattgtctttcagactaggtagctgacattgtctgccatacctgctcttaattctctccaccccctgcttctgaatgctggaatttttgaatttctttcccaaacctaaagttttctctaagacttttcatctccttgactatttgctctattttatatatctatctttttcatttgtggtatccattctgtggtttggcccactattgattgttgttgtttttttgtttgtttgtttttttgagacagagtctcaggctggagtgccatggcaacggtctcagctcactgcaacctccacctcccaggttcaagcaattctcctgcctcagcctccagaatagttgggattacagacgtgcgccaccatggccagctatttttttttttttttgcgtttttagtaaagacggggttctaccacgttggccaggctggtctcaaactcctgacctcaagtgatctgcccaccttggcctcccaaagtgctgggattacaggcgtgagccaccgcgcccaggctttgattgatttttttttaaattatggatctcatatcttcaaattccaagaactctgttctttgcatagaagtgtcttcttttaaatggctatgattctcaaatctccctgaggatgctgatttagatgtcttaatgtactcttttatttttgctgtatctgtacatgtctgtagaagtgtctgctgggttagcatatgtcagaatagatgtgcgctgttttgacatttgggaaactgaatcactattggcatagaggtcagggacagagtctagaggcagcccactgcgggctcgaatctcaacctgttccttaccaaccgtgtgactgtcgaccaattacataacatcccacccctgttttctcatctacgaagtggagcttctagtggtaacctatacatagatgtattcatatccgtaaaaccttttgaataatgcctggctcatggaaaacactgcaatattgtcagccactatcatgaattctctctgtgtatgtgagtattgtttgtgctctttgatgatattgatttgttttaaccttttaaagtaaaagacactaacctgtcctccataattctggttggtatggtctatatgttgaagtgcacccaagtttatgttgcaacctaatccccaatgtgagaatatctggaggtagtgcctgtggcaccctataaaataccccagcgagctcccttgcttattccatgtgagattatagggagaagactgcaaggaacaggccctcaccagatagtgaatctgcccgcaccttgatcttgaacttcccagcctccagaactatgagaaataaactttgttactagtaagccactccatctatggtatgttgttacagtagcctaacggatgagtacattggtgcaaagattttctgtttgcactccgtcctttccttttatggttcagtcagtttgacaaattacagaagatttcacttttatgtacttctgccagcctttgtctctgtgatgtctcctatgcttttaagcttaaagagttcaaaggcattcactcctctggtttgcagctttcataggatgtaacattttacatttaaatttataattaacttgttatttggggaatggtgtaaaatggggttttagataggcatttttatgttgttaatcaatgattttagcatttttttaaatttaatatttcatcgcttcacattgattcctgattccttctcagtctggggtcaagtagagtttgtttccagccagcatgtccattgatagattctgtgtgtgtgtatgtgtgtctgtgcatgtatctgtatgtgtgtgtgtatgtctgtgtgtaggtggtatatgcgagtgtgtatgtgtgtgtgtgttgtgcatgtatgtgtatgtgtgtctgtgtatgtgtgcctctgtgtgtgaatttctgtgtatgtgtgaatgtgtgtgcatgtttgtgtgtatatgtgtatatatgtgtatatacatgtatgtatctgtgttgttcatgtgtgtatgtgtgtctgtgtctctgtgtgtgtgtttgtatgtgtgtgtgcatgtttgtgtgtgtatatgtgtgtatattgtatgtatctgtgtgtgtctgtgtctgcctctgtgtgtgtgtctgtgtgtgcatttgtgtgtatacatgtgggtatgtgtgtgcatgttttgtgtgtacgtgtatatatgtatgtatctgtgtgtgtctgtgtgttgtgcgtgtgtgtgcctgcgtgtgtccgtgtgcttgtgtgtgtgtgtgtgtttgcatgggcatcttgagtgaagcttccaacaatctaacagaagaaaaggagccacacttgtctgttctgctctcttgggtacttcccagaccagtgaaatgaaagggaggaaacccccggcctccgaggagaaaagggaactggcaagcagagggtggggggatgacggtaaaaggagcaggggtggggagagcacaggccctgtggaagtgaggacatgtgtgtgtacatgtgttcatgtccaggggatgacactgtggcatccaacagccgtggaccagcagcccacggggagcttagtaggagtcaaatcctaggcccctgtctcagctgctctgctgtctagcgcattgtgcagtggtaggtgtcagtgatccaagtggggacccagtccctcaggccacacagcgcatgtccattgccttcatgccgcaggagactgagaggtcatgcatgagggccacttctctgggttgtccccacaacacgggcggtgtccctgggacacgtggaaggggaggggcagctcactgctgacatctccttctgcaggcctggaggaggcagaggccaggagggagaggtcccaagagcctgtgaaatgggtctggcctggctcccagctgggcaggaacacaggacttcaggacactaaggaccctgtcatgcccatggccagcacccaccagtgctggtgcctgcctgtccagagctgaccagggagatggtgctggcccaggggctgctctccatggccctgctggccctgtgctgggagcgcagcctggcaggggcagaaggtgagtcccgtggctcccacccacttccctgtccctgtcctcactgctgcaccctgggggagggccgcagcgtatcctcaggatcctgcccgccagccctcctcctgctcccctccctctgtctctccccctggccttccctgggcctcccccgcttccctcctcctgcacattcctgctcatcctgtcttggaaagtccagctgagcgtgtctggcttccttgcccacatttctcagggcggcactcccggcccctaggctccaggatggctgctctggccgtttccctgcccctccttccccagcagacactctctgtgcctcagtggttcccacctccgggactttgctcctgcagggccttggctggggttctctccctgcttcagccgctagcaccctccttgtgcctgaagcccgcactgggatgctcctgggctcttgaggtgaaatggcccctcccaagggctcccagagacctggcttctgtgataatgctgggaccacagtccccttaacaaataccaggctcctgaggacggggactagagaggaggtgggaggttgcagggtagaactctgccacgctgcatcccagggctgagtgtgtgccccctcccaggctgcacagtcggtccaggggccaggcctgtgcttgatgcatgtccctgtcctggggtggggggaggggaccgtgcccaggaacagcacactgcggaggcccagaaaccatgctgagaaccaacagaatgtcttgcttctgccaggagaggagggtccgcaaccaggagcccaccccggcagacatgaacacatgtacatgtgcctggccacctggtgcctctgcagggacctgggagacccctccccagagcgggacatcccaaagcagctg

SEQ ID NO: 9422 - DNA, 6000 bp, Homo sapiens; identical to SEQ ID NO: 2984

SEQ ID NO: 9423 - DNA, 6000 bp, Homo sapiens; identical to SEQ ID NO: 2986

SEQ ID NO: 9424 - DNA, 6000 bp, Homo sapiens; identical to SEQ ID NO: 2983

SEQ ID NO: 9425 - DNA, 6000 bp, Homo sapiens; identical to SEQ ID NO: 2985

SEQ ID NO: 9426 - DNA, 6000 bp, Homo sapiens
gttttaagacacctgttttccagctctgcctacctaaccaccccacttcttgacatcccaggagtcacagcttggggaggtttcaggagaagcccctggagcaattggccagcccagcccaaatccaaatgtctctcaggacccccctccagggtccagggagccaccctctgttggcattgcctttgatccttgccatggttctggccccatcctcccattgggattgggtcctcagcaagtagtgccagttttcctgactgccacacctcaggctggcccctgtgcacacagcttgagtgatggccaagaataagtcctcctgaagggagtccaagcccagggttctgggctgggggaacctggggacagggacaatggaggagccaatcttaaacccttggcaatgggagatggagggaaaatgaggtccgtccttgctttgactctcgttgggctcgtactgtggtcttctcatggtccccagagtctgccctatctgtatgtctctcctggttgtctgtttctcacttgctctttgtcccctggcactaaagatactggcctgggccaagccccacccagatctggatggaccttgggtggaggagctagctgtgacctctgctcttgggcagaactgggctgtctgggtccacacagcgggctggtcgctgagccctgggcctgccctgggtgagcagggcactgagggctgagaaggggcaggggaaggggcaccaggtcttcagcaaacacatggcaagaacaggccagggggcgggatgtgaatcttttggtctcttggagatcctcctgcaccttctaccactctaagcctctagacccaatctctacccaactgtggctggcaagggggagggcagcggaagagagccgggctcctctgacaaagccctaattttctggaacccagatgctcctcactcttgttctcatcttcttgcttccccccaacctcctgaccactcctcaaagtgtaggtgatccaccactgtcaccagggtcaggggaagtcctctggacagagagtatgggagtcctgggttctggccctggctctgctaccaacttctatgtgacctttgtgattcctttgcctttctgggcctgtctcttggtcagtctagcgagaatcaggtgactgctaccggctcacatctcctggagtccctggtctctttcagagctgctctggcactcccgggtgggagtgggggactgtcttgttccacacatccccaggaggcctggctgaaccccagacctgagtcgagggtgggataattgctccctgcgggggatgtttttcctagaggtgtgggctggtcccagggaacctgggactctgagggcccctgggcaggaaggaggccaaggtttccttctggccagagtgctcagctccagctctggggcagtggggaagaggttgctcaacgttggggtggggccctggcagggaagatggcgccgaactgggagagggaggaaagagatcagcttggtgactctggggcagggcaggagggggagccccttactgtgtgtcctctccctaggaggatgaagaagcccccaactcaaaggagggtggcgtcagaaagtcccagggaagagccctaggataggatgaggtcccgcagcagcagatttgtcccgcagttcttcatccctcactcttccaaagactctcatctgaattccgttttctttaaacctcccctgagttctccatctgactgcctcagtttccctgaatctccagccaaccctttggttctttccaagcgtttccctcgtatcctcctgaccacagcagctggtggcatagtgtgcgtatctgtgggcaggagttagtgaaggcctccttccctccctccaaagccccaggccccacggtctgccacccgcaaaattccaaccacgagggggcgccttcctgcccgccgccccgtagggagacccggcctaggccgctggagttccgagttccagggtccttgtgatggaagggcgggcgcggcccccacacctggtcttccagccctatccaaggaggactgccagacagtcccgctctgaggtgcaggaggccgggccgcctcggctaccctgaatccacccgaagctagagggcccgagcccggggggcggtcgggtgctcacctccagagcttgcccagcgtcttgctgagctcagcgttgtgcaggtgcgggtactggtccgcgagcttcctgcgcgctgcctgagcccacaccatgaaggcgttcatgggccgcttgacgtgcggcttgcttttgctggcgccgttgacgcgcacgggcatgggcaccagcgtccagtcgtagccgctgagcacctggctgacggcctcgcggatgcacacggggaacttgtcatcgtccgcctcgccgtcctgctgctccttcttgaccttgcccagctcgcctggccccgggctggctcgcaggcccgatccgccgccgccgccgtcgggccctagcgagggcgcgctccccggggacaggcagcggggctcctccgagcccacggggctcagctccacctccgataggtcctgctcctccgccatgtcgcccccggccgccgccgccgccgcctcggccgcctcccccgggccagccgccggggtcctcgcaaagagtccaacgcccacctggatggaaggagggcgcgatggagcggccgcgcgcgcagccccgagggcggcccgagacaggacgtgggcacagccccgaggtggcggcccttcctgctccagctaaacccatctggcccctggggcccacgcacatgccagactctaggtgggtgcgtcccgcctctgtgtcttcccaccacctggtcccaaccgtctcttggtgtgggtggctttttttttagcctccttttttgggtggaggtttgttgatgataaggaagaaaaaaacggagcctttattttgctctaatcccggcccctggaatttcccaccttttctctcacctttccttcttccctcagcctgccccaacggggtttagaggagagccaggtggggggcaagggcggggtgtcgcctctctccacctcacagcagggtcccaggcctgggcgggccagggaggagcaggctgcgcactcacctcctcggacctctcctccagtctggggctcgtccttaggaagtggaaaaccgtgtcccaaggtgtgcggtccagctcggggctgggaggtgacgctggtgggctgggagggaggggcggggggccctgagcctcaggccacggcctcgttaggacggagcctgaatccttaccaccaaccaccctggccggacagcccgagactgactgagcgactgagcctgagccgctgcggagggctggggaaggaaggagggggagaggggggaggggagaggagggagggaagggcagaaggtggagcctccaggctttccttcatccccaacactcagggctcctccacccggagcccaggcccccccacccagctccctgccctactgcccaggcccatcttgctgaggcttatcttgggcttagtctgggaggtggaggggaggttaggccgaggaaggaagagatgtaggctggagggtcagaacctgttggatggaagaaaattgggcccaaccaggactcctaacgtctgcctcaggtggcaggatgggcacttggcaggggactagggagagacgtgaaggcggtgagggtcctgggggcccgtgagggtggctggccctagctgcttcgtctgcgaaatcctgttgagtgcctagtgtgtgccaggcactgatgcccagctcctcaccctgcctcctaccttttcccaggcagccctttctgccccatcctgcacagtaagagagacttctcagggatccctctgagaagtgcagagccccagcttgacccctggtcccttctctgcagacacccagcacacgcgcgttctggtctggttcaaggtggaaacacaagactaaagctgccaggaggccaaggtgggacaggttgggggccctctctcagtaggtcttagaggcattttgggttgctacctactgggacccagctccttccacactgggctcaccctgtcttgggagagggtaggggagtcctagtcctgattgtcacgaagtcctctactcccccaccccaacaaggggtggggacttgccctgcctcttccctcctctgcccacctctccctccctccccttttctttcctgcccatcctccgttgacacctttttctctctctttccttggcctctcctccaaaggtcgcagtgctgttctcttaactgagggcagccccgccggggtgttgaggccgaggtggggtgtatgtgggttatgtaatggagctggggtcgcattggcaaccatgtgacgttctgagctcctcaacagcagggcaaagccccaagaccaccccaaggggtcctgtctggagtgggctgcaaagggtctggggaggcaaggcctcatgcttgggaaagtccaaaggggtgtagggggtgggaaatgggacacaatgaggtagtcacacgaggcagaggcatgttgggggtggggggagcagacactggaacacacacacacacacacacacacacacacacacatgctcacacacacaaccagccagacaatcgggccagtgtgtctggggcctcggagcccagtgaattaggagtttgataagggttttctctttctctcgcttgctggccttggacaatctccccccagttttcctcgacgccacccccggcgctgccaaccctcctccccccgcctcccttctcttccctgtgcccagactcttgttcggggccttgaaacagtgagctgtctttgttcgaaatacaggtgaacggcaatcatgtgattaacacacacacacataaaaagctttttaacagcgcccgctcggcctcagaaccgcccggagaggagccgccctggatggacagagggacgagggacgagcatctgccgtcgtgtcccggctgccctgcagtcgcctccaacacccgctgctgcccgcccgctgcctgcctgcctggcatctctctctcccggtgggtccccactcatccttccacccctcagttcctcctctttgaggaaaggacctccccgctctctgctgtgtctgtgactggcctgagacccgcctggggcaggaggggtggttgtggaaggaaagagcccagagttaggaggtggaatgtggggtcccacagctgccccctctctaactccctgcttcctcctttgccctccttggtccagctgtgccaggatgggggtgggggtagcagtgggcacgctctgtctgcaggaagccacgctagacagaaggggccactccctctctctctcccttgtccccgcacagacactgccttcctctcagggctgtgctgggctttttgctgagcagtgttgggtgaggcaggtgggcctgcagggcgggtgggaagggctgtcagatgaccagtgctgtgtgtgtgtggttggggcccctgctgcgaacacatccctgcccaccatgctggcaactgggatcccctccatcccatcccaggccctgggaacccagtgctctccagcaggcaagggtgaaggacccatagtcattcctgaagagcagggagcttggagaggggagggatcctggctgaagacacctgggcctctgccccagcaggacaacaggagggccagtgtcaccttctcctcctttccctgctgggggtggcaggggtccctttaccccctcattcttgacccttctccagggatgcttgtgacctccttaccccaccccccatcacctctctgtcctgaagtgagggtttgtcaccgtccatggcaaggtgtggtgtctggtaggctctatgacctgccttctctcagggtgtttattctg

SEQ ID NO: 9427 - DNA, 6000 bp, Homo sapiens
ggtggagggcaggagagacccctacagtcctctgtccccagggcacagcctgctgggatgggttctgggcctctggccccccagtgtccctttaatcacctctggacctcaccccctggaagctcctgggactttagagctccgaggcaggccagctgtgtcctgatctgatttctaatctaagtatctgggctacctcagtttgcctcatctgcagaatgggctggctggacctttttttttttttttttttttttttttgagatggagtcttgctctgtagcccaggctggagtgcagtggcgcgatctcagctcactgcaacctctgcctcccgggttcaagtgattctcctgccttcgcctcccgagtagcttggattacagatgcgcaccacagtgcctggctaatttttgtatttttagtagagtcgaggtttcaccatgttagccaggctggcctcaaacacctgacctcaagtgatctgcccgcctcggcctcacaaagtgctgggattacaggcgtgagccaccgcgcccggccctggctgaactttaagacactctctaggacaaaaacctctggcctctgtgactctagcattttgaagtggccttttccgtctcctccccagctgtccacctgcctggcccaagttgccctcccttccactcctctcagccctctacacaggctctcagggcccctgtaggacccaggaggtgtgagcaggaccccacagtaaatcggttagtgagtgctctgctagcctggaatgacctttccccagaaagtggaagttgagcctggttcaaatcctggcccagacagttgcttactgcctgaccccagacaagccacttcccctctctgtgtgtcagttcagagtcctcacctgtgaggtaaagacaggcatagcccgtaccccacggagatcttgtgaggatcaaaggagagaatggagaatggagatggccaggacgttttaccaaagtgtatggtggacagaggttttacaagcattctcctccaaacttcagagcgaacctccttcctccagaccattgttcctggccacaccggccctgccactcatggcattactgcccgtgcctcagtttccccattggtaacaggtgcctggagaattcttgcaagaatcaaaggagacaatccctgcgaaggtctggatagtgctgagctaggggtacgagtgcaggggaagcaggttgtcctcattccgtctggtgggggggcgcatctgtggtggatcatgacaaagcccacttacccttgggagacctagtccacactgtcccactacagacgaggcctctgaggtccagagaggacacgcatcttgcccagggtcacacaggttctgacacccaagacttttctcaactccctcacactgcccccaggcctctgcatgcccatttccatctctgcccccaacctcacacagggctagaggctactcacacggaaggtgaacaatgtgaagtcttcctttagtctttgattatcctcaaaacagctgctcgaccacgtgcggtggttcacacctgtaatcctagcactttgggaggccaaggaaggtggatcgcttgaactcaagagtttgagactagcctggacaacatgacaaaaccccatctctacaaaaaatacaaaaattagcctggcatggtggcacatgcctgtggtcccagctactcgggaggctgaggtaggaggatggcttaagcccaggaggcggaggttgcagtgagctgagattgcgccactgcactccagcctgggcaacagagccagatcctatctaaaaacagcaacaacaacaaacacacacacacacacacacacacacacacacacacacacacacaccccgaagctcaaagtgggtattatagttctcattttacatatgaggaaacaaaggcccagagaggagagttgagctgcccagggtcacacagggctggagaggagagaaagggctctttcctggggcctccgaacctctccctgcctggagctcctctgcttgcctctccctacctcctcccagtccagtctccttgcaggatgaacagcagccccagggtgcggcccaggcccggcaagctaaccctccttgccccagagcccccatcccatcttcaagtttgtgcccagggacttggcatcaggagactgattctgtgacagtagatgctttggatctacagacatctctgtctgcattttcccctccttcctgccccttcctcctctccctgcaccccacactcccaggatggctaccaggtcagcccgtggccaggcaggtcatttgtctcaccctcatcctcccactttccatccacagaaaaggtgaaaaagaccaggcacacatctcttgcccacagggcactcaggctgcttgagtctcccctgcatccacgcactgagcattcatgtgatggaacatcagtcctggctgtctgcctgtgaggacacagcagggtaaccagggagaggcgtggaacaggacgtgcgttctggaggtctgcacagtcggagagagccgtgagaaaggatggccacatttattgagcgcctaccatgatctgtgtatttcttgtgcatccacctcacttaatctaccccttgggaatggaggacgttagggtcctcaatttacagacagattaaataaaaacttgttcaaggtcaagtagctcctaggtgcttttgagcctaggttagcctgactcctcatcccactaagcaagaaccatacttgtgccccgcccaggggctggtatgtggtgggtgcctagtgctggttgaatgaatgagtgggtgataaatgacttctgctggggtcatcaggaggccttctcaaggaagtggcactgaggctgggcttggggaacagcaggaattctctgggcaaaaaaggtggaaggatatcttagtgaggaggaacagtgcgtgcaggcagagaggtgtggaggcctgtggcgtgttctggaatctgtggaatcagggtgtacctgtggatttatgggatgtgggatgccggataaggtggggcctgactataccacactgaggagttgggactgaatccttttgagtagggagagcccacgaagaagggaaacacttgtggtggtttgtgtgttgctgttcttatgctgacatcctcgaggctcaggagagccagaggggatttcagatttcatcagttctccacctggctttggggtgcctcggtctctccctctctgtaatggggctagtcggtgatggccagactcccagggaagttttgctggctgtctaactgcaggtgttctctcgtcctaccaccctggaaggaggagcactttccctcctgtctcctcggagggctagagtgacgtggcaggatggtcaggatgtagctggctagacaggtgctgtgggtgctgggggttccctgacaccccagagtgtggggcccaggcctgacagcttggggtaatggagagcgacagagaataagagactagggtttggcctggctttgtcatctctgggtgaccttggccgagtttctgaccctctctggtacccagtctcgccatctgtaaaatggggcagtggtgactgagtgatcgcgagggtccctccaatagggccccctcagactcccagagtgaggtgcttcgggtccttgaccggcggtactttgggagagtacgaggaccgctaaggagaggggcggactccgtgggaccccagagggaccagctcccacccaccccccttcccggctcggaggaaccctctccacctgcccccttttggggggggggcacaaaacccgggagcggatccaggaacgggttctgggaggagcgctcctggggcgaggaggaaaacccgggcaggatccagggcaggagcggggccagcagccccccgccccagcccctgctccgcgccgcgggccccgcgggagggggcttgaggccgggttaggccgaggggcgggcagggcggggtcccgcgggcagccggggctcccgggctggggggcgcgcggcctccgcagtggggcgcgggtcacgtgtgaggaggggcgaaagtctcgcaaagcggggcggcgtgccgcgagttgggagttctcggcgcgccgcgggcggcgggagctcgggctcccgggcgagccggggacgcggccaaggcgggggccggggtccgagacagagggggccgcacggagagtgggagggggagagacagagaaggacaggggccgcgagggagacggacagagacgcgcaggggagagaggcagcgcgggcagagggaggcggggggaggccggcgggcgaccgcgacggagacggagaccccgcgggcagagggcgagcggggccgcaggaggcagggaggccgggagagggaccgggacgcgagcgcggcggagaccccggcggcaggagagagacgcgagagcggtcggggaggtggcgacagagcccggccggcgggggcggggagggcgaccccaggccgggaggccgaggggtcgcggggccggggccgagcgcagcggggccgggagtggagcgcagggccgggggcagagcgcgcgagcaggagcgggtgacagcgagggagctgggcgcagcgggggacggcggcggggagggcgcctgcagcgggggtggggggcgcgggcggcggggcgccccgggcccccggacccccgcgctgtgagcccggccgggcccgacgatgctgacgccgaggcggcgccgagggcgcggcgcggggcagcgctgaaagttgggcggcccgcggggagcggcgcgggacggccgggacgcgcggagaccccaagacccacgcgcagaccgagcggcagccggggaggggagcgcgggccggccggccgagttcgcgggcagggggcgccgggactcccctttccgcgcccgggacgccgcccgccggatcgcgccttgggatgtagcgcccgctcgccgcctcccggactctcgtcggaccctccgcccagcggtaagccgcgctcgcccaccccgggcgctgtccgtcagtttgtcccgccgcgtgcgtgtctgtgtgtcccgggcccgccgctccggccccgcccgctccgcacctgatccggagccgggtcccggctgcccggcgccgcgcgcgcggtcccgtgactccccgggagcgggcgggctccacgggcgggctctgtccgtctgtccgtctgggagcgtcgcggtctgggttgtggcctggaaagggggagagaggtgggtggaaggggtcttgacctcctgccccagccatgacctttccctgcctccacccaccccagttgtcatgccggggagcttcaaggcaggtgacttgtggcaaggtgggggatgccgcctttccgcctccccagctgcatcctcgttgcaaatggccctgtgatctgaagaacgaaatctcacttctcatgttttgagcacctacttggcgccacacgaccccagggcgcaggggcagggattggtagaggaggcactgcacgttcacagtgatagacacaggctggggagggaggcagaggctgctttttcctccgtgtgtagggagcaccccaaggcaagagaggtctcaatgagcctcccgcagggagaacttcccctgcaacctgccaaatgtccccccaccagtgtcagcctccctgccccctacccacatttctgcccccagtgtccctgcttcaggatggacaggatgcagggagttgggaggtggcaagctgggtggggtggagcggcgggctagaggcagggcagcctggccagctgacagagcagggcctcaagagcagtagaatgttcagcagcaggtttgggggaagtggggaactcagggagggaggcccagagaagggttggagccgtgtgtgtgtgtgttctcccccacatccagtcccatgac

SEQ ID NO: 9428 - DNA, 6000 bp, Homo sapiens
gtgagctacgttttttaggaggtcttggggtctcccgagtaccctgacaggcgtcccttatttccctcggtggggactctacaagaagggcctcgggtcccttccaggcgttgccgcggacgcgcccgtgcgcccagggctcaccccacgccccgcgcccgggccatgtctcccgttattccgccagcaccgggccacccccaggacccggggcccgagggggacctggttgggggcagcctccgtgtacctggcagtcgcgcagaggcgaggctgcggccatgttgcgccgggtcggagtccaccgcgagctctgggcacccgggccttcctgggagtgggcggggcggtcgcggaaaggggcggggcggggcggccgcgctctcccgctcgctcactggtgggtttcggacagactggccctggtccaggatccgggcccgccccagaggcccgaccggacaactctgcaacgcgacgggtcccttgggagcagggagctccgggacagcggtcactttcaagtttatgtcgttgcggtcggcagctacccgcgcgcgcacggcacacactcacttggcgttcggggccggcttcactgggtcgtcccgccgcctccatcctcccttctcaaggatttgcagcggaaaaatcgctctgtctcctgcagtagcggcttctccctctggactggcccggtctggcccggcctgaactctgccatcagccacacaccagccccagtccaatgggctcccctagtttaatttgcccccgccccagggtgcacgaatcaagggcgtagaaccaagtgcacgggcagatctggcctttatttaaaatgctattttgttcatcatggactttttgcattagttttgatttttgaaatattgcactgaagtattatttgttttatgtgagagctgtaaagataaaactcttagaagaaaacagaagtaaatcttcatggccttggatttagcaatggattcttagatgtaacaccaaaaggacaagcaacaacaacaaaatagataagttggacttcgtcaaaattaaaaacttttctgaatcaaaggacactactcaggaaactgaaaagattaacacaatgggaaaaaacatttgtaaatcatatattgggtaagagtctagaatccagaatacataaagaaatcttggccgggcacagcagctcatgtctgtaatcccagccctttgggaggctgagtcaggtggatcacctgaggtcaggagttcaagaccagcctggccaacatggtgaaaccttatctctattaaaagtacaaaaatagccaggcgtggtggtgcatgcctgtaatcccaactacttgggtggctgaggcaggagaatcgcttgaacccgggaagtggaggttggagtaagccaagattgtgccactgcactccaacctgggcaacagagccagactctgtctcaaaaaaaaagaattcttacaactcaacagcgaaatgacaaacagcccaaatttaaagtgggcaaagaatttgaggtgacagttctccaaagaagacacacctttcctacagcgttttcaaggttcattcatactgaaggaagaggcagacacaaaaggtaacacttgtattagtgcatttacatgcatgtccagaatacgcaaacatagagacagaaagaagattggtggtgaccagggactgaggggatagggatgataagtcactgaagccttgaactcctggctccagcaatcctcccacctcagcctcccataaatggttacttttatgtgaactttacctcaataaaagagaatttgtcttgattattgagtttttggtgcccctccacccttaaattttgcacttgagctgagtactaatatggactaatacagtaaattggtaccattagagtggggtgttgccaaaaatatacctgaaaatgtggaagcaactttggaactgggtaacaggcagaggttggaacagtttggagggctcagaagacaggagtatgtgggaaattttggaacttcccagatacttgttgaatggctttgcccaaaatgctgatagtgatatggacaataaggtacaggctgaggtggtctcagatggggatgaggaactggagcaaaggtgatgcttgttatgttttagcaaagagactggcagcattttgcccctgccctagagatttgtgggactttgaacttgaaagagatgatttagggtatctggcagaagaaatttctaagcagcaaagcattcaagaagtgacttggatgctgttaaaagcattcggttttaaaagggaaacagagcataaaagtttgaaaaatttgcagaccgaaaatgtgatagaaaattccattttctgaggagaattcaaaccagctgcagaaatttgtataaataacaagcagccaaatgttaatccccaagacaatggggaaaaggtctccagggcatgtcagacgtcttcatggcagcccctcccatcacaggcctggaggcccaggaggaaaaagtggttttgtgggctgggcccagggtccccaagctgtgtgcagcctagggatttggtgccctgtgtcccagctgctccagctgtggctgaaaaaggccaatgtagagctcgggctgtggcttcagagattgcaagccccaagccttggcagcttccatgtggtgttgagcctgcagttgcacagaagtcaagaattgaggtttgggaacctctgcctagatttcagaagatatatggcaacacctggatgccaggcagaagtttactgtagggggaaggctctcatggagaacctgtgctagggcagtgtggaagggaaatgtagggttagagcccccacacagagtccctactggggcaccgcctagtggagctgtgagaagagggccaccatcctccagaccctagaatggtagattcaccaacagcttgcaccatgagtctagaaaagctgcagacactcaacaccagcccacgaaggcaaccaggagggaggctgtaccctgcaaagccacaggggcggagctgcccaagaccataggaacccacctcttgcatcagcatgagctggatttgagacatgaagtcaaaggagataattttggagctttaggatttgactgccccactggatttcagacttgcatgggccctataactcctttgtttggccaatttctcccatttggaatggttgtctttacccaatgtctgtaccccactgtatctaggaaataactaacttgcttttgattttttttctgttttttgagacagagtttcgttcctgttgcccaggctggagtgcaatgacacgatcttggctcaccgcaacctctgcttcccgggttcaagcgattctcctgcctcagcctcccgagtagctgggattacaggcatgcaccaccacacccggctaattttgtatttttagtagagatggggtttctccatgttggtcaggctggtctcaaactcccaagctcaggtgatctgcccgcttcagcctcccgaagtgctgggattacagggtgagccactgcgcccagccagttgcttttgattttacaggctcataagcataagcgacttcctttgtctcagacaggactttggactgtggacttttgagttaatgtgaaatgagttaagactttggaggactgttgggaaggcatgattggttttgaaatgtgaggagatgagatttggcaggggtggaatgatatagtttggctctgtgtccccacccaaatctcatcttatagtcccataattcccacatgttgtgggagggaccgggtgggagataactgaatcacaggggcagtttcccccatattgttctgtggtagtgaataagtctcaggagatctgatgcttttatcaggggtttccgcttttgcgtcttcctcattttctcttgccactgccatgcaagaagtgctttttgcctcctgccatgattctgaggcctccccagccatatggaactgtaagtccaattaaacctctttttcttcccagtcttggttatgtctttatcagcagcatgaaaacggactaatacaggggagggccaattaagaccacgagtttgagaccagcctgtgaaacacagcaagacaccatctctacaaaaataaaaaataaatcagtcaggtgtagtggtgtagacctgtagtatgggaggctgaggcaggaggattccttgagcccaggagttcaaggttacagtcagctatgattgcaccattgcactccagcctgggcaacagagcaagaccctgtctctaaaatcattcaatccatcaatcaagtcccaaaatatacagcaaaaatggacagagttaaagaatgaggccaggcacagtggctcatgcctgtaatcccagcactttgggaggccgaggtgggtggatcacttgaggtcaagccattgcactccagcctgggtgacagagactccgtctcaaaaaacaaacaaacaaacaaacaaacaaaaaacaaaacccccaaaccaactagaaagaaaagagcaaagcgaccccaaagtaagaaaccgagagtcagaccttcctgggcgcccagggatctcacggttccctcctgatctcccattttgtgactggctttcccaagggttcctgctgaagccccttctccgtggtcagctctgtggtctgcacggggctgaactgccctcctgagccatcctgaccctgggcctgcacacacttggggacggagagggaagaggtacccaagaagtccccagtgccgactgaccccaagctccgaggtcccagctgctctctgggactctgtccctgggacccctctgccagcgcccttcgacgcccgagacccccactgtccccaagaccctcactatccccgcgaccccggtggcggttgggcgcgcctcgcggcctctcccagcttctcctgggccggcgccatgaggcctgggcccgctctcctccttctgggcgtgggcctgagcctgagcgtcggccgcctcccgctgccgccggttcctcgcggggcacaagccgccgtctccggggcgcccggtggcctcctcaggggcgccccgggcctcggggtgcgcggcggccgcgccctcctcagtctgcggcccagcgcggtgcgggcgggcggcgctgtcctgagcggccgcggcagcctctgcttcccccatggcgggaccgggcggcgctggtactgcctcgacttgcgcgtcctgctcagcgcccaacgcctgccctggccggccgcgcccgcgctcgcgctcgtcgacctgcagctctccgcgcgcggcggccgcctctccctgacgtggtccgtgcggctgccgcgctcgcccgggcgcctggcctgggccttccgcctgcggctgctcggacccggcgccgcccgcccggcctcccccgcggcccgcgtctccccgcgctccgccgcgccaggcccgcggccccagcagggcttcgtggcccgcaccgagtgccccacagacggccccgcgcgcgtgatgttgcaggccgtcaactcgtccagccacagagccgtcgagtcgtccgtgtcctgtcagataaacgcctgcgtcatccagcgcgtgaggatcaacacggaccagaagggcgcccccgtgcgcctgagcatgcaggcggaggccaccatcaacgcctcggtgcagctggactgcccggccgcgcgcgccatcgcccagtactggcaggtgttctccgtgcccgccgtgggtcaggcgcccgactggacgcagcccttggatctgccccagctcgagatcaggaacagccccttgttcattcacatccccaataattcgttacagtggggagtgtatgtgtttaatttcacggtgtccatcaccacagggaaccccaagatgcccgaggtgaaagactcggacgccgtctatgtctggatcgtcagga

SEQ ID NO: 9429 - DNA, 6000 bp, Homo sapiens
atttccagtccccacccacctccctcatgtacatgtgtctgtttgtgaaaccttcatagcaccttagcttccaggccctccatcccggctgcctctctggcacttgcccttttactgtgcgggtccaaagagacacctatgttcagtttgtcaaagtctgaaataagcctgtcttttaatttcactgactcccagtagtaatttttttagaagacaaactgcttctctggcagttacactccagggccaattctcaaaggccaagtctggtgccaccccactccctctaagctgcttgagccagatgagagcttctgaaatgctgcagaaaagagctctcctggggcatccattaaaatgcagattcactggcattcccctaagagtttggttcagcaggtccagggtcaacatctgcatgcctcacccagggtcacaggtgattgttactattattggaccatttgaggagaggcaggtagaagtgcaaattcctggcaaagcaaacactcaggggcatgagagtgatgagaccaaggaatcccaaccatgtcttctacctcacctggaacaaaatctataccctttttgccacggcctacagccctgcagccctctgccctctccaccccacagcctggccacgcttccctggctccctagcctaggcacactgctgtctgccagtctgggaaacaggcccgcatgctcactgttcctctgcttgaaatgctctccctctgatcttgccatggctgactccttcccaccctgcacatttcagcttaaatgtcacctcacagaggcctccccagccacctctttaaagcagggggtccccattcttctctagaagcataaactatttgtttcttttgcagtgccaataattactcagaatgatattgttaacattgtcccttgaggtcaggaacttggttttgttcaaggtggatccctggtggctaagtcagtgcccagcacatacagcagcgcgcaatgagatatttgtggaaggaatgaagagttccgtgtggctggagtggaagaggagtggggcaaggtggggtgtggggagcaggaaccagagcacatgctccctggcgatgtgcagcgcggtcctgccaacccccacccatccctgccccaggaagctgagctttcatggccatggtgccctgcgcaggcattacctgcttggtcattcagctggttgtagctcaggtccagggacttcaggtctgtgtgggccagcaggagttcggcaaggtgctgggccgcctgctcctccaggccattccctgacagctgcatcttccgcatggcctggttcactgtgagggcggcacagagggcctgggctcctgccactcccagctggttctccaacaggtccacatctgggggacggagccactcctcagccagtgggatgcaaagccaggtaccacccccctcccccctcttctgccatcccccaaacctccaggtctgaggcagaggaaaaggacttacaggttaactgtcctggggttgcatggtggctctggctcccaatggctgggtcccctctgcccctgacctccccctccctgtgtgcccaccagcttctgtgtcaagcggttaaaactgcctacctcctggtactgtagagactgctgtggtggggggcagccaccccatcaatgattatgtctggcagtgatatcaccacccacttcagaagccctcactgccccattgccaggattggcaataatagcccaggtgactgtgcatggagcacttacatgggtcacacactctgctgatcacttcaggagtgcatttcacttcatgctcaccacagccccaagcctatgaggtcttgtgggggccatttcacagattggaaactgagctgctttcataggtcaccccgttttctcagtggcagagacagcatttggattcagcttcaatgaactcccaccttgcccacccctttcttgaacttccccgcccccaactctctgtgttgcaggactttccactctgcattcaggcactggggagtctcccatgtgcagggcagggcaggagaatgggtgccagccaacaaggaaggagagtggtggggtagggtggatgaggaagggacttgtatccagcatcagctgcacagcagagggtctaactccaccccacataccccctcctgtgatgaggcccctcctctatccaccagcaacaccagcaggacccaggtgacatggcccagctttcaggggtggaggcacatccctgaggaaagggaggactcacgcctgcccacctgccccagacccagcacctaccgcagatgctgctgcttttgctcagggcacctgccagggcctctgtacctgccccatagagcccactgtcccaaaagttcagccacttgacatatggattggagctcaatgaggaagccagagaccggcgccctgggacagacagagcaaacacactggccactatcctggctcatgctccagggctcagcccgctccacgtcccccacctggaaagtacccccctttccacctgcttaagggacacatgcttctccttttaggccccacctaggtgtcccccacccccacctctcccagagcccccagcgggttagaagcctgaaggctccccaacccttcatgccatctgtcatagcatcaatcccatctgtctctcagatgtcgagggtagggcatgcctggcacaggcagaagctggggagtacaggggacagactcaggggcactcccatggctgttgtctcccggggcctctccctgtaagcctggacccagtgtccttccagtggtacctggggccccaggccaccgtgcagcaggttcagctctggggcactcccttggcacagaaagcagaagatgggcacaatgctatggatccagcaagacctcaggtacagggtgtccccgaccagttctccaagtccatgggtgcctggtaggagacagggggatgaatgtgaacccctgcatggctatagccacctgcctcctcccctgccctgcatcactacctggcctattttttgcctctagaagcactgcttcctatgctccttaggaccactgcccgcatatgacagataagaacatcgaggctaaggcaacgcaaatcttttccttaaagtcatacagctgtcaaaagaaagctggacaacctgggcaacatagcgagataaaaaattatttaaattagccagatgtggtagccccctgtagtctcagcgactcaggaggctgaggcaggaggctcaccagagtgcagagttcaaggatgcagtgagctatgatcctgccactgcactgaaagctgggtgacagagcaagaccctggctctaataaatgaatacataaagtctcacagctagtggtagctaatcctgccagagtcaggcctctacctgtctgatgacaaatggcacactatgtcttttaacctgattgcagaccacaaatgttttgtgaatattttccccagggaaaaaaccggaagtagttctaaattctatacatccattatattagttttacctgtggattgggaaaacccagctctgattgcatttcagggcgggacagcctttggtgcactgtctggcgggattttccattttaacctccttctagaagcgccttctcatggtaaagttcctgatgccgccaggagcgccgaggagagggcagggggctggagacgccccgcagagggctacgtgccctgctggacagaggtctcctgcctcctcggcggcgccagcccacctcccacaacccctgcgggagaagcccccaaggggaggagacgggcctggcccctgccccgagcaccttccgtctctaggtcggagtctgaatcggccttgggaccctgcttggcttcggggacccctgcaagacgtccacaggccgccgtcgcctcttcctcctgctttttatcctccccagacctctggcaggaaccgctcatcgttacgcccctttcgcagcctcagaccctgaggcggagaccgcttggcgcctcacttagagcgcgacccggggatgtgggcggagtctgcggctgcgctgaccaatcgagtgtggcgtccatcgactggcgtctgccacggcaattagcgacgcgctcccccgcggcggtcgccccggcaacccagtgctgtaggttgccgtagaaaccgtggctctcctgcgctgaggctcctcgcctgagaggataaactgcacgcgccacgggctatgcactgggctgggcgccttgtgggcatcctccctgccttcctagggggttccagcatcgcccccctttcgtggactgggaaacacgcctgactccaggacttgtgttgtcctcactgcactggggaaggtggcgggggcagcttttcaggagggcctggggaacttcgcagagccaggtcaccctctcactctgtgcctcttagttatcttgcatgctctggtctttgcatacgctgctccctgcaccaggaacctccatccccatctttgtctgcttgtcgaacttcagaaatctgcaagggtcagcttagaggtcacttcttccggaagctttcctcaacaccctccccgccctgctgctgctgccctcaggccctcctctcacagcactgataacagctgtccgtctccaccctcccaccacctccactcccaccccaggaagtgaggccagagggcagggacagagctgctgctgttctctgtgtgccagggcccagcaaagggaatgtagggagggtgggaggtgcagggcagctgggattaggggttgagggctgggtgttggaggctggatctggatcctgctttagtggaagtgtccctttaacagcaactggcctggcctggctcgggccctgctttgcctcctgttcagctgcggctgcagctgccatgctgactcatgtgcccgcagctagcaggagctggcagcatgggctccccaggggctacgacaggctgggggcttctggattataagacggagaagtatgtgatgaccaggaactggcgggtgggcgccctgcagaggctgctgcagtttgggatcgtggtctatgtggtagggtaagagagaagagcttttggccaggctggaggggcaagggaagaggtggggggtggggcttggtcctgctgggttgaagttgagggttgggctgtttaggggctggagtggaagggggcagattgggacggggttggggagagctaggcgatacaagacaggagagcaagaacaagctgtgtgtttgtcctgtgtgtccacttgcctccttcccaggcccccacccaggccccacccagggggcacatgacatagtccttaacatctgtgagagctggagcactaggcccccagagagaccaccagctgtatctcgggtcaggagagtctgtaagggggaagctggatctagtcaggctgggggtgggtgctggctagtgaaggtgattgtctgagggcattggctctctgatgcatggctggagcttctgtctcattcagggggtctggagtgggaagtggggccagagaggaggtggggccttcgatgttgggccgggagcctgtagggtgtggggggagaactgagcatgtagggctcagctccgcccctgtcactacacgctggggacacaccacactgcccgacttctcctccccaggtgggctctcctcgccaaaaaaggctaccaggagcgggacctggaaccccagttttccatcatcaccaaactcaaaggggtttccgtcactcagatcaaggagcttggaaaccggctgtgggatgtggccgacttcgtgaagccacctcaggtgggggccctgatgttgctgacgggggcgcaagtcctttccccactgacagcctgaacacccgccatgcagccagtgtgtgcgagagagaagcatgt

SEQ ID NO: 9430 - DNA, 6000 bp, Homo sapiens
gccagcccttgtggattgaatctcagacggagccacagggatggaagcttggaggggacccagacccagggtcacacaactttcagtggcagggccaggccaggacagaggtcacttgccttggcgcctggacggactcaggagtagcctcaggggaggaggagatgcgagctgaagagggagggtgtgagccgccgccctagctcagcctcctgggagtaggtgggtgtcctcaccctgatttcaacccctagaatcctacccatcctgaggaaggggctctacccagccctcccctctgaggcccttgccagtcgctgcccccaactgtctccctcgccagactgcgattcccaggggcctgggactgtgccttgtcccctccaccacccgccacgggaagcctttgcacctttccctctttccctttgcctgcctcagcctgggcaccaccagcacctcctccaggaagccttcgctggcctttggttgggcaggagcccctcctccgggcccacgcaacaccctggattatctgggatggtgaggccctggggacacggattgctggtgcctcgcacaggcccacctcagtgtgcacagacactgcatgttctcacctctggcacagtggtcctcaaaccgcagcaggcattggcatcacccacagagcgttgcgaaaatgcagcccccaagatctccccttccccagagattccaatccaacaggtctaagctggagcccagggatctgcatttaagacacttcccagccaagtctgatgcagaggcctgagcatcttagggttcatgaaatgcaccatcggccccgacctctgcaggggttcagcaaaatagctataaacagaaggacgataaaaacctctgacatctgtgctctgtgaatcactcgcaaaacactttcacacctggttctccttttttgtcttccccttttaattaattaatttatttatttatctatttttttgagacggagtctcactctgttgcccaggctggagtgcagtggtgcaatctcggctcactccaacctctgcctcccgcattcaagcaattttcatgcctcagcctcccaagtagcttggactataggcgtgtgccaccacgcccggctaattttttgtatttttagtagagacggggtttcgccatgttggccaggttggtcttgaactcctgacctcaggttatccacctgcctcggcctcccaaagtgctgggattacaggcgagagccactgcgcccagcctgtcttcctctttttaaccactgtcttgggaggatcatcatcctcactccacagacaccaaggctcagagacaaagggtgacatgtccaaggtcctccagctaaaagagtggagctgggatttgagctggagccaccctgggctaggggagctccaatctctgttacagctgttgggtttgaaggatgctgtttttccaaaaccaaaattcaggacctagacacggcctggtgattccagccctgtggaggaaactcaggccactgccactgtccctgttgaggccctcctcatctcttccctgagacacccaaccctcttgaccccctctgctcatgcaagtcctctcctcctggatccagagaaagtttcatctcatactaaagccgcagcgatttctgcaagcaccagatttgcagccaggtattgcgctggacatcgtggccaattcagagaagggcaaaacagagcacctggccccgaaccaggggcttcctgtccagctggaaaaacaagaagtgcttacttgggtgatagaataaggtacttgaactttcttttccctcaaatagattcctggtcccaaccagaccccctcaattgactgggacatgttcctctgctgtgtgggctgattccagtgaccccctctgctaaaaaagctaagcaggttgtgacattttcacaccaacagtattacaaagcaatctgatttcctttttcttgtctgtcacaatgacacctgttgatggattctaagtatactatggaagatgggggtgccagagattagaaagtaagttgagaaaaaggccaggtgcagtggctcacaactgtaatcctagcactttgggaggctgaggtgggtggatcatctgaggtcaggagttcgagaccagcttgatcaacatggtgaaaccccgtctctactaaaaatacaaaaaattagccgggcatggtggtgggcgcctgtaatcccagctactcaggaggctggggcaggagaatcgcctgaacccgggaggcagaagttgcagtgagctgagatcgcaccacttaactccagcctgggcgacaagagggagactccatctcaaagaaaaaaaaaaagaaagaaagaaaagaaaagaaaagaaaaaaattgcaaaaattagccaggcgtagctatgagctgtaagccccaaatttaaaggggataaaaaccttgccagacaaaatacaagcatgtaataaattaatcactgcagaattggctcaggaaaaccatgaagagatttcacaaggcaaatacacagcaaattgctgaacaaatgattcaaatagcaactgctcaggagctcagctcagaaaagggagcaagatatatgagctgagattgtctgctaaggctgccgggaagaggtgaattagagcggagcctgcaggcaagggatgaacaaggcagaaaacaggggcatcttccccaacctgagaagaagggccagagtgggtagggggttttgaggtcagagtgacagctgtgccatgcaaattgtttacaaagcactcacacctgtttctccttttaatcttttgtttctgagatggagtctggctctgtcacccaggctggcatgcaatggcgcgatctcggttcactgcaatctccgccacccgggtccaagcgattctcctgcctcagtctcctgagtagctgggattacaggtgcataccaccatgcctggctaatttttgcatttttagtagagacggggtttcaccatgttggccaggctggtccagatatatgatctagatcttataccaactcctgatctcatgatccacactcctcagcctcccaaagtgctgggattacaggcgtgagccaccgcgcccagcctctccttttaatcttgactttcacaaatacctggtggcaggtgtcatttccccattctacacgtacctgaggctcagagtgagacagcgactcacccaagatctcccagctacaaaatggcagagcctgggcctgagctagcatggtcatgggctggaagagccacaatccatgttaaggcacctgggtttggagactgctgccttttttttttttgaaacggagtctctctctgtcgcccaggctggagtgcaatggcctgatctcggctcactacaacctccctctcctattttcaagcgattctcctgcctcaggctcccaaatagctggaattacaggtgtgcgccaccgcacctggccttagactgctgctttttgaaaccaaaattctggcctggaaacagagcttggttttcccagccccagccctgccgctatgataccagaggaagaggcttcccagggcctccgtttccttgcctgcacaatgtggctggcaagatttggtcttctctcacagggtggtggtgagctttcaaatcctgtgaaagtgatctcacaggagagcagtggacacgtgggaaggctgttattgtcacggcattctgcacatctgtccggactcaattagccacctaaggagagagtagggcggggcttccaccggccgtgggatatgtggataatcatccttctgtatctttcttccatggctcctggggcagctggggaagcaagctggatgggcctggccccatgctgccggatgaggtggatgcctggctgtggctctgggagagccaacctcccccagggaacccactttacacaatagcagtggcagcagaggctggcgaggagacaagattcggactctggggagcactgatagcatttcccgagcctcaggtacatgcggaccgtgaccctccctgggaccccaggggggctgctcctcaggactaaggaaggaggagggggtgtgagaaacctttcaccatataccatagaaagcatttacctcaatggccttggtttacatatggggaaactgaggcacataaagggaagggagcatgtccagtctgtccttaatagcaagacccactgaatacacctctcctggctctctgtttagtgtttggacgttcaaagatccctagactaggcggcgggagtttcagggccacgatccagatcttacaccaactgtgtgtggccccgcacaaaatcactccccgctctttggcacttaagttggcgaaactgggatgggctgggacctcaaagggccattctagtaggggagtcacaggcccaggtggtgaaggggtgaaagggcatgatgtcttggggtttatagtccactgagcctcgccggaggtaaccccggctcagggatgctttcgttgccatggcaaccgccgggccggcgcgggcccctgagtgcagctgaggaagctgggacaaaccctgcccttcccaagatggcggcggcggcagggcaaagggcggggttagacgctgtcagcctgtccagaccgttcctctgttttcgcttgttcctactaacagcgagcttccgccaatacttgttctcgttcttggttccgagcgtcccgggagccgggaagggaaggattgtctgcagggattggagcaaatatccagtggggggaaagccgggacttccgcgtcttgccggaagtgacgtgacaatcgcggccaccgccaggtggaacggcaggtgggttcaggtaccagcctggccgggacccggctgtgggaccaacgcttccggtgagcgacagaggcagctccccagggcctggagacccgtggggcggactctgggatctgagcctatcgccctggcctggagcccccctttgtacctagtaagaatcacctacccagccccccacccggagactgtcccatcccactccagagggaagaggagggcactgctgtcccgtatgaggtggtggagggaggggtggcgttggcatttaggcacttgggttccttaaatcctatgctcctttctctcccggatccagttccccattcccctaccgagctgggcagttagccagcccactccaactctcggaaccatgtttgcagacttggattatgacatcgaagaggataaactgtgagtattttattcccccaagttccagcagtataggagccccaagttcctcatttccctggacttcccagtcccacagacccttgcttctcagcggtggatcagttgttgtactgaagcagcaatggaccctgctctcccaggagctcactatttgtagggggctgtggacagttaaagggataatcacagctcagtgccataagggcactattagcatgacttggtgacaagaagagcaaagcagatggagcagtgcttctgctgggatggtcaaggaaagcttcatggaggacgtagcaattgaaccaggttttgaaggttgaataggaatattgtagacacccttccttcccaacataggttgttagtaggacagattttcccattagaatatatcctctttcagatcaaggagtgggtgcaatgcctttctctatgctcagcacttagtaagggacttgacgtcagtaggttgttagcgaatgttttttgaatgaataagtgaatcagcgtgagtacttatcataaaacaccagtcaatgctaatttatagtggaaaccgagaggtaatcgagcagttgagaggtgggaggtggacagtttaatagaggaagactccctggagtaggtggccatcatactacatagatgcctgataaggtgacaaggacagaac

SEQ ID NO: 9431 - DNA, 6000 bp, Homo sapiens
ctaccaggaaagggggtccttggtgttcccgaccccagcaggagctgtggagggagaagtcagcgttgtaatggtgacctgtcagctgggagctttggtctaggcctggggggcccccagcatggcagaggggagctggggcatgggaggtgcacttgggcggaggagctccctgggactgggatggaggagaagcccccaccaagcctggcccagcagctcctgtctgcggctgcattggccttctctccatttcctctcctgggagatggagaaaccgagtccggagaccaccagggtttgcccagggtcactcagcaatggtggcagagcctctcaacccggagctgctcctgactcctctgtgtcctgatggctcccagggctgccggcccctcctctctcactgacactccccagagctgtggggtctgtgggaggcgagcagggtctgggtctctttaagctccttctccccagaaaatccccagatcggagcgaggggaagggcagcactccctggtcacagcagtaggaagggtggcctgcgtcaggggcctgggatcgaatcccagctcagcccctcactggctccgcatgaccttgactaggccactgtccatctgggggcctctctttgcccctctgtgtatcgggggccacccatggggatggtggggcgtgctcagccttttcctgttttgcctgtcctgggagaagctcacacaccagcgacccgggctgcagggatgggagggttccttttttttttttttttttttaagacggagtttcgctcttgtcacccaggctggaatgcaatggcacaatctcagctcagtgcaacctctgcctcccgggttcaagcgattctcctgcctcagccttccaagtagctgggactacaggcatgcgccaccatgcccggctacttttttcttttcttttcttttctttttttttttttttgagagtctcactgtgtctctcaggctggagtgcagtggtgcaatctcggctcactgcaacctccccctcccagattcaagtgattcttccgcctcagcctcccgagtagctgggactacaggcgtgtgccaccacgtctggctaatttttgtatttttagtagagacgaagtttcaccatgttggtcaggctggtcttgaactcctgaccttgtgatccgcctgcctcagcctcccaaagtgctgggattacaggggtgagccactgcacccggacgggagggttctttagctgggccacaggagagggtgcatgtgctgtggggagctgaccccattttactgatggggagattcaggcctaggggaggggtgtgcccatcttcaagttggtggcagagttggcccctgggacacctcagtgaagcttcccccaaccccctgcagctcctctcccagcccccaccctagactcccccaggagcctcccctctcctcataggcctgagaagcccaggaccctctgccctgtgagtgtgaaggtaccactcagcctgggagacaaatgggatggggtccgcaattaggggctccttggggccatacaggggaggtggtgggcacaggctggagaggccctggctgggggtgaaatggagcaggcagaggggctttgggcatccttcaaacctcgtgcccatggatacccttctgcagttatcctgagaaatgggcctcaagtccctcctcactgttcctcacggggagctccccatctccggggaagcccactcgtgtctggaaggttctgctaattgatccctgactccctctttccttcgccctgccctctggggcagagaaacccagcctgctctcagcaagacaggaggagtggcccacctccccctcccctaccccaaggctcctccagcctcagttgtcccaggcgaggcccgtgactgggaaacagaagatctgggttcatgtccagctccaccccttagcagctgcggaatctggggcaggtttttcacctctctgagcctttaccccctgccccgtaagggtgggcgtttgcctctgtttcttttttttttttttttgagatggagtctcgctctgttgcccaagctggagagcagtggcgcgatctcagcttactgcaacctccgcctcccagttcaagcaattctctggcctcagcctcccaagtagctaggactacaggtgcgcaccaccatgctcggttaatttttgtatttttagtagagatggggtttcactatgttggccaggctggtctcgaactcctgaccctcatgtgatccatccacctcagcctcccaaagtggtgggattataggtatgagccaccgtgcctggccctttgcatctgtttctgagggtgactgggaagatcctgtgagcctgtgagtgaatgaatgtatcatagctcgttgatatgaactactttgtgacccaaccactcaagggcactgctgggcctgatttccagacccccatcaccagccactgccttggggtaccacttctctggacagctgagcctcccccggccctccctcacccaggcccccagaactgctttggtgggcaaggctggctgagtgccagccccgccatgaggcttcagatcctgagcccacctgaccttggaaagggcctctctctggctgggctccaaggctgcccccaacagacacccggcagtggctgggcagcagagagagagaactgggtggggcagagagaggaccacttgccagagctgtcccggctccctgagacaacaggctagaggacagaggagaatggccagccagccacgggcggggccccacttagcagctacatcagcagcccggcagagcttactcctcacagtcaagtgggctgcctgagaagtgggtgagcgccctgtcctgggagatgtgtaagcaactgctgaatggcatctgttatcagggcaggagggggctctattaaaagacccggggaaaaaattggaaccagaccccaaagagtccctgttatttgggctgcagagtggcggtcctgtgagctggggggtctaacagacttttcccagtattcccccataacatccaacaattccccacatggttgtgtgtcacaaagcccggagtccaagcaccgcccgtcacagcttcaagacacacgccggatcccatttcaccgctcctaacccccactcaggccagtgctttaaaattgcacacaggtcctgccccgttagtgggttgggaaattgacttagtgagttgcactacttgttttccgaaaatgaaattaaaaagaaaatttcaaaatactatgcatgtagtgagggtaaatattattttgtgacgctcttacttcagctttaaatatatagccgggtgcagtggctcacgcctgtaatcccagcacgttgggaggccgaggcgggaggatggcaagaacccaggaggttgcaattgagctgtgatcgcatcactgcactccagcctgggcattggagcaagactctgtctctaaaaaataaatataaagtaagttaaaataacaaacaggatgtttgcttttactacggattttggtcaaaaaacttgaaagctactgtcctgtgtagaaatccaggaggcgccctgatagaggttctgatgctcaggttccgatttccctggatgtttggttcctaaagacataggtgccacaacttccaggatgctgctgtcctgccctcagaagtagccgcctgtcccttgctcagtggaccacccaggtccaggcacccatgctcctccagagccaccacctctccccagggcctagatcccaggccgggccaaattccctgctttccgctcagcccaggcccagccctgctctgtccttgtgccctcctgcttgccctcatcttcctaggaccttctctttatgccctttcacacacacacacgcacacacacgcatgcacgcacacatgcgtgcacggagctcagcaaagccggtttgtgacttacctgcttcccttcagcatacagtaggtgctcaataaatgttcactcaattatttacagaccgccctccaaggcaaggcactgcgctgtgttgagacacatctggcacctggcaggaaggcagatgctgttccagctcaggggacatttagggtgatgaatgaatggatggatggatgggggtcggctggagttggagattctctggcctgaggagccagtgggaaggtggtcagcagtaaagaggggcatgcagcccgtggccccccccatggcaggcgttctgtcagtgacagtcccttggggctgtggcccagcattgagtcatgggcaggggctgactgttcctcctgctgtctctggtccttctgaggcctgtctcccatgccctctcccactaggtcctgtacacatgtccctgccacccatccctgggtgaggccaggacatcctcccccgagcccctgacacctgggggacacctgggaagagaagcccatgctccgtggagggtgaggcagaggcatgagccctctgacatcctgtcctctgtcccctctgctcatggccattgtgctcatgtacagtgacacagagggtctcctggtcactgctcagaggccacctccgctgggaagttctccctgactaccgtgtcaaaaatagcttctccttggtcacaatgtgtcacatgacccagttagaccctttccgggaattttgacgggctgggttatcttgtttgtcagtcgttagatatttatgaagcagctactctatgccaggctctgggagtcggggtgaagtagggaggcaaggttcctgcctgtaatgatgttgcagatgagactggtttgactgctaagggctgccaggaagatctgagagctggatgggagggagggcctcggggcctcttggaacaggcagcctttgaatcaagacctgaatggtaggaaggcacaagcggtggagtcttggagaagagaatttcaaccagaaagaacagccagtgcaaaggcccagagacaggaataaacttggtgcgttaaagggacgggaaggaaggtctcttcccgtggttggagagtggagggggtgcagtcagagagggcaggacctctctgaggcggggcgttcatcccgagtgccctggggagacgagagctctgagcagggagtgatgtggagatggactgcgggaggtgggtggaggctgtgggaggaggtggtgggcagagactgtgggctgcaatagtgatgtggctctttggggtggatgactaggtgaggggacgtgtccggggccccgaggttcacccgctttgggcaagctcccaagcccactgtgggatgatgatgacagcacctgccttgcaggtgtggaccagtcagtgcatggccctcagtgaacactaagtgcatgttagttattaacccattgttattgcggttgggcttagggagggctggaggatgatgcctaggtgtcaggcctgagcgacctcctgggaggagtcacagactgagatggggaaggcaggagaggggaggacgggggcatggcttgggcttggcagtgccgggttcgcgatgcctcttcactgtccagcagacacagggagcaggagccaagtgggcttgtagctgcctgggagggaggcgcaggctaggtggtattttaagccacaggactggatgagatcacaggactggggagaagagaagggaggtgggatggcggagctgggcactgcacggtgtgggtcatggagaggccagaggcaggagagcaaggggcgacctggagagggaccctcaggcctggaggactcaaggaggaaaacgagggccagtccagagcctccatcagagctgctgagagggaagggggcacagaggagctctggagggggctgaggggagactaggaggtgaggaagagtggagagtaagtcatgcccttcaagaagggctgcaggccg

SEQ ID NO: 9432 - DNA, 6000 bp, Homo sapiens
tgatccattacagtatttcattaggagttggcaaatataatttttttctaattctataattccttctgcatttattatttttattattattttttgagacagggccttgatctgtcacccaggctggagtgcaatggcatgatcttggctcactgcaacctccaccttccaggctcatgtgatccttccacttcagcctcctgagtagctgggactacaggcacacaccaccatgcccagctaatttttgtattttttgtaaagacggggtttcactatgttgctcaggctggtctcaaaactcctggactcaagcaattcacctgccttcacctcccaaagtggtgggattacaggcatgagccactgcgcccggcccccttctgcatttattcgctaattattcatttattttttccttcatagagatgggttatcactatgttgcccaggctggtttcaaactcctgggcccaagggatccagttgccttggcctcccagtgttgagattacaggtgtgagccactgcacctggtctagctaattcttctatacacatttttccttcgtgaagtctttgttactatgagatagtttgtacaacaaggataggatacagacttaattctttccctttatcaattttcagaataatgaattggtactgtggtaaactccacatatgaccaataaggcgggtttttgttttagtgggtttttgtgtgtgtgtgtaactttaggaacgtatgcatttaatttatggatttttatttagttgatgtttcatcccgttgcaatcattattctttttgctcatattcttccacctttggccactgtgagcccctttaagttggcccgagtgcttttgtcacaacagtggtcttgaatagccttttcactttctggcatgacaaaatgtccaggcaggctcatcttgcatatttcctgccccagacttgtagttggtaaaaaatctcctttgggccgggcgcagtggctcaagcctataatcctagcactttaggaggtcgaggtgggcggatcacctgaggtcaggagttcaaaaccagcctggccaacatggtgaaaccctgtctctactaaaaatacaaaaaattagccaggtgcagtggcgcacacctgtaatcccagctactcgggaggctgaggcaggataattgcttgaacctgggaggcagaggttgcagtgagccgagatcgtgccactgcactccagtctgggcgacagagcaaataaataaatatataaattaaaaaaactcctttgtccccaggaatccttctttctgtaggctaaagagcattcctcacagtgtggtgtccacccagctctgttccatctcctgtcttactcttccagatatgatgaactatttatcacttccagacaagctgttctttcccaacataggacttagactatgctggttccttcaccttgaatgccctttcactccttatcccttggactcagtgcaaaagttgtcccttctctgactccttcttcactcactctggcagaactaatgaagatggcaggccctgtcatctttgagagcttggcaatttattgcagcagtcaaaacatatccttaactatttgtttactagacagcttccttccttaagggttgcaaacgcatctgatgcatacatagcaggcactgagctttgcccattgtggttatttcccaagcttgtcaaccttggtctcatctccttctgctctggcctctgtttagttcatttcaccaaacatttcacagagaaccctctagtaaataactagagaatatttactaagcacttactatgtcaaatatggtttacatacattatttcattacaacctgagaggtagttgttattatcctcattttacagatgagcaagtggaagctcagcggggtcactgaaggacccacagcaagggagtggccgaactgggatttctttcgtgggtctgactcccaaagccgtagatgttccctccacatcactgtccaccaaaatgtgctccatgatccatccacatgcaaaacctctgggaaatcattaaaatgcatgttctcagctgggcgtggtccctcatgcctgtaatcctcatactttgggaggccgaggtgggtggatcacctgaggtcaggagttcgagaccagcctggccaacatggtgaaaccccgtttctactaaaaatacaaaaattatctgggcctggtggcgcatgcctgtaatcccagctgctcgggaggctgaggcacaagaatcgcttgaacccaggaggcagaggttgcagtgagccgagattgtgccactgcatgccagcctgggcaacagagcaagactccatctcaaagtaaatgaataaataataaaatgcatgttcctggctggacgaggtggctcacacctgtaatcccaacaccttgggaggccaagacaggaggattccctgagccaggatttcaagaccagtctgggcaacatagggagactccatctctacaaaaaaaaatttttttaattagctgggtgtggtggcacatgcctgtagtcccatctaatctggaggccgaggtgggaggaccacttgacccctgaaggccaaggctgcagtgagccatgattgcatcactgcactccagactaggtgacagagtaagacactgtctcaagaaaagaaaaagaaaaaaaaaaaaaaagcatgttcttggattccacctctgacttactggggatggagaagtgaatttctttttcttttttttactaagatggagtctctcactgtcgcccgtgctggagtgcaatgttgcgatctcggctcactgcaacctctgcctcctgggttcacgcaattctcttgccttggcctcccgagtagctgggattacaggcacacaccaccacacccggctaatttttttaatttttagtagagacagggtttcattatgttggccagactggtctcctgacctcgtgatctgcctgcctcggcctcccaaggtgctgggattacaggcatgagccaccgtgcccagctctggaaaagtgtgtttctaataaacctccctggggtgattttaacaattatcatcattattttgaatcggtgaaacatacacacagtgaaacatacacagtaaaacatacaaaaggttcaaagtgtgagtgaaaagcaagcattccacctcatttctcagttgtccagttctgtcccccactacaccccagaggcaatcacttttccttggggggactcaccatgctgaagtttgagggtcaccgtcatacatatgagatagaccaagatggggggctctctgcactccagagctcacagcaaaattgcaggtaagaccaccattcaaagacaagtgcctgaggaaggggtctcaaagtcaccagcaaagatgccagcggctcctgctcagtgcatgtctgcacctcctatttctaggaccttccaatctgcttccttctggggaccacttcacgtaggaagcagtccctacacaggttatcttgtcacaagcaaagatcaggaatggataggtgggtaaggggagagtaagacgtgatggtgagctaagaggagtctgcagagaggtctaagcttgaaaagtctggacagaaacccaatgttcagtctttccatttgtatttctgattatttgtagtaaccatcaactttcgtcatttggatagattcttaagaaaaaaaaaaaatcactgatggctgggcacagtggctcacgcctgtaatcctagcactttgggaggccgaggcgggaggatcctggcctgaggtcaggagttcaagaccagcctgaccaacatggtgaaaccccgtttctactaaaaatacaaaatttagctgggcatggtgcgggccgtggaattccagctactagggaggccaaggcaggagaatcgcttgaacctgggaagcggaggctgcagtgaaccaagatcacgccactgcattccagcctgggctaccgagtgagactcagtctcaaaaaggaaaaaaaaaaaaagcggaaaaaaaaattcgctgatgttttaaccattctggggtcacagcctcctttgttatggacctactctggaaaaatgcacagacaggtaaacctctgcggaagcctcacagactgccagcctacccagggatcccgggaggtccaagttcagaatcccactttgagatgtttcttgtactaaaacgcttggtttacaaaaagtcttcccctatttgtttagagaacccgaacgatgtcgtcactggcagcgaagcgccttggcatgaaccgtaggccagctggctcaggaggtggaggcggtgaggcggccacttggggccaccgcttctggcggccgcaggagcgacccacagacaggtaatggctgccatggggggcggggcgtcgtctttagcctttagcgcccctgtgcttcgtgcgcatttcgtggcctctgggtgccgtacctgcttcccacccggctttcctgggtggcggagagcgaacccaccccagcctgggttgggggagggggcgtcggcgcagggtcccgtgggcagagctgcgctgggagctggcgggctccgcattcatcattgttcctccagcgcctggcacggctgggccgaagcagagaccgtggcctgaagcgcgccatccccttcggagttgaccgaccaccaagctcttccgcccacaggtgttgtcagagctccttccaccggccggacctaggaaggacccagggtccaaacatggcccgaggctggccgagagcacaacagccggcgggcgctgacgggcacggagcgcacgggaccgcggaggaacccgcgcgcgcccccgcctcgcgccgcgcgcacgtgactgcgcccccggccccgcccccggcctgccccccgcccccactggccgctcggccgcgcgcgggtcggccggctctatggggaaagcggcggctccgagccgaggcggcggctgtggcggccgctcccgcgggctctcgtcgctgttcacggttgtcccctgcctgtcgtgccacacggcggcgccgggcatgagcgcttccacgtccggctccgggccggagcccaagccccagccccagcccgtgcccgaaccggagcggggaccgctgtcagaacaggtgtcggaggcagtttcggaggcagtgccaagatcggaacctgtgtccgagacgacgtctgagccggagccaggggctgggcagccatcggaactgctgcaggggtcgcggccggggtcagagtcaagctcaggtgtaggggctgggcccttcactaaggccgcatcggagccgctctcccgggcggtggggagcgcgacctttctcagacccgagtcaggatcgctgccagcgttaaagcccctgcctcttctgcgaccaggacaggcgaagactcctcttggggttccaatgtcggggactggcacgacctccagtgccccactggccttactgcctctggacagcttcgagggctggcttctcaagtggaccaactatctgaagggctaccagcgccgctggttcgtgctgggcaatggtttgctctcttactacaggtatggaagcgccagggtgggacatgggggttggagggtggtgatgctgcagggatggtgatggagggcctccatggttggcggacactgccactagtctagagatgtttaggggcatgcattccagcaggccaagtcacgcttctggcccgccgccaagggccgggggccctgacctctggcaagggtgaatgtgatctgcggacatgacctctggcaagcttgggtttttgggcaagtggggaggtggagtaagggagtgatctggggcctcagttcccttctgcttggcagttgtggggcttggggcagctagctagagtcagcccctcaaagtccttgccctttctggttcgggagc

SEQ ID NO: 9433 - DNA, 6000 bp, Homo sapiens
caggagaatcgcttgagcctgggaggcagagcttgcagtgagccgagattgcaccactgcactccagagcaagactctgtctcaaaaacaaaaacaaatagtactgcaaaggctttgaaaatggaacaaacagtgaaaccaccacccagagacggctggtcactacctgtggccttaacccaacttatttgatagactgctaaaatgaaaatatcaaattaccaacatcaggaatgaaataaacaattaatagcactaacaaacataaaaggacaatactacaaaaacataaaatagatacataatacataaaaggaatgctacagacaactctgctgacaaatttgacaacttggatgaaatgaaccaattcttcaaaaatcaaattctaacacttgcccaagatcaaatccataaactgaataatcctataactattaaagaagttgcattcatagtttaaaacacttcaaaaaagaagtcttcaggcctacatgatttcacaggtaaattttatcaaatatttgaaaaaagaataacactatttccacacaatctcttccagaaaacagaagaggaatgagtaatttcttttcttttttaatttttcttttcttttttttttgagacagtgtctcgctctgttgcccaggctggagtgtgcagtggtgcagtcttggctcactgcaacctctgcctcccaggttcaagcagttctcctccctcagcctccttagtagctgggattacaggcatgtgccaccacgcccagctaatttttttttttgtatttttagtagagacagggtttcaccatgttggccagggtcatcctgaactactgacatcaggtgatccgcctgccttggtctcccaaagtgctgggattacaggcgtgagccactgcacccggctttttttttttttttgagacagagtcttgcactgttgcccaggctggtctcaaactcctgacctcaagtgatctgctcgccttggcctcccaaagtgctaggattacaggagtgagtaatttctaactcatttataaggacagcataccctgataccaaactgaacaaagatagtgtaagaaaagaaaacttcggaccaatatttctcatgagcatagatgaaaacatcttcaacaaaatattaacaatttgaaaccagcaatacaatagaatattacaccatgatcaagtggatttcatgctaggagtgcaagatgagtgcaagataggtgcaagataggttccatgtttgaaaatcaataaatggggctgggggcagtggctcacacctgtaatcccagcactttggaaggccaatgcaggcagatcacttgaagtcaggagttcaagagcagcttggccaacatggtgaaaccctgtctctactgaaaatacaaaaattagccaggcatggtggtgcacacctgtagtctcagctacttaggaggctgagtcaggagaatcgcttgaaccctggcagggcggaggttgcagtgagtggagatcgcaccactgcaccccagcctgggcaacagagcaagactctgtctcaaaaaaagaaaaaaaaaagaaaatcaatataaatggaatcataatattaacaatctaagaaaaactacattataatatcaattgatacagaaaaaggcatttgacaaaatttaacattattcatggtaaaaactctcagcaaactaggagactcctccacctgattaagggcatcttcaagaaactgacatcatatgtagtgatagaagactgaatgctttactttccgcctaggatcagtaaagtcaaggatgtccatgctcacccctcatattcatcctaatactagccagtattataatgcaagaaaaaagaagtcaaaggcactcagattgggaagaaagaaacagagctatccctatttgcaagcgacatgatggctgtgtagaaaaatcccaggaaatctacaaaaatatttttagagtgagtttaacaaggtcacagaatacaaggtcagtacataaaggccagtcatatttctgtgtattagcaatgaacaattggtaacaaaaaatttttaaaaatcacttacaatgaccccatgaaatacttagatataattataacaaaacaaatatagtatctatatgtaaatagtgttaaatactgatgaaatagaagaccaaaataaatggagagacatacaatgctcatggatcagaagattcaagagagtaaagacgtcagttttcccttgactgatcagtagcttgaatgcaattccaaaaaaaatcccagcaggacattttctcagcatagacaaacttattatacatttatatgaaaagataaagaaattagactagctaaagcaactttgaaaaagaagaataaaggtggagtaattactcaattttaagacttatcataaagaaacaagacagtgtgatgttggcaaacactatatagattaatgagatagacatatacattaatggaacagaatggagagtccagaaatgggcccagacaaatatggtcagatggcttttgacagaggtgcagaaacaatttaattgagaaaggttagtcttttcaacaagtagtgttggaacaattggacatccatatgcaataaaatgaatcttgatttatacttcttatttatataaaatttaactcaaaatgtaaaccatacaactataatactcccagcagtttgggaggccgaggcgggtggatcacttgagcccaggagttcgagaccagcctgggcgatatggcgaaactccatctctacccaaaatagaaatattagccaggcatagtggtgtgcaactgtagtctcagctatttggaggctgagtcaggagagaatcatttgaacctgggaagcagaggtttcagtgaaccgagattacactactgcactccagcctgggtgacagagtgagactccatctcaaaaaataaaaaataaaaaataaaataaaaataaaatgcaattttgggccgggcgcggtggctcacgcctgtaatctcagcactttgggaggccaaggcgggtggaccacgaggtcaggagatcgagacatcctggctaacacggtgtaaccctgtctccactgaaaatacaaaaaattagccgggcgtggtggcgggcgcctgtagtcccagctactcgggaggctgaggcagggggtgaacccaggaggcagagcttgcagtgagctgagattgcaccactgcactccagcctgggcaacagagcaagactccgtctccaaaaaaaaaaaatgcaattttgatttatgtctcttctctggctcctcttgcgctctagacccatccagcttctgctgtcttcactggcacaccatcttgctgccagccagcgtgaatgctgtacctcttgttggcaaggtctgttccctagtatccagccccttcccacaccctattttcctcaagtctgtttaccctccagggagaggccattcaggaaagccttctctgagccagcctcctgcctgggccagatgtttgctcccaggtgtttgctccttggctcagcccctcgagcatggtagcgtagcagttagtctgagcatgggcttcctagagcctcagagtccccgcttgtcagtcccctagaagcttcaattctgtgcttcccagggtcccttcaatcaaagatttctaagtcagtggaagcagagatgctggagccagcctgcctgggttcaaatcgtggctcccacacttacccactgtgtgaccttggacaagttgcttgccgtcttttgcatcatttctctcctttgtaaaatgggtttcatgatagaaccaactcttagaggtgctgtgaggattagtttagataatgtgtgaagagatcttggcacacggcttggcaaacactcgactaaagtaagctgcagttattgatagtcactttcgcagctttaaaataatacaggttcccaagaagtcccctgccctgctaaaacagaatgagaatgacttttgggtgcagagggtatttgtattttttttcaaaagctccttgagtgggattggcagattcaaaatatacaaacacaggttggccgggtgcagtggcttacgcctgtaatcccaacactttgggaggctgaagtggacagatcacttgaggtcagaagttcaagaccagcctggccaacatggtgaaacctgtttctactgaaaatacaaaaattatccaggtgtggtggtgcatgcctctaatcccagctacttgggaggctgaggcaggagaattgcttgaacccaggaggtggaggttgcagtgagccgagattgagccactgctctccagcctgggcaacagagtgacagaaaaaaaaaaaaaaacccacaggtcacccagtttaatttgagcttcaaatacaaaacgaataatattttagtataaggatgtctcatgcaatatttgggcagtctatatactaaaatttatttattgtgtgtctgaaattcaaatgtaactgggcatcctgcattttatctacgagcatttaaccctatcctgggggaccttgacccccagcccacttggggtctctgctcccaactccctggtccaaaggcaaacctccaagtcagaaaagagatagtatccttttacttgacacaggggggcgctagaagatggcttgttcgctttcttttctgtaactcagtgtctagggaagcaccagcaggttggctggcttgcaacaaatctctccgtacctgtgagtcattttctgatgttcaggtttgtaagaaaccgatacagagctggccacctccctcttgggccttcacttctggggggctagcctagcgcctcaggggctccccggttctcgcctcccctaggctcgcctaccctccattgatgtcataactctattctgatatcacagcccagcacttggaattatcccaggcagcccaggctctgcccttagagcaactagagcaggcagtagagtggggtgggcggggatgaggagggggttgggtggctggtggccctagaggctggccctaaagaatacctggacagcctgccaccctattgctccaaaatgaaaatcctctaacaggtaggacttggaagaatttcctcctgttcctgttgggtgtgatcccactgaggtggaaataaattcccagggagtgtggcgttgttctggctctgtaaacagctctcgggaaccctgctgcctgtgtgcctggggatgcaagtgggcttggtccacttaacagtcctctcttcccgtttgaaggaatgacttcacaaagcacagtgtttcttacttgttgggggagacattccttagggcttggagaatgcctgcagatactgatccaggttcttctgtggccactgcctctgtcctcactccctaagaagatggatgggaacagggttatgctctccttagaacaaagggaaaatataggtgcattcaagctattgaccctcagacccctcagtcctgaggaggagagaagccccatcctcccagctggccagacagtataaagaactctcttatgaactcacttgagtgaaaatttgactggtatggattaaacaacacaagaaaagaaaactgaataacttctctcttactttgagggacatgaagtcttcctgggggagcatgttaaaactgcagattcctagggcaggaccactgagattcagatccgatggtcatatggcacctagggacccccattttaatttttatttgttttaatttaatttaaattttttttatagagacagggcctcaccgtgttgcccatgctggtctcaaactgctgggctcaggcaattttcctgcctcggcctcccaaagtgctggattacaggtgtgagacacccggccctcccccatttttattttttatttttatttatttatttttgaaatggagtcttgctctgttgccc

SEQ ID NO: 9434 - DNA, 6000 bp, Homo sapiens
gatgggaaaggggatgagtgttccatgcattgcgtggcatgccagacattctgcatgcacctcccctgcccctactctgcaggcttacgcatagggagaccaaggctgaggggctcaggatcccagctgaaaaggatacaagcccataccttcctgattccagagcccactacactgctgcattatggtagagaaataaacctgaccctccccttgatcagggtcaggaggtcaggaacacctcccctgtctaccctcaccctgcatccctgtcctggcaccactggccacccaccttctgcaggcctgcagagtctcagagatctttccactgcagcatcttcaccctgtccttcctgcaagggcaggacgcagtatctctcacaatccccgtagccctgtagcctctatgcctggctcagagcccagcacatgggagcctcagcaaatgagagagagagaggaggggtggggagaatattgtgaaaaatcacaggagcaaatgaatgaatcgcttagtgtctggcaaaattccctagtgggtaattttttttgactctgataaaagctagcctagcagatccgtgcttgaattactgttttgggtaactgtgaattctcctgccatttaagagaaaccccgtaggactattaaatgactttggtttttagaatgagtcttgaaccataacgtgcctgcccacaggtgctcggccaggcatgaggtggggacattctccctcatagcagcgtcctccctgagcaccagggtataccttgtacagtggcactgcctctgtcacttggcttaaggtggagaatgattgagttcgtacatattacaagctcaggcttggagtgttagcatccataaagtgaaaaagctgcgggagcaggttccgtctgcaggccagggcagcagagcaaggctggggcgtgctctcccctgcagtcctgagccccctaggtgggctggcagctgggctccatcctgcttcttagcagcctgtgggcttgttcctgctgctgtccctccagtccctgcaggcggggcccaggcaagacagactgcacctgactcgacccccattcctgaacttggaaggctcctcatagttggtcactcatgctgggcctaggacatggtccttctgaccacatgaccccctgtggcacttgggaaccttgagctgtgagggtgaacacagccccagccttgtgggccccgcaccctcctgtgggagctgtaaccacataggtgatatgggatgtcagcggcaaaaggacctttaggggaaagagccagtgaggtgggatggggtgaaaggccacaggtgcagacaggctgggggctaagcaggggcacaggtgccaggcaccctggagtgcgcactgggagccacaggaggggaggttggagtgaagaggaggccagtcacaagggaccttgtgctgacagtgttctgcttccacttgaaatgagacaaaggactcaatgccaagtgactcaatgccaatgtcaatgactcaaggccaaataaaatgatcccacgtgcattttagcaagacccctctgctgtttggagaatgcgctatccgcgaggcaggggcaagtgctcggagacccttcgggggccccttgggcagagaaagtagagctggcgcccgtgagagtgggcagtgctgctctgagctgaaggcagggacagcagagttgctgtgtggttgagaaaagaggccatggggaaggaccccatgctgggggcctaagccgctagagaatgggggccttgctgtctgacgccctgcttggcccacacatggttccgcaggatgcaggagggtctttcccaggagtgggttttgtgtagccagtgagtgggcagagctagcttgcagagctagctcgaggtgcccagtgcaggcagaaagcagggctgggctggccaacagagggtagatgcttaccaggcctgatgggagagatgccgcactcttggtccctgggtttaccaaggaaggtagcatccctcaggagacacactttggtgcctgccgcagggctggctgggcagtatggggtgcctgcgacatcctgatggcaaggacatgggaaaacctggggaggaagggcacccggcacagccagcactcgatggagtcggctcgggggacactccacttggggacactccagctgcaagggcaaagtatgagggggaagtaggagacattgggggcaccagatagagtgggcactgggggtagccaggggctgctgggaagagggtcacaggaacagagacagcaacctggggccctcagacagggcttctgatgtggggcatcatagaaacaaagacccgcatcagaaggggccccactgctggacatgctgaggcttctctgaggcccctcttggctcacggcccaggagatcacgtggggctccttaggccaacccaggcaggggtgagaggcccggagctgccctcccttgtccctccggggcctgtggggcaggtttctgcccagctgaccaccgtcctgctctgacagcttgctcatccagggcctggggagatgggtaaaaatagattccagatttgtctaaaatcagttggcaaactggaagccagatggtgttggttcctgtgtgcgagtggcaaactattttgaatgtggagaggctattttaaagttttaattggactggaaagctgcttcaccagtgccgagagtgagtcaagtcaaggagacattctgatcgacccccggtggggactgggaagggctgaaacccctgtgtgctaccagcctgggccaagcgctcctgtgaggagcaggccctggaagctccgcctcgggggtcaggcaggtgatggagacacagcatgacagcttggctgggccaaagggatccccgggggagcccagcacttccccttgtggctccatgggtccccagtctgggtcttggacacttaagaccagaatcgcagtgcagctccttcctgcctttgtgaggcacctgctgagcttgggtttcatcttgtgtaaagtgaagccaagccaggcatggtggctcatgcctgtaatcccagcactttgagaggccgacgcgggcagattacttgaggtcaggagtttgagaccagcctggccaacatagtgaaaccctgtctctactaaaaatacaaaaattagccaggtgtggtggcaggtgcctgtagtcccagctcctcagaaggctgaggcacgagaatcgcttgagcctgggaggcagaggttgcagtgagctgagatggcaccactgcactccagcctgggcaagagcaagactctgtctcaaaaaaaaaaataggtgaggccagcccgccactcctcaatggcaggggaggcaagatcctgttactccagtgagtcccctggccatgcagaggggttcagggagaccctgactctctgcgatctcaccgctcatcaccttcagaaccccaggctggtgagaggcagggtctgtggcaacaagggatgtgaggatcagcgtggagggtgggtagccttggccctagaaacctggagagcagagggtcctccggccgcccacctgggagcccagagccagagggcagacacgtcagatgcctggcaggtcctggaccagccgcagataagaacacggccctttctcccattatccctgcaccaggggtgctgggacctcctgtgtgtgctaatggctggagccagtttcctagcctggaccatatgggcatttggcccatctccccacctcctccgtgagcccagtggctgcccacgtcaatgcccagcaggcctctggtgcctccctcacatccctgtctagaagggaagtttccaggaagccactgaaggccagacagggtcctggctctgcatgctcccaagagcctgagaggctgccctaggtcacacacaggggacccaggctagctgacctcacaccttgctctcccgcctggcctggggagcagtgagatcactgtcaggattaggattaggattaggaacagcaaaagcgattagagtttgtcctcctcttcctggggtgcatctgggcaaaggtttccaggtcagagatgctcaatgtctgtcccatggggcaccggtgaccagcagcaacccctgctcagacctcacatggcatggcccctgacttggtttcccctgggtgggcagcccttacagccttcttccccaggccagacttctcagtagggagagtccctggtggtcaggcagggcctggactccccaggtggggctgccccagggcggagaccccccttgtctgtcgagctttgtggttctcactctgcttgggggcaactcgacaggctccctgccctccccatggagacaggaccacactgcccaggggctctgcaccccaggccggcccctctgcatctcagagcacccatacccccaacacccctttcaccagaaccctctgtgcagcacttgggggtaggcagaaggggcagggccaggacactggaactctgtccccacgctgaggacaatcaacctgacaggtcacagaatcagggactctgtaggagcccaggagggcgccaggagattacaggcctgtcccaggattgggcagtggggtagcacccatgcagggcccaggtaccacctccagctcccactaggacccctcactctcttccccttaaacaattcaggacacaaatgtgcgggtagggggcttcaggtcagcccgtctctcctcctgctcacagctgagcacgagtctcctggccccaggtagagttgtcacacagcctcagagaaatgagaccacgttcaggcctgggctgggtcagccaggccctccctgggcccctgggaacctccccctgccagtccctctgccgggccccaagcctaatccagcttatcaagcacacagcacacagcccagctcagcattctgagaacagcagggccacgccaggcgcctgcctctccccacagcacagccaggatggggcctggagaaggccggcagcagcagaggagaccctgggagtcagggatggacaccaggtgggtgcatccgggctgggggaggtggacgggctctctgcatccatggggtgaccaggcagctcatgtgctgtgggggtaaaggtcttgggtgcagccacatgaggcctttgatattagggcacagcagttttcaccctgccccgcttttaggtgactgtgacactctacgacctgcatgtgcccagcctaggcacatgtacccaaatgaggcccagctgtcctagggacttcctgtctccctgctgcacgatgccagctggccctttggtagccttgagggggactgaggtcactcacggccagtgtatcagccagcaaccctggctgtgtgtacaaagtcctcagctggggctaagggtgctgggaggccaccccttctccctgaggctagggctgggctctgttgcttggacagggttattcccaggcagcctggttagtgaatatctcccaggaacctagctccacaccaggaaggctctgggatcccacaacatccctgccctcaaggggctcccagacggcaatcaagatttggctttacaaagtaaaccctaacagcactggttccataccctgggggacatgcaggtgagatgctcagggacttggatcctggccctacacacacctccttgtggccttgggcgagtccctcagtcaccctgagccttcatttcctcctcggtcatgcacactataaaaaaaaaaaaaaaatctacctcagtgcttgtaagaatgcctgcaatgccctgccccacagtgggcccgcggtgtgagggaggtggggctggcatcagaatcagcaggagggtttgaatttgagccagggaaaggcaagaagacaggatacctggtgggccacactcagggccctgggaaggaacggagccc

SEQ ID NO: 9435 - DNA, 6000 bp, Homo sapiens
gattccacccgccttggcctcccaaagtgctggggttacaggtgtgagccaatgtgcccggactttttttttttttttttttttgagatgaagtttcactcttattgcccaggctggagtgcagtggtgcgatcttagctcactgcaacgtccacctcctgggttcaagtgattctcctgcctcagcctccctagtggctgggattacaggcgtctgccaccacgcttggctaatttttgtatttttagtggagacaaggttttgccatgttgaccaggctggtctcgaactcctgacctcaggtgatccacctacctcagcctcccaaagtgctgggattacaggcgtgagccaccgtgcccagcagtatttttttaatggtttgtttgaatcaggattaaaataaagttcacacacactgtatctggttgatacatctttcgaaactttataacattttccaattcacctccttttcctaggccatgcatttattgaataaaacttgtcgttaggatgtagatttttctatttttggatttgactgactgactccttctgccatttagcatgttcctctgtctcctgcattttaaaagtactgttcaaactaaaaactaaacagatttagtttttttgaatggagggaggtggtataaaaataatcataggtggtgctgtttttcctgtttggtcacatggggggaggcacattatatcctgttgcactttttgtgatgctaagatcaacaggtagaatcagctgatgtcagcctgatcctttcagacgttccccatcaaccccatcacttagttaactattggtgattatttgatccattacagtatttcattaggagttggcaaatataatttttttctaattctataattccttctgcatttattatttttattattattttttgagacagggccttgatctgtcacccaggctggagtgcaatggcatgatcttggctcactgcaacctccaccttccaggctcatgtgatccttccacttcagcctcctgagtagctgggactacaggcacacaccaccatgcccagctaatttttgtattttttgtaaagacggggtttcactatgttgctcaggctggtctcaaaactcctggactcaagcaattcacctgccttcacctcccaaagtggtgggattacaggcatgagccactgcgcccggcccccttctgcatttattcgctaattattcatttattttttccttcatagagatgggttatcactatgttgcccaggctggtttcaaactcctgggcccaagggatccagttgccttggcctcccagtgttgagattacaggtgtgagccactgcacctggtctagctaattcttctatacacatttttccttcgtgaagtctttgttactatgagatagtttgtacaacaaggataggatacagacttaattctttccctttatcaattttcagaataatgaattggtactgtggtaaactccacatatgaccaataaggcgggtttttgttttagtgggtttttgtgtgtgtgtgtaactttaggaacgtatgcatttaatttatggatttttatttagttgatgtttcatcccgttgcaatcattattctttttgctcatattcttccacctttggccactgtgagcccctttaagttggcccgagtgcttttgtcacaacagtggtcttgaatagccttttcactttctggcatgacaaaatgtccaggcaggctcatcttgcatatttcctgccccagacttgtagttggtaaaaaatctcctttgggccgggcgcagtggctcaagcctataatcctagcactttaggaggtcgaggtgggcggatcacctgaggtcaggagttcaaaaccagcctggccaacatggtgaaaccctgtctctactaaaaatacaaaaaattagccaggtgcagtggcgcacacctgtaatcccagctactcgggaggctgaggcaggataattgcttgaacctgggaggcagaggttgcagtgagccgagatcgtgccactgcactccagtctgggcgacagagcaaataaataaatatataaattaaaaaaactcctttgtccccaggaatccttctttctgtaggctaaagagcattcctcacagtgtggtgtccacccagctctgttccatctcctgtcttactcttccagatatgatgaactatttatcacttccagacaagctgttctttcccaacataggacttagactatgctggttccttcaccttgaatgccctttcactccttatcccttggactcagtgcaaaagttgtcccttctctgactccttcttcactcactctggcagaactaatgaagatggcaggccctgtcatctttgagagcttggcaatttattgcagcagtcaaaacatatccttaactatttgtttactagacagcttccttccttaagggttgcaaacgcatctgatgcatacatagcaggcactgagctttgcccattgtggttatttcccaagcttgtcaaccttggtctcatctccttctgctctggcctctgtttagttcatttcaccaaacatttcacagagaaccctctagtaaataactagagaatatttactaagcacttactatgtcaaatatggtttacatacattatttcattacaacctgagaggtagttgttattatcctcattttacagatgagcaagtggaagctcagcggggtcactgaaggacccacagcaagggagtggccgaactgggatttctttcgtgggtctgactcccaaagccgtagatgttccctccacatcactgtccaccaaaatgtgctccatgatccatccacatgcaaaacctctgggaaatcattaaaatgcatgttctcagctgggcgtggtccctcatgcctgtaatcctcatactttgggaggccgaggtgggtggatcacctgaggtcaggagttcgagaccagcctggccaacatggtgaaaccccgtttctactaaaaatacaaaaattatctgggcctggtggcgcatgcctgtaatcccagctgctcgggaggctgaggcacaagaatcgcttgaacccaggaggcagaggttgcagtgagccgagattgtgccactgcatgccagcctgggcaacagagcaagactccatctcaaagtaaatgaataaataataaaatgcatgttcctggctggacgaggtggctcacacctgtaatcccaacaccttgggaggccaagacaggaggattccctgagccaggatttcaagaccagtctgggcaacatagggagactccatctctacaaaaaaaaatttttttaattagctgggtgtggtggcacatgcctgtagtcccatctaatctggaggccgaggtgggaggaccacttgacccctgaaggccaaggctgcagtgagccatgattgcatcactgcactccagactaggtgacagagtaagacactgtctcaagaaaagaaaaagaaaaaaaaaaaaaaagcatgttcttggattccacctctgacttactggggatggagaagtgaatttctttttcttttttttactaagatggagtctctcactgtcgcccgtgctggagtgcaatgttgcgatctcggctcactgcaacctctgcctcctgggttcacgcaattctcttgccttggcctcccgagtagctgggattacaggcacacaccaccacacccggctaatttttttaatttttagtagagacagggtttcattatgttggccagactggtctcctgacctcgtgatctgcctgcctcggcctcccaaggtgctgggattacaggcatgagccaccgtgcccagctctggaaaagtgtgtttctaataaacctccctggggtgattttaacaattatcatcattattttgaatcggtgaaacatacacacagtgaaacatacacagtaaaacatacaaaaggttcaaagtgtgagtgaaaagcaagcattccacctcatttctcagttgtccagttctgtcccccactacaccccagaggcaatcacttttccttggggggactcaccatgctgaagtttgagggtcaccgtcatacatatgagatagaccaagatggggggctctctgcactccagagctcacagcaaaattgcaggtaagaccaccattcaaagacaagtgcctgaggaaggggtctcaaagtcaccagcaaagatgccagcggctcctgctcagtgcatgtctgcacctcctatttctaggaccttccaatctgcttccttctggggaccacttcacgtaggaagcagtccctacacaggttatcttgtcacaagcaaagatcaggaatggataggtgggtaaggggagagtaagacgtgatggtgagctaagaggagtctgcagagaggtctaagcttgaaaagtctggacagaaacccaatgttcagtctttccatttgtatttctgattatttgtagtaaccatcaactttcgtcatttggatagattcttaagaaaaaaaaaaaatcactgatggctgggcacagtggctcacgcctgtaatcctagcactttgggaggccgaggcgggaggatcctggcctgaggtcaggagttcaagaccagcctgaccaacatggtgaaaccccgtttctactaaaaatacaaaatttagctgggcatggtgcgggccgtggaattccagctactagggaggccaaggcaggagaatcgcttgaacctgggaagcggaggctgcagtgaaccaagatcacgccactgcattccagcctgggctaccgagtgagactcagtctcaaaaaggaaaaaaaaaaaaagcggaaaaaaaaattcgctgatgttttaaccattctggggtcacagcctcctttgttatggacctactctggaaaaatgcacagacaggtaaacctctgcggaagcctcacagactgccagcctacccagggatcccgggaggtccaagttcagaatcccactttgagatgtttcttgtactaaaacgcttggtttacaaaaagtcttcccctatttgtttagagaacccgaacgatgtcgtcactggcagcgaagcgccttggcatgaaccgtaggccagctggctcaggaggtggaggcggtgaggcggccacttggggccaccgcttctggcggccgcaggagcgacccacagacaggtaatggctgccatggggggcggggcgtcgtctttagcctttagcgcccctgtgcttcgtgcgcatttcgtggcctctgggtgccgtacctgcttcccacccggctttcctgggtggcggagagcgaacccaccccagcctgggttgggggagggggcgtcggcgcagggtcccgtgggcagagctgcgctgggagctggcgggctccgcattcatcattgttcctccagcgcctggcacggctgggccgaagcagagaccgtggcctgaagcgcgccatccccttcggagttgaccgaccaccaagctcttccgcccacaggtgttgtcagagctccttccaccggccggacctaggaaggacccagggtccaaacatggcccgaggctggccgagagcacaacagccggcgggcgctgacgggcacggagcgcacgggaccgcggaggaacccgcgcgcgcccccgcctcgcgccgcgcgcacgtgactgcgcccccggccccgcccccggcctgccccccgcccccactggccgctcggccgcgcgcgggtcggccggctctatggggaaagcggcggctccgagccgaggcggcggctgtggcggccgctcccgcgggctctcgtcgctgttcacggttgtcccctgcctgtcgtgccacacggcggcgccgggcatgagcgcttccacgtccggctccgggccggagcccaagccccagccccagcccgtg

SEQ ID NO: 9436 - DNA, 6000 bp, Homo sapiens
ggtgtgagccaccatacccagccaatgctgctatggatattggtgtacacgtatctctttgagaccctggtatatgcccagaagtggaattgctgggtcataataataatcctatttttaatattttgaggaacctccaccctattttccacagcagctgctcaaccattttatattcccaccaacgctgagttttaaattctccacatccttgccaacacttgttattttcagttttttagatggtagccgtcctagtgggtgtaaggtggtatctcattgtgcttttgatttgcattttcctaatgattaatgaagccaagcatcttttcatgtacgtattggccatttgtgtatcttctttggataaatgtctactaaagtcctttgcccatttttgaatcggattgggttttttgttgttgagttttaggagttctgtattctgtatattaatcccttaccatatatatgatttgcaaatattttctcacatcctgtggttttgtttttactctgttgatagtgtccttggaggcataaattttttaattttcacgaagtccattttgtctatttttgttatcgtctgtacctttggtatcatacccaagaaatgtttgccaattccaatgttgtgaagcttttgcactaaggttttgcttataactgttttatagtttcagctctcacatttcagtctttgatccttttgagttaatttctgtatatggtgttaggtaaaggtttgatttcattcttcagtatgtggatacacacttttcacagcaacatttgttgaaaagactattttttacctactgaatggtcttggcacacttgtcagaagtcatttgatcagctgggcatggtggctcacacctgtaatcccagcactttgggaggccaaggcaggcagatcacctgaggtcaggagttcaagaccagcctggccaacatggtgaaaccttgtctgtactaaaaaatacaaactttagctgggcatggtggcacacgtctgtagtcccagctacttgagaggctgaggtggaacaatcatttgaacccaggaggcggaggtttcagtgagttgagattgtgccattgcactccagcctgggtgacagagtgagactctgtctcaaaaaaaaaaaaaaaagaaattatttgactatacatgcaaaggtttccttccttccttccttccttccttccttccttccttccttccttccttccttcctttctttctcttttgagatagggtctcactgtgtcgcccaggctggagtgcagcggtgcaatctcagctcactgcagcctctgcctcccaggttgaggccatcctcctgcctcagcctcccaagtagctgggactacaggcgcccaccaccacacccagctaatttttgtatttttaatagagacagggtctcaccatgtcttggtcttcgagaccaagctggtcttgaaaaacccctggcctcaagtgatctgcccggcttggcctcccaaagtgctgggattacaggcgtgagccgccacgcccagcctgcaagggtttgtttctgaagagccattggagttttagggctgaaagatactgcaggcagtagttaattcaatgccttcttattacagatgaggaaactgaggcccaaagacaaagggcaacttgccctgggtttcgtagtgacagagctgaaagtacatcctaggcctgactccacatctgatgcttttaaaagctagttgttagtttgctttgctcctagaagagtgttatctcagttactatttcgatagaagtggcaaatgcctttttcattctgcagaaaatgtgtgtggcttacccatcctcttcaccactcctgtggagcagtccatcactggcagctcctgtattttgaagcattactgtggcaagaataggccacctgttttgtgggtttctatttgccctgacatttagtttgcagagtttgaaagggtcctgaatatagctatgtaataacctactacagaatgccttcccagtgcacatttgtctttattgcctacagcaaggaacttgatctttgaaatttttagcaacctagagcctctttccgtcatgcctaccagtaagacagacctgggctaggctaccgtcccaagggttgtcttggcagaggctgggttgggggtgagaataggggcaacggggaatatgaattagacaaaattccaaagcagatttaaaattatgccattcttggtatttcctggctgggtttgctcattcaagagctattaagcccctcttagtggtattgtggacactttgctgggagctgacaggcccctcacaaaaccagaaggcaagaactcatagattttctggaggagcttacgagagggggcagggacccagggaagaggctgccatgtgggaccaaggagagaggaggagggctgggtccaggcctcccgaagtgtcagaaggaaatggtgagccaaggaagcactggtggaacctggggcaggctggctggttgtgagggaggaggaaggcatgagccatggacatgcttctgtcttcagagaacacctgagagagcaaagcacagctgggctgggagggcggacgggggatttgctttagatttgacagcaacattggtgatacaggtggcattccaggcaggttgggggtggtttactcattgtcagcagcaatggaagtcacagtccgcctgccagaatgagcatgtgtagtggcaaggtcaaagagtagggccggagccgtggggcagaaggtagaagacaacctggggcagtagtgtcttccggcctttgtgtgtgagaatcagtggtatgtattccagttctttggcttttccagaacccagaaaagaatggagtaactgaactgtgatttaaaatcttgctgtgtggcttgggttgtttgtgttggttccaaaccctgaatcttttggggtcttcaatttgtgggcatgtcagtggaaattctaagctttgttttaatggtgtgtgtgtgtctgtctgtctctgtgtgagtgtgtttagaaattggcttctctgggttcctcgctcgtcttctggaaggtggggttatagacatgctggtgaattctgaatgttttataaattagactattaacggagttaaattgaagaaaccttctgtcataagaccttccaggaattccattccaaatgaggaaatgcataaagacttgtccacttggcaaacattgggtgtttgggaggtgattgtgtaccctgtccccacatttaatacctgcaaccattgcaacaggaagcccatgtaacctggtgctcgtgattactgatttgtttcttgtcattgagttttgacagtatgttacttaataaaaaagagaagaaagaaaaataagctcttggaagtaattttcaagtagaggtagtggttttgtttatttttttaaggtaccatatgtggcatgtgcttcctttctttgatgtgaaatctgaaggaacccttgcctccttcctagcacacttcctaaatgataaatgcccactcctgttccacctatgcccttcataaatgttttggctccatgatctttttgtagcagccgtggtcagtgaatgtttgagcagagtcttctatgcctgcttggacagcaattattaacctcaacttgaatgcattctattcgatctttctccttcaaagcgggagctcaccaaatggtaaaaatcaaggtgtctttggatttgaattaatgtggcattaaaaagttgtggttgctttaaaaagaattaggcagggctggggcggtggcttatacctgtaatctcagtgctttggggaggctgagacagcagagtcacttgaggccaggagtttgagaacagcttggacaacacagcaagaccccatttcaacaacaacaaaaaaaaatcctagctagatatggtggtgcacacttgtggacctagctatttaggaggttgaggtaggaggatcacttgagcccaggagttccaggctgcagtgagctatgatcatgtcactgaactccagcctgggcaacagagcaagaccctgtctgtacataaatagaatgaatgaatgaatgaatgacaggagtttcctatttagttccgtgaaggtagggtatcctcatcttggactccagaaaggcgtgagggaggccatgaagtaggcagagcctggaaccagaaggagccccaccccaccctcatgtttcagaggagaaactgaggctcaggtggcctgggtcatgttgctggtctgtggcagaagccaagtcagaatcaatgaccccccagggactttcctggctggggaggaggaggcgtgggagggatttgaatagaatgtggaagcggttctgcgagatgtcatcaggctctagcagtcccgtctgttggttggtgctgggagagggaattggattccaagtggggatgggaccgcatctcccctagttcccgagatagactcgcctgtaactggatcactccttgcaacctcgggtagcgtgtgactggagaaatgagggctggagccgtggaccatccgagggcccctcccctgctgggtccaggcaaagggccggccctctccagcctcgattggggcgcgatagcgcccttagtgtcgtgtcgggttccaggccacgctcgggcattttaagaggctgaggtgcgccttccgctgcccgcctgcgtcccgccacggagagctcgcctttatctagccctctgggcgagagaagaaggctaatcccagcctgggacaaggctggctgaggcgtgccggatcctccggggaccgatcggtggcctcgcgcggctctcatcgctctccgagcagtgctccagggggcggagggagcctcctcgggcggtggggaggaggctggaggaatgaggacgcagcacggcgcgcccttgcagcgctcaggctgacgggcgggcgggcggagcgggcgcacggctcctctaggtccggctgctctctgagctcgcgggctggacgctgtccgcggtgctgaagcggcgcccgcggcagggaggcggacccggagccgccgggcagcacacacccaatcccgggaccgccctcctcccaggctcggagaggcggtggcagccggcactgcacccagatggactgagagcgcggcggcgggaaggcggcggcggcggcggcagcagcagcagctgcaagagccctcgcagcctcggggcaggacccacgtccacacccgagagcccctccctggggtgagtcagggcgggcggaagagggatggggtggacgggtcctggggcatgggatctcttgggctttaaaatttcccttccccgttgtaaatttcttccagcccagatcttgagcagctttcagggctgagggctcagagctatgcctcagcactttcccagtcctgggatagagggcaggcccctctgccctcacaagccaggggacaaagggtttagccagaagccagacagtcacaaggcatgtcctcctctccaccttgggtgcagcccacaacaaggtaccaggaaaagctgtttgcccaggctggtgccacaggggggacagcttcccgtctctggtctctgttcagaggcctggccccgagcaacctagccactggaattcagcccagacagaggccagccatcttttagcaggggaaggcaagcttcagccttcactggggctacaagcgagaagtagagccctttccctgcctccttccagtctccgtaggcacctgagctgccatgatcagggcttcggggcgagggtcacttcagtgcacctggctgttataagtgagctggactcaggcagaggagctctggagtggatactgggcaggcactgcctgccagtggggtgtgtgtgtgtgtatgtgtgtgtgtggtgttcccagcaagcaaaagggattttaaactccagtg

SEQ ID NO: 9437 - DNA, 6000 bp, Homo sapiens
ggtgcaatcacagctcactacaacctcgacctctcggggttaagcaatcctcccacgtcagccctcccaagtagctagaaccaccacgtgccaccacgcccagctaatttaaacagttttcgtagagatagggttttgccatgttgccaaggctggtctcaaactcctggggtcaagcgatctgcctacgttggcctcccaaagtgctgggattacaggcgtgagccaccatgcccggcctgttttttaaaaattttccatttttgttttttgacgagacgaggtctcattatgttgctcagtctggtctccaactcctgggctcaagcaatcctcctgccttggtctcccaaagtgttgggattacaggtgtgagccactacacctggccaaaatattttacagtaaaatattttaaaacaagaattagaaaaatattagcattagaaaaaaatgaaaatcttttgagctgtttaggggagaaagctccaaggaacttaaaaacaagtgatactgtcttatttaacagtccatttactcagccccatactgtgtgctttacctaagtgttcacacttaatctgtacaaccaaatgaaggtacataatacaccctcgctttacagatgaggaaacttgagctcagagctcagtttgtccaaggctgccaagctggtaagtgatacggccaggagattaactccaaagccccactgccaggcagataacagaacatttcctgttttcattccttaacattaggagcaaagtgtagttctgtaggcttcctgttgggtgttttctggtaaatcgtaacaggaatgactccaggtcgaggtttaagcctacctaaaatgaaggccagaacacagctagaacacagcaatattatcttgccattttctttgctaggttaaactgggcttgaatgatctgagacatttatgacctgatcactgtggcaaaactgatacaaagctggctcctggcatggacctctaacagcagaaagaaaggcaggatcacatcaccatggactcatttggaatcaggtaaagtaggtaaactgacatgtctgggtatttatttactgaacatgatgacaatgacccagcctaacaaccatcacagtcctttggctctcaggggttaagcaaattgaaagggatttttgaaaggcagagtataggaaaaaagggctaacacctttggaggagtatttcataacatgagacttgagcttcattaaaaggaagtagccaaattcaatggaggtagatgtctgcgtgcaaagtgcctccattcttctgagttatagccagtttaaagttgtcattttagccagcaatgaaatccatccagtaaggcgcaagacagctacagtgctatcatatacataaatcttttttatttgcattagaaaggcatcagttatttcaatgctacaatgtgtaattaagtaaatgtgttaatcatttggcttacccttacaatactgtattattccaagaatgaaagttctgattttaactaagccacaattcaatgttgagtacaagaaagtctacctctacctaagctgcctctatccctgacatggtcacaacctagagatcaagcagccagtttgtcagaggcattggaaccagagcaattccatcttgaagaggcagtaggtaaaatcaggcagagacctgttggctgcattcttagtagtcacaagatgtttagggttacaggaacagattaataacgttcactaaacaaacccaggacttaacagacccaggaaacattttgatgtcgctgtatctgttagtccaaactgcaccattttctttctttcttttttttttttttttgagatggagtctcgctctgttgcccaggcgggagtgcagtggggcaatctcagctcactgcaagctccgcctcctgggttcacgccattctcctgcctcagcctcctgagtagctgggactacaggcacccgctaccacgcccggctaattttttgtatttttagtagagatagggtttcaccatgttggccaggatggtctcgatctcttgaccttgtgatccacccgcctcagcctcccaaagtgctgggattacaggcgtgagccaccacgccctgccaaactgcaccattttctaagccccccgccatttcgcagacactggtcaaagcgaaacattccacgggggttcaggccgtgagaaatttcctgcccaactttcttaccaaaccctgttgggtaaaggcccaattgaaggaacatccctatcaaaccttgctcagcaaaggtgcaaggaacatcactgtcactttctgagggaacaagggccaaactgcctgatcatagaacgttttatggatagatatactggtaagtatattcacatggcaagccatactgcccattcccctcctgccctataagtaccccagcctgtaagcagcagtgggctctggcattaagctgatcccccatctctgtaggtttttgccatatacctgtgttgctgttgagctgccctttgtttttttttttttttttttttttttttgagacgcagtctcactgtattacccagcctggagtgcaatggcgtgattttggctcgctgcaacctctgcctcgcgggttcaagtgattctcctgcttcagcctcccaagtagctgagattacaggcatgtgccaccacgccccgctaatttttgtatttttagtagagatgaggtttcaccatgttggtcgggctggtctcccactcctgacctcaggtgatgcacccgcctcggcctcccaaagtgctgggattacaggcgtgagccacagcgcccgacctgtgtgtcattctttaactctcgtcttcccttcaaaacctaacaatatcttaagatcaaaagcattcttcatttaggtttcgctttaaagataatatagatctttgccaaagtcagtaaacaaagatgaacaatccttgtgtcaggcctctgagcccaagccaagccatcgcatcccctgtgacttgtacgtatacgcccagatggcctgaagtaactgaagaatcacaaaagaagtgaaaaggccctgccccaccttaactgatgacattccaccatcgtgatttgttcctgcccaaccttaactaagtgattaaccctgtgaatttccttctcctggctcagaagctcccccactgagcaccttgtgaccccccacccctgcccaccagagaacaaccccctttgactgtaattttccattaccttcccaaatcctataaaacggccccacccctatctcccttcgctgactgtctttttggactcagcccgcctgcacccaggtgaaataaacagccatgttgctcacacaaatcctgtttggtggtctcttcacacggacgcgcatgaaaccttggtcgtgggccctcgtggtagagcccatgtcccccaagatttctttggctgtgttaccttagatttgaacaagcactgtacctaaggcgggcgccttcctcctcccgctttcaggaatgccctgctctgccattcttttgctttctcacttctctaatacacttgctttcactttagtccgtggactcgccccgaattctttcctacgcgacatccaagaagcctctcgctgggtctgagtggagacctctttctggtaataaacggactagggagattcgactttgaaggtgaaaacaaaaaccaccatccagtttataagaaggcgctcgaggccgggaacggtggctcaggcctgtaatcccagcactttgggaggctgaggtggtggggcggggggagggaatcacctgaggtcacgagttcgagaccagcctgaccaatatggtgaaaacccgtctctactaaaaatataaacattagccgggcgtggtggcgcacgactgtaatcccaactactcgggaggctgaggcaggagaatcgcttgaatccgggaggcagaggttgcagtaggccaagatcgtgccacttcactccagcctgggcgaacaagttaaactctccatctcaaaaaaaaaaaaaaaaaaagggcggcactggaaacagctgggagtgacagggccagggatgagggatcgcaagctgctggtgagaaaggagctcagaggctgcctggcctacgggccaggagacctcagcgcaaaaagcgcaggactcgttcccctgctctacagctgagtgcccaggacggatctcactggctgaaaaaaacagaagagaaggcacccaatgcaaaatcaaatgtcagcgaacgaggggtcctttaacaggcggcccacacggcccctcctggcgccgagacccagcccctccgggccaccccggccaggtacgaccagcagggtcacctgcgcgcgtcccccgagacggggcctcctgatgtgaagcgaccccagtggcacctcacacgattcccgagggttgcgggcggcctctcctcagccctgcagctcccacacgcggacaccgcgggcctcggccatgtccactgaccgaccttcctcgccggaactcctcgcgcatcgccggcccctcagcggcgactagcgcgcgaacatcctggaagacgcgttgccggccccacgtgagccgacgccccaaagcgcggctgctggcgccggctacgagatcaaggtcggcgcgtgcgcgcttgcgcgagaccggcattctcagccccgcgccggtttccagggagctgggcgcatgcgccgcgtaaggggcccggccggcggaaggaggtgctactgccggaagcgccggcgcgcttgcgcagtagctgaacgcgggcgtttctttcctccctttttttcgaattggttttgggggtagattcgagttacaaaatggccgcccggagcgtgttcggcgcggttcccccagctgtctctggctgaaccggcgctctcgcctccctgccgaacacagcgtgaggagcccccccagggatatggtgtttgagtctctgggcttgccgagcactaagtcctctgagttccgcagcgcagcaccggaagcggccgagcgcgctcagcccggcgacccctgcgggctccagacccctgcgccgctgcgccccgggtttcgccgcaaccaagacccagcgagtgcagcggcggccgccgaggaggtgaggagcggcggcgggcgcgggaggagaagaggctgagggcgggagcctggtgctgagagcccagggccgggagggcgggagcgggctcgggcctgggaggggagtgcgagtgcagggctggggactggaccctggggagggaggtgcgggttcagcgccgggggacgggcccctggggaggggtgcggggccgggggaccagaccctggggaggggcttaaggggctggaggacgggaccctgggaagtggggtacagggctagaggtcgggactctagggagggagcctgggtcgggcgcacgggccgggcggggcgcgcggtgggggagcgacgggtggagggtggggtgggatgacagcggcgacgcagccccggctgtttttgaagcggggcccgggccccaccgggctgcggcgtccgactcgagtgagactctcccctgcggccccgccggaggtagggggctggcagggctgtcctggcgtggtcttctccgtttccttcctagcgattcctctcgagcttcctctccccctggccgcccctcgtctctcttctcttgggcgcattacctctctggcctgtcttactgcgttcccgggttattcatcacccatttgctcggttccattaagaaccagcttggagattaggtatttctgtctccttacttggcccccttgttgttttcctccaacaaggcacttcactattaagtgtagccaaatctgtgttttcgttttaaggtgatgttgacaagttgagctttccaagggcagagctacaccagatgccagagaccacataactat

SEQ ID NO: 9438 - DNA, 6000 bp, Homo sapiens
ctttacctaagtgttcacacttaatctgtacaaccaaatgaaggtacataatacaccctcgctttacagatgaggaaacttgagctcagagctcagtttgtccaaggctgccaagctggtaagtgatacggccaggagattaactccaaagccccactgccaggcagataacagaacatttcctgttttcattccttaacattaggagcaaagtgtagttctgtaggcttcctgttgggtgttttctggtaaatcgtaacaggaatgactccaggtcgaggtttaagcctacctaaaatgaaggccagaacacagctagaacacagcaatattatcttgccattttctttgctaggttaaactgggcttgaatgatctgagacatttatgacctgatcactgtggcaaaactgatacaaagctggctcctggcatggacctctaacagcagaaagaaaggcaggatcacatcaccatggactcatttggaatcaggtaaagtaggtaaactgacatgtctgggtatttatttactgaacatgatgacaatgacccagcctaacaaccatcacagtcctttggctctcaggggttaagcaaattgaaagggatttttgaaaggcagagtataggaaaaaagggctaacacctttggaggagtatttcataacatgagacttgagcttcattaaaaggaagtagccaaattcaatggaggtagatgtctgcgtgcaaagtgcctccattcttctgagttatagccagtttaaagttgtcattttagccagcaatgaaatccatccagtaaggcgcaagacagctacagtgctatcatatacataaatcttttttatttgcattagaaaggcatcagttatttcaatgctacaatgtgtaattaagtaaatgtgttaatcatttggcttacccttacaatactgtattattccaagaatgaaagttctgattttaactaagccacaattcaatgttgagtacaagaaagtctacctctacctaagctgcctctatccctgacatggtcacaacctagagatcaagcagccagtttgtcagaggcattggaaccagagcaattccatcttgaagaggcagtaggtaaaatcaggcagagacctgttggctgcattcttagtagtcacaagatgtttagggttacaggaacagattaataacgttcactaaacaaacccaggacttaacagacccaggaaacattttgatgtcgctgtatctgttagtccaaactgcaccattttctttctttcttttttttttttttttgagatggagtctcgctctgttgcccaggcgggagtgcagtggggcaatctcagctcactgcaagctccgcctcctgggttcacgccattctcctgcctcagcctcctgagtagctgggactacaggcacccgctaccacgcccggctaattttttgtatttttagtagagatagggtttcaccatgttggccaggatggtctcgatctcttgaccttgtgatccacccgcctcagcctcccaaagtgctgggattacaggcgtgagccaccacgccctgccaaactgcaccattttctaagccccccgccatttcgcagacactggtcaaagcgaaacattccacgggggttcaggccgtgagaaatttcctgcccaactttcttaccaaaccctgttgggtaaaggcccaattgaaggaacatccctatcaaaccttgctcagcaaaggtgcaaggaacatcactgtcactttctgagggaacaagggccaaactgcctgatcatagaacgttttatggatagatatactggtaagtatattcacatggcaagccatactgcccattcccctcctgccctataagtaccccagcctgtaagcagcagtgggctctggcattaagctgatcccccatctctgtaggtttttgccatatacctgtgttgctgttgagctgccctttgtttttttttttttttttttttttttttgagacgcagtctcactgtattacccagcctggagtgcaatggcgtgattttggctcgctgcaacctctgcctcgcgggttcaagtgattctcctgcttcagcctcccaagtagctgagattacaggcatgtgccaccacgccccgctaatttttgtatttttagtagagatgaggtttcaccatgttggtcgggctggtctcccactcctgacctcaggtgatgcacccgcctcggcctcccaaagtgctgggattacaggcgtgagccacagcgcccgacctgtgtgtcattctttaactctcgtcttcccttcaaaacctaacaatatcttaagatcaaaagcattcttcatttaggtttcgctttaaagataatatagatctttgccaaagtcagtaaacaaagatgaacaatccttgtgtcaggcctctgagcccaagccaagccatcgcatcccctgtgacttgtacgtatacgcccagatggcctgaagtaactgaagaatcacaaaagaagtgaaaaggccctgccccaccttaactgatgacattccaccatcgtgatttgttcctgcccaaccttaactaagtgattaaccctgtgaatttccttctcctggctcagaagctcccccactgagcaccttgtgaccccccacccctgcccaccagagaacaaccccctttgactgtaattttccattaccttcccaaatcctataaaacggccccacccctatctcccttcgctgactgtctttttggactcagcccgcctgcacccaggtgaaataaacagccatgttgctcacacaaatcctgtttggtggtctcttcacacggacgcgcatgaaaccttggtcgtgggccctcgtggtagagcccatgtcccccaagatttctttggctgtgttaccttagatttgaacaagcactgtacctaaggcgggcgccttcctcctcccgctttcaggaatgccctgctctgccattcttttgctttctcacttctctaatacacttgctttcactttagtccgtggactcgccccgaattctttcctacgcgacatccaagaagcctctcgctgggtctgagtggagacctctttctggtaataaacggactagggagattcgactttgaaggtgaaaacaaaaaccaccatccagtttataagaaggcgctcgaggccgggaacggtggctcaggcctgtaatcccagcactttgggaggctgaggtggtggggcggggggagggaatcacctgaggtcacgagttcgagaccagcctgaccaatatggtgaaaacccgtctctactaaaaatataaacattagccgggcgtggtggcgcacgactgtaatcccaactactcgggaggctgaggcaggagaatcgcttgaatccgggaggcagaggttgcagtaggccaagatcgtgccacttcactccagcctgggcgaacaagttaaactctccatctcaaaaaaaaaaaaaaaaaaagggcggcactggaaacagctgggagtgacagggccagggatgagggatcgcaagctgctggtgagaaaggagctcagaggctgcctggcctacgggccaggagacctcagcgcaaaaagcgcaggactcgttcccctgctctacagctgagtgcccaggacggatctcactggctgaaaaaaacagaagagaaggcacccaatgcaaaatcaaatgtcagcgaacgaggggtcctttaacaggcggcccacacggcccctcctggcgccgagacccagcccctccgggccaccccggccaggtacgaccagcagggtcacctgcgcgcgtcccccgagacggggcctcctgatgtgaagcgaccccagtggcacctcacacgattcccgagggttgcgggcggcctctcctcagccctgcagctcccacacgcggacaccgcgggcctcggccatgtccactgaccgaccttcctcgccggaactcctcgcgcatcgccggcccctcagcggcgactagcgcgcgaacatcctggaagacgcgttgccggccccacgtgagccgacgccccaaagcgcggctgctggcgccggctacgagatcaaggtcggcgcgtgcgcgcttgcgcgagaccggcattctcagccccgcgccggtttccagggagctgggcgcatgcgccgcgtaaggggcccggccggcggaaggaggtgctactgccggaagcgccggcgcgcttgcgcagtagctgaacgcgggcgtttctttcctccctttttttcgaattggttttgggggtagattcgagttacaaaatggccgcccggagcgtgttcggcgcggttcccccagctgtctctggctgaaccggcgctctcgcctccctgccgaacacagcgtgaggagcccccccagggatatggtgtttgagtctctgggcttgccgagcactaagtcctctgagttccgcagcgcagcaccggaagcggccgagcgcgctcagcccggcgacccctgcgggctccagacccctgcgccgctgcgccccgggtttcgccgcaaccaagacccagcgagtgcagcggcggccgccgaggaggtgaggagcggcggcgggcgcgggaggagaagaggctgagggcgggagcctggtgctgagagcccagggccgggagggcgggagcgggctcgggcctgggaggggagtgcgagtgcagggctggggactggaccctggggagggaggtgcgggttcagcgccgggggacgggcccctggggaggggtgcggggccgggggaccagaccctggggaggggcttaaggggctggaggacgggaccctgggaagtggggtacagggctagaggtcgggactctagggagggagcctgggtcgggcgcacgggccgggcggggcgcgcggtgggggagcgacgggtggagggtggggtgggatgacagcggcgacgcagccccggctgtttttgaagcggggcccgggccccaccgggctgcggcgtccgactcgagtgagactctcccctgcggccccgccggaggtagggggctggcagggctgtcctggcgtggtcttctccgtttccttcctagcgattcctctcgagcttcctctccccctggccgcccctcgtctctcttctcttgggcgcattacctctctggcctgtcttactgcgttcccgggttattcatcacccatttgctcggttccattaagaaccagcttggagattaggtatttctgtctccttacttggcccccttgttgttttcctccaacaaggcacttcactattaagtgtagccaaatctgtgttttcgttttaaggtgatgttgacaagttgagctttccaagggcagagctacaccagatgccagagaccacataactatatcaggcacaaataatgtttttttccagtttacctagactttcagtctcccaccacgttgcttcatacctagaaatcatgtctaatttggttttttacccacaaacgcaaacgttttttaaattcccttttattgattgtttgattgagactgggtcttgctttgtcaccaggcctcagtgtagtggtagctcactgtgtagcctgaagctcctgggctcaagtgattctcctgcctcagctttccaagtagctgggaccacaggcgtgcgccactacgctcggctaattttttatttctattcatctaatctatgtccatctttattttcgtagagaccaagttggtttccaactcctggcttcaagagatccttccgcctcccttaagttcttcataacagtagctagacataagactccaggtgccaggccttgttctgaatattttacagagggttttttctcccccccacttctagcataaaagtaaaatgtattgtctgaagtgtcatgctttgaaataaaatagggatttggtaaaatatttgtaaaaa

SEQ ID NO: 9439 - DNA, 6000 bp, Homo sapiens
gttgtagtttgaggaaaaggtacaggaggatttgaatccaattctgttgaactccaaaccccaggcacccactcattccatgagggaaagttgggggacagtgcccacgtggcacggtgctgtgcacgtaagcttgcctgtcttgtgtgtttccaggctgtcatgccagacctcatctctgcacttgcagtcttccctggccgcagcagtgccactcactgccaaccactgggtcagatcattgcagaatccaactccacacagagcagattgtcctttatggaccaaatatgtctatctggttgggcgcagcggctcacgcctgtaatcccagcactttaggaggtcaaggcgagcggatcacctgaggtcaggagttcgaaaccagcctggtcaacatggtgaaaccctgtctgtatgaaaaatacaaaaaattagccgagtatggtggtaggtgcctgtaatcccagctactcaggaggatgagtcaggagaatcacttgaacctgggagatggaggttgcaatgagccgagatctcaccactgcactccagcaaggacataagtgcagagcaagactccatctcaaaaagagaagagaagagaagagaagagaagagaaaagagaagagaagagaagagaagagaagagaagagaagagaagagaagagaagagaagagaagagaagagaagggaagggaagagaagagaagaaaaaagaaaagaaaagtaaagaaagaaaatccgtctatctacacatcacactttgcagtgagactcccacggcacctagcatgacacagggaggggtcctgcagcttccagtccatgtcctggactggataaacaacatccatgatctagccctggagctggatcctgtgtgacgaggtggacacctgtccctttggaggggcaaagaagggaggcagtgcagctgcaggtgggctgccctgttcttctcaagatctacagagacagacatctgagccatgtcgaatgggccctgctgcaaagctggggactggttaattttcaaagggtacagtgtcatgacagcagcagtttctggacctgcggaagcttccagatcctgcaaagctagaatgggtgcacagcttaagcccctccccaccacctcagctgtgaccactggttaacatgtagcatgcagcacttggtgctaatcagatggagtcatgcctctgctgacaaccctccatggcaggtgtcccacagcccttaggaccaaagttaaactcctcactgggctgcaagacctgcctggccagggccttgcccagctctgcccgctttgtgccatctccacactctctccccttgaatgtctcctgccacaggcttctgcacatgctgctgccacccccctggagctgtggggccaggagcagccaccagggaaatctgatccttgaccctgggctcctgagtctgccagaggctgccgtatcagccaacagacagcttctgcaacagacaaccgaaccccgggggtacccagggccaggtgctgatggactgggactcgggagagttctcactccctgccggggaccttggccacatgctgccattcctggcccttcgttcctcatctgtaagatgagcataagcacagctgccttgtgggactcttgtagattctgtcccctagtatgacaatactttgttaccttggacccatggggttttgctgtcagtaccaggatggcaactaaggacatgcccatggttggccctcaccgacgaggtccagcctcgggtcgccaagcagccgcctgctcgctgccagtgagccctccctttctcagcccacggcccctgccccggtggacttccaccacctgacctgcaggcacgcttccaggagctcagaggccactgccctggcggatgacaccctggaagcacacactcccccttgacagagagctttgcacatcagcagagggcaagccagcagcaaacttcgcaggccctggctggcaaacagactccagcctggaccccaggcccataggagaagcttcaccctggcagggtcagggaaagcactggggtccctgaacacagatgaccgtcatcacctgctcccagcactcagggtctaactgctgccctgtactgagcggccaagccctatcactccaggttgcctcctccagcaaccccttcccgtctgaattcccagcttcccaattctttccctgaggctgtgggagagcctcggcttctctggctggctggcaggtcagcacttgcaggagagagcagctcagcagggcagacgtgggctttacagacctgccttccgtcctgcgccctgccgctggcctgggggacccagtgcagatggggcttctctgtgcctcagtctccatcttgcaatgtgggcacagtaataattaccctcagaacatcttccggatcagaaaatgtaaaaagggacctgagacagcattgtcaccacataaatggtagctatgaactaagatccatatgcaccagatgctcccagtagtcactaaggcgccagagaggaaactcaggtggtgctcagagacattttcaggagcactgatttgtcctcaaagttacagatttctactcagtccctgcgccagcggtgtttctgttctgtcgtgtggccctcatttcatcagcactgaagaaggtaaagagagacttcctggagctgggaatgggggtgagggtgtgccctttgtgacagttgctcccatgctgggtgtgtgacaaggtcttcgtggccaacagaaaattgcttcatctctctcatctgagcgtggtttcccagaagaaacctaccacccccgggaagcatggatatggggctgtttctggccaggatactcccaagagaagagtcctgaacttgcttctaccctcaggacgcctgcgggagactggctgacagcatttgattgaaaatgcttatttctgggacacatggatgaaaaacaagttttctctccctaaaaccttgggagccccaaaaaacccaagaatatcactttcctatgtctgctgagtgtacgtgaccactctgcacacccccacatagcctttgtccttgttcatgagaatgttcactaggtctttcaacacctggttgacctgggtggtgcatctgggtcacacacctgtgtggaccctggtccttgagagtctgggatatgggtatgccaggtaatgtctttgagcccggaggtcctcatgaggatgtagcccctgagctctgcgtgggcagcccagggtcagcttccctcaccaaacacaacaggatgacaagcttggatgtggctgcctgcacaccccacgagatatgcaggatattacgtgtacaggtcaccctataaactctgaaacaacataaatgatagctattgctggctaacatgtgcaagagaaggtgaggttgccgtgtgccagtgggaaggatatgtgggtgtctggagggtggggcaaagttcaccataggtgcctggctaatcaacaagggtgagtttaagagaagtttgtgaaagggccagttcccgcctgatctccagttcccctgcctaatgagatctgggtttgctttccggagtgggtcctcctgggcgcccgctgccacaaatagcacagtggcaggcacagctggcagcggagggcaggcagtggagcgggcatagcacacattgcgttcccgaggaggggagccctgatgtgccggcacccaggggctttgtgcattccgctccggcagctcgagcgtcacggcccgaacaaagcggctttgcagggcgctctcctactcctcgccattggccaccgggccgcgacctctccttgctctggcagagtcccagcgccttgcgtaggcacaaagtcagcccctcaccccccagcgcatgaagtaggggcgggcatggctcttgggccgctggagaggggtggggttgtggggtcggagctggcggcgcctccccgagcccgtccgcgttgcccttcaccctcctcgttcccccgcccaccacaccgccctggcacctcccgccacctgtttccttgtcctcccagctcgccttccccttctccttattttgcatcctggggttccagggacaaggtccctcccgggccgcctcccaccctacgcacttctgagcctcaagggcacccggtcccgggtcccgggtctagaccggctcatcgcacagagtagcagagccgggctcatcgaggaggcaggaggggctcgccagcgtggcacgggcgcccggcgggaacctccacccgccccgcggccgcgcgtccccgcctcgaattcagccccgccccggtgcgccgggctggaggggcgctgacgctcagcggtgtcccatcggtgaccttggacggtccctccacctctccggcctcagtttcccttggctgcagcggccgcggggcgctaggtgggagccgctgagcgctcccggggccccgcccaccgcgagcagccaatcgggcgccgccctccggggggtgtgtcccggggccgaggcccggggcccggagggcgcgcggggcgggcggggcttccgggtcgggcctcgggacactggctcgcgcggaccggggcagggggcgggccgaggggcggtgcgtgtcgcgggggcgcggctggcacggacgcgcggaggcggcgccgggcatgggccgtggacgcggcggccccgcggcgggggcagcgggcggcgggggcggaggcggccgctagcgccctgcccggcgccgcctccttcggcgttcgccccacggaccggcaggcggcggaccgcggcccaggtgcccgggggcgggcgggcgggcgggcgggaacgcgcgcgggggtccgcggtccgggcttcccaggtcccgggacccggagggcggcggacgggggaggggcaggggctgggcggcgcatgcgcggggcccggggtctcggggtctccgggtcccggggacccgggggcccggggtgcgcggctggggacctgagggcgaggagcgaggacacacaccgaggactcttgcgagggatctcggggcccagctcggcctccctcctagcgctgggggcctgcccggaacccgagtccgcggctgtccctggggtttggcgctgcgcggaggtcgggtctggggaccgcagcgactctgggtcttcgggttgtcccctcggagggagggcccacgggcggggacatcgggacttgccctttcctcggcgcagcggagctggggcgtcgccgactcagaaggtgctttccgagacctccagggatctccgaggcgaggaaacccgggccccggacagaccgaccctgggtgggtgcgcccggcttctgccgtcggacggagacgcgcgtgtttgttcctccagctgcgaccacctttgaggaacggttcccactttgtgccccaacgcggcggggcgaccccggacaggctgcgctgggccgggtggcttctctgcggaagccgcgccacgtcgctcccggtcggggccgctgagggtcgggcgcccaggtctttccggagtcccgggctgcgcggcccgcgtggtgcgggtgaagctggaggggcgcggggtggtgccagtggaagtcaggagggtcggccctgccccctcacgcaccccaaccgggcacaactgcacgcctgtgcttttctgaagtcttttttaaaagttaaaagagaggaagtgtgctccaagtgtcaggattctttccaagaaaaacccacagttgtccaatggcctgggcttcgtgggacctccggggctgcacgcccacgtcagcctcagccgacccctgccaggaaaccagggaggcccctcctctcccagcctccttgggataagggtgccttggggaactgggtcagggcaaggacacgggattttcctgggaaggaccctgcgacacccgtgtcgttgcggggcagggt

SEQ ID NO: 9440 - DNA, 6000 bp, Homo sapiens
atcaggccaggtgtggtggctcatgcctgtaatcccagcactttgggaggctgaggcaggtggatcatttggggtcaggagtttgagaccagcctggccaacatggtgaaaccccatctctactaaaaatacaaaaattagctggatgtggtggcaggcgcctgtaatcccagttactggggaggctgaggcaggagaattgcttgaacccaggaggcagagcttgcagtgagccgagatcatgccactgcactctagcctgggtgacagagcaagactaccatctcaaaaaaaaaaaaacaaaaaacagtaatcaagcatgaaaattatgaaatgctcagagataaaatgcgcgaggcctgtacactgtaatctacaaaacactgctgagagaaattttaaaagacctaaataaatggcaagttataacatgctcttgaatcagaagactcagtatcttaggatggcgacttttcccaaaatgatctacagattcaaagcaatcggaatcagacctcagcatgcctacttgtagaatttgataacctgattctaaagtttatatggaaatgcaaggaacccagagttgctaaaataactttgaaaaagaacaacacagttgaaggacttagactacatgatttcaagaattattataaagctacagtaatcaagacagtatggtattgatatgaaaatagaccattagatgaatggaacagaatagcaagtccagaaatagatccacacatatatggtcaattgattttcagcaaagtgccaagtcatttaagtggggaaaagataatcttttcaacaaatgataccggaacaactggatagccatatgcaaaagaacctcaaccttcagctcacagcactacaaactcataattattatcattatattatactattatgtaataatagtatatatcatgttacatattatattatgtaatatatattatatgatactgttatgtcatataattattattgaaatgggtcatagatctaattgtaagagttaaaaccatccaggtacagtggctcatgcctgtcatcttgcactttgagaggccaaggcgggtggatcacttggccccaggagttacaagaccatcctgggcaacatagcgaaacaccgtctctacaaaaaaatgaaaaaattagttgagcatgatgacactcacctgtagtcccagctgcacagtagtctgaggtgggaggatcacctgagcccagagaggtcaaggttgcagtgagccatgattgcaccactgcactccagactgggtgacagagagaccgtgtgttaaaaaaagagttaaaactataaaaccttcagaagaaaacatatgagaaaattctagtgatttggggtttggcaaagattccttgaacatgatttaaaaagcattaactaggccaggtatgctggcttacacctgtcattccaatgctttgggggaccgaggtgagaggatagcttgaggccaggagtccgagagcagcctgggcaacataacaagagtgggtctttaccaaaaaaaaaaaataaaaagcctgtgccaggcacagtggcacatgtctgtagtcctagctactcacgaagctgaggcaggaggatcacttgagcccaggagttgaagcttgcagtgaattatgaccatgccactgcactccagcctgggccacagagtaagactaagactcagtctcttaaagaagaaagcgaccgggcgcagtggctcacgcctgtaatcccagcactttgggaggctgaagcaggtggatcacaagggcaggagatgaagaccatcctggctaacacggtgaaaccccatctctactaaaaatacaaaaaattagccggacgtggtggtaggcgcctgtagtcctagctactcgggaggctgaggcaggagaatggcgtgaacctgggaggcggagcttgcagtgagccaagatcgtaccactgcactccagcctggacaacagagcgagactccatctcaaaaaaaaaaaaaaaaaaaaaaaaaaaagaagaaagcataaactataaaagaaaaaattaataaattagtcatcctcaaaattagaaacttttactcatcagaaaacacttaataaaatgaaaagtcaagccatagacttagagaaaatatttacaaaacatatatctgacaaaggacttggatatggattatataaagaactattgtaattcaataagatgtcaaacaacccaattaaaaatgggtgaaagatgaactaactcttcaacaatgggcatgtcatttgaatggatggtaagcaagcacatgaaaagatgttcatgtgcctttccctcattagtcactagggaaatgcaagttcatagacatctctcttggtagaaagatatcactacacacccacaagagtggctgtaattaagcagtctgaccaagtatgcgtaagaatgtggaataagaactctcatacactgctgatgggaatgtaaaatgatagccactttggaaaacattttggcaaataataccacttacattattatcgaaaatattgtatacctgaaagaactcaaagtgaaaaagctatatactgtctgcttccaaggctacacattatgggaaaggcaaaactatgaagacagtaaaaagatgcgccagtggttgccaggggctcatggggagggaaagaggaatgaataggtggaacacagggcatgtttagggcagtgaaactattctgtatggtaccgtaacgatgaatacatgttattaggcatttgtcaatacccataaaatgtacaacacaaagagtgaaaatgaaaactgtgggcttcagttagcaataatatgtcaacattggctcatcagtggcaacaaatgtacctcaccaatgcaagatgtttgtttgttgtttgtttgttttgtgacggagggggtgcagtggcgcaatctcggctcactgcaagctccgcctcccgggttcacgccaatctcctgcttcagcctccggagtagctgggactacaggcgcccgccaccacgcccggctaattttttgtatttttagtagagacggggtttcaccatgctagccaggatggtcttgatctcctgctgtcgtgatctgcccgcctcggcctcccaaagtgctgggattacaggcatgagccatcacgcccggccaccaatgcaagatgttaataacagggaaactgtggtgggagtgaggtggtatatgagacctctctgtactttccactcaatttttctgtaagcccaaaacttctctaaataagaaagtttattaattaaaagttacttttatagtgtatctatatctaggaataaatctgaaaaagatatataagatctctactcagaaaactgattatgttattaagagagcttaaatatagcccaaataaatagatggatatactatgttcatggaagggacagctcagtattaggaaggtgtcagtcatcttaagaaaagcctcatgtgtcacacaagggatactgacatctgacaccaagcacatgtaggcatcctgactacgtttacttgaatgatgtggactttacagagctgactatagacagttcaaatggcctgaaaactgttcaatgcactccctcccaggctgtcatgggatgcacttcaggaactttactttttaacaagaaaattcagttttcctcttaaacagctggcttctgttccattagcattcttgtcactttaagttgcattcatctttgttttttttttttagaaaaacatttgttctgcaaccagtcttgtcctttaaatacttgtactgtatacaggctctttttcataggtccattacttaaaatgatgtaagtgtgtttttggtggcaggggggtgggagttgtttgttttgttttgttgagacacggtcttactctgtcacccaggctggagtgcagtggtgtgatcttggctcactcctggcctcaagtgatccacccacctcagcctcctaagtagctgggaccacaggtgtgtaccaccacacccagctaattttttttttttttttttttttttttgtagggacggggttttgtcatatcacccaggctggtctcaaactcctggactcaagggatcagcctgtctcagcctcccaaagtgctgggattacaggtgtgagccactgcaccggtcctgatttgagtttttgtaagacagggaacaatgttcagaatttagcaccaatgtcagactcattctgtaaatttttattgaacgtctgcctggtgtaggagaggaagatgacagacaagaattcttcctccaagagttacaggtcagttgagcagaaaaggcatacatcaatacccacaatgagagttgtcgtgattcagaggagggacaaagtccttcccctggagggatcctgagcactttggagaggaaaggcatctgtactgccccccaaatgtgtagaatgggatgcattcctggcagaaagaagtaggataaagtacagaggccagggctgggtgcagtggttcacgcctgtaatcccagcactttgggaggccgagacagcagatcacctgaggtcaggagttcgagaccagcctggtcaacatggcaaaaccctctctctactaaaaatacaaaaattagccaggcacaatggcaggtacctgtaatcccagctacttgggaggctgaggcaggagaattgcttgagcccaggaggcagagatcgcagtgagccaagactgcgccactgcactccagcctgggcaacagagcaagactctgtctcataaaaaaagaaaaaaaaaaagtacagagtccaggaagcctggggtggggctggcagatgccgagtcatctattttggccagagttcaaggcttgctaggggacatgaagagaagattcgtgcattctagttcaaactccaccagatatttgagctccttctctgtaccaggcattgttctaagatacgtaagtgaacaaaacccatgacaccctcgtctatgagagctgatcctctggcagggacagacaggtcatgagtggagtgatggagcagctggcctggtgacttagccgccttcaggtacagtaggaggagcaagcccaggacaggtgagtgggtcaagggtgccagaaggggtgagggcaccaggaagctggtccagtttggcttccctgaggtggtgaccaggacctagcatctgaggaagggctggaagcaggtgagagcaggtggagcagacatcaggatgggagcatcctgacagggagggcagcagggtgggctcatgagaggaacagccaggaagtgtgactcgagcagtgtcctggagaggaggaggaggagaaagaggtcaggaggtcccaggggagaggcaggaccagtctcgtggaggtcggggccgttgtgaggactctggtttgtgttgtgtgtgaaaggccatgggatggggaccagcgagggcttcttaggggactggatatgctctgatctagctgctaaaaagcccccttgggcagcttgcagggcccgggcagaagctataggtggttctgaggtttgcagaggggcctgaaggggtggggcccggccaagcaaggtggctaagtgggaaaggctccaccgcgttgggtgtaggaagaccttgaccttagctccagcccagccactgagcagccgtgtcgccttgggtgatacctgtccctggtcggtttccctacctgtgaatctgggtacttggaagccatgctcgagaagagcccatccccaggaggtgatcagggttctcctccaggtgaggaacctggcagccgtgtgtgagaaccttagaaaagggagagggaagaggctgtggcaggaagtgaggagggagttagtgataccctgggcaggatgccatgagctgggatggaaaccacaggatgaatgcaagtaattaaaaaaaaaaaaa

SEQ ID NO: 9441 - DNA, 6000 bp, Homo sapiens
agtctcgtggaggtcggggccgttgtgaggactctggtttgtgttgtgtgtgaaaggccatgggatggggaccagcgagggcttcttaggggactggatatgctctgatctagctgctaaaaagcccccttgggcagcttgcagggcccgggcagaagctataggtggttctgaggtttgcagaggggcctgaaggggtggggcccggccaagcaaggtggctaagtgggaaaggctccaccgcgttgggtgtaggaagaccttgaccttagctccagcccagccactgagcagccgtgtcgccttgggtgatacctgtccctggtcggtttccctacctgtgaatctgggtacttggaagccatgctcgagaagagcccatccccaggaggtgatcagggttctcctccaggtgaggaacctggcagccgtgtgtgagaaccttagaaaagggagagggaagaggctgtggcaggaagtgaggagggagttagtgataccctgggcaggatgccatgagctgggatggaaaccacaggatgaatgcaagtaattaaaaaaaaaaaaaaaaaaaacagcattgggccgggcagtggctcacgcctgtaatcccagcattttgggaggccgaggtaggtggatcacctgaagtcagcagttggagaccagcctagccaacatggtgaaactgaaaatgcaaaaattagccaggcatggtggcgtgtgactatagttccagctactcaggaggctgagacaggagaatcacttgaacctgggaggtggatgttgctgtgagctgagatcgtgccactgcattgcagcctcggtgagagagcaaggccccatctcaaaaaagaaaaaaacagactttccgaccaaacgatcgacaaaccagactgtccaaacagccataagccgtaactttgtgcggaggtaaaagaccgaggtcacatcgggacctgttggattcaaggcatgttgacagctgtttccaggcttcagatagagcctccagctggcagggtggccacagggcttgttgagtaggaagcctcgttgctttgacaggttacttggccccatgagggacaatcccatagtcagttacccagaaacgtgactgtctccttgaaatcctcagcatggggtcttatgaataaacccttactagatttcctgttctgtcttatttttatgcagagctttactttatagcagaaaattccatttttacccttaaatggcttgcttctgctcccttagtgttcttgtcactttaagttgcattcatctttgtccctttagaaaaggatttgtcctgcaaccagctcttgcagaaggtacttggtttattgttaaccgatgtttgctaaatgtttgaattatgttgagttgcttaaagtcatgctatcgggtagatgttgtggctgttcttttcactctcttatttggggatttacaaaacagttatgtttttagttttcttttatttgttgtgttgaataggaatgtagctctgggaacctctagttccaaataagaaagccttggacacatttccagttggcaagctggcaaaatgaagggcgtacaagttgttagagaggctgggagcctatttaagcacccagcttcaggatgggacatgggatatacctcgagttagaggttcttattaactgtggattcttctatgcagatatctgtcacaatataagttactataagtcagtactaaggcagctgctacattctgtttgccaaggggaagaagaaagcttggaaatggtattccttaaaaatgtcagtatcataaaagacaaagaaaagctgcggaaatgtttcagattaaaagagagaagacaataaaatgtaatacctgactctgaacagcatccagtactgaaggaggaaaaatgctatcaaggacattattgggtcaattaacaaaatttgaatacgaatcatagattgaactgtatctgttaaattaacagaagcgaagtgttctgtggtgtgtaggagcacactgccattcttagcaaacgtgtagtttagtatttaggagaaagggccatgaggcatgcaactcaccctcaaatacacacacacatacacatatatacatacatacctataaagaaagaaattatgggctaggtgcagtggctcatgcctgtaatcccagcactttgggaggccgaggtgggtggattgtgaggtcaggagatcgagaccctctctactaaaatacaaagaattagctgggcgtggtggtgcacgtctgtagtcccagctactcgggaggctgaggcaggagaattgcttgaacccaggaggcagaggttacagtgagccgagattgcaccactgcactgcagcctggcaacagagcaagactctgtcttgaaagaaggaagaaagagagagagagagagagagagagagagggagaaagaaagagagagagaaagaaagaaagaaggaaggaaggaaggaaggaaggaaattatgataaagcagatggttaagttggtaactaccagtgaatatgggtaaagttaggatgttctttactctgttttgggggtgcaacttttctataagtgaaagtacttccaaataaaaagttaaaaggcaagcaaataaataaaagagacagtttctatgttatatatcctagctatgtttaccatgtctggattctgaaagctgcagagcagaaaacctgaagaacagatcacctgttcttaaaataccactgttggccagacatagtaactcactcctgtaatcccagcactttgggaagccgaggtgggaggatcacctgagctcaggagtttgagaacagcctgggaaacatagtgagaccctgtctctacaaaaatttaaaaaattatccaggcatcatggttcgtgcctgtagtcctagctactcaggaggctgaggtaggaggattgcttgagcctgggagttcgaggctgcagtgaaccatgatcacactaaagcactctagcctgggcaacagagcaagaccctgtatcaaaaaaacaatcaaacaaaaaatcactcctaattttcctcccttttagtacttttaaaaattaacttaaaacattttttggataattgtagttttttttacttttttttttttgagacagagtctcattctgtcacccaggctggagtgtactggtgcaatctcaggtgactgcaacctctgtctcctggattcaagtgattctcctgcctcagcctcctgagtagctgggttcataggcgtgcaccacacctggctcgtttttatatttttagtagagatggggtttcaccttgttggccaggctggtctcagattcctgacttcaagtgatctgcccgccttggcctcacgtgcagttttaggaaataatacagagatccccagcactctttccagttttccccaagggtaacatcttgcaaagtgagaggacgatatcacagtcaggatactgacattgataccatcaagatacataatgtttccatcaccaatcagtggtcatggtgccttttatagccaaacccacttctctcctaccttcccatcccttttttaattttgccagtcattaatctgttgcccatttctgtcattttatgaatgtcacataggccgggcgcggtggctcacgcctgtaatcccagcactttgggaggccgaggcaggcggatcacgaggtcaggagatcgagaccatcctggctaacatggtgaaaccccatctctactaaaaaatacaaaaaattagccaagcgtggtggcgggcgcctgtagtcccagctactcgggaggctgaggcaggagaatggtgtggacccgggagacggagcttgtagtgagctgaaatcacaccactgcactccagactgggtgacaaagcgagactccatcttaaaaaaaaaaaaaaaagaatgtcacataatgaatcatatggcatataaccgtttgagactcagggtaattctcatgagactcatccagcttgttggtgcatcaacagtttattcctttttattgctgagtaatttccatggtatggaggaaccatggtttaactattcacccattggaggacatctaggttgtttccagcttggagttattatgaataaagctgctgtgaacatttgtgtacaggtttcttggttttctggtttgttttaaacagttctagccaggcacggtggctcacacctgtaatcctaacacttggaaggctgaggtaggaggactgcttgatcctaggaggcagaggttgcaaggagccgaaattgtgccactgtactccagcctgggcaacatagcaagaccctgtcattcataggtaggtggatggatggatggacggacggacagatagataggtagaaatgtaaattacagggctacgctcagtggctcatgcctgtaatctcagcactttgggaggcgaaggcgggcggatcaccagaggtcagcagtttgagaccagcctggccaacatggcaaaaccccatctctactaaaaatacaaaaattagccaagcatgctggcatgtgcctgcaatcccagctactttggaggctgaggcaggagaatcacttgaacccaggaggcggaggttacaatgagccaagatcatgccactgcactccagcctgggccacagagtgagactccgtatcagtactttctttttattgtttttctgttattatagtttaagttcattgttattagattatatactctgtatggcttcaattcttttaaatttgttgaggtttgtttaatggtcaaagacatggtctgtctaggtgaatgttccatgggcttttagggaaaaaagtatattctagtgttgttgaatggtgtcttagtccattcaagctgctataacaaaataccgtaaactgggtgatttataaacaacagaaatttttctctcacagttctggaggctgggaagttcaagatcaaagtgccagcagattcagtgtcatgtgaggacgtgcttcctgcttcatagataagaggtacatacacgtttaggagcatcgtgtcttcctggtggatgaattctgttatcattaggtgatcctttgagcacttttaaaaagaatctgttggccgggcgcagtggctcacgcctgtaatcccaggactttggggggccaaggcgggcagatcacgaggttaggagattgagaccatcctggctaacacagtgaaaccctgtctctactacaaatacaaaaaaattagccgggcatggtggcaggcgcctgtagtcccagctactcaggaggctgaggcaggagaatggcgtgaacacaggaggcagagcttgcagtgagccaagatcacgccactgcactccagcctgggcaacaaagtgagaccctgtctcaaaaaataaaataaaataaaataaaaataatctgtttaatagcctactagtgttcttcctttactattttattgagcattaattaatcccaacattatgtctatgtcaggactgatgacaatatttggtataaaaatttgatagtctcagaggctgaggcaggagaatgcttgaatccaggaggcagaggttgcagtgagctgagaccgtgccactgcactccagcctgggcaacagaacaagactccatctcaaaaaaaaaaaaaaaaaaatcgatagtatcatatcctccaggattcaaagtgaacttcaaacagtcttatgtagtctaaattttggaatgcatcccagtattgagttgcagcagggatttgagtttttgtgaagagagagaggtatatcagaatcttgggcataaactaaggagccatgtcagaacctcaggtgtatgccaatgagatagatcagaacctcaggcatgtacccgatgagacagatcagaacctcaggcgtgtacccggtgagacaggtcagaacctcaagcgtgtacctgtt

SEQ ID NO: 9442 - DNA, 6000 bp, Homo sapiens
atcccagcttctgcactgctaactcaggccagtcacttggccttgctgagcctcagctgccccatctgtaaaatgggcataataatccttgtcctgatgctcctgctggccagacaggctctaaagatagggtctcctctcccaccccttattactcgagaagaaaccaagaattagagggatttaacaaaccacttgaggttacacagcttaaaagatggcaaagccaggagtaaacccaagcctagtcctagacactggtccccgttgcctcccagatggagcaggcaggcccaggtttgtttagccaggagatggcacaggtgaagtgatgtgatccataggcccgttcagccagctgaccttataggaaagcacgatctacactgcaagtttagcccatggtgttagtaccaagaatgcctgtatttggagatagagcccagagttcaaatcccagctccacttgtctgtgcttctgtcctgagtctcaatggctggtatggggaaaagtcattaacttgaccccttgttacgttctctctcctcactcgctgaacaatgaaaattgctctttaattgatcaccatcagccacagacactgactcactttaccaagggtgaggccactgtgctttaagggactgcatcctccaatgtccttccaccttttgctgcagaacctctttatgcataagctgaggatcaagggaagaccaagggcttttggtaaatgcagccatgtcttcccctaccctttgcagcaagcctaagcaggaagaccataaactttagactctaggagatgggagatggaaagaggattaaataagccattccagtgaatcctacaagctgtaggcctgaactatgagaatgattttcccaccgagcccagaataagactactgggccttcatgcagctatttacaaaggagcattttgagtcattttatatttctccttgcacatatagaacacatggataggacagtggatcccaaccactgtctcttagaagtgatgtttgaatatcaccaagcacagtgcctatctcctcacagacacacaggaatgggagctatgatgattcttaacaaagggtgacagggtcactgtgtcaccttgtcaccagagctgctaacatctgtcactatgctctgaagggagctgcctatattgacagctaaataagcaaccaggtccagggagtgggagtccagtgtgaactgtccatcaccttctgaagacagcagcaggagcttggccaggccattaatcacaaccagagccttctacggctgcatccaacatcctttgacacctgcctcttctagctgcaacaacagtctcccctctcctctgcttcctatgtacaatctttgggagtgggaaagaatgcagagccttaactccccatccttgaactctgcagagagccaggggccttgaaacagggttgggtctgtgttggcctggagagggcctctgaaacttgagaaacgtacatttggcttatctgagttcctttctcaggaaattgacctttgagcctcctggatggtatcagaaagctgaggctttccagattgctgcacccagacaatgagacacacctgctgcctgttgaccaactcctctttcttgctgctcctgttctccttccctgctttacaaacccctaactttagttggttgaggagggagaggtttgacagttaggctgacgtcacctccaatacagcttttcttctggagcaacatttgttgtctcaatgattggctttctgtgtggtgagcagccagacctaggtcaaacccctggagtttgccaacaaaattctggttctccgatcaggaattcattgcttacggctcagtggccatggatcaggagcatttcagaagccctcctagcagcttcccaggcatatttggccagagatgggtttcagtctccttctcttctgcatcaccactgccagccccaattgcattcctgattgcctaggaagaacaggctttgaaatctgacatctgcatccagacaggtgagtgctctctatgggtccctgacagcaggagtctctcctctcaatctgggggaattccaaagaaatttccatttgttgcagtttggacaagcccagttgactggcttgagagtagaaggcaccctgactgttttggtttggacactcttgggcttgttatttgctactgcagttagtattttgataattgttcatttccataataaagattttcttccctggcaatactcatggtctgcgatatgagcaactggacttaggccaaacccctggtgtttggcaaaatatcatgcagacacagaaggatgacctgtagcttctggactactggtgggacatcaggtggtagggacatggccaatgtatgtatttccaagtatattacccgtcccccacagtaaaccataagcttcacgaagacagggcctttgcctatcccattcttagctttttctacagtgcctgcaaccgtgctcaggacatgaggtgctatttgttgaatgaataaatgttgagttctaaactcagctttgctattgagtgcctttggaaaactcactttcttctctgagactcattttccccacctgtaaaattaccttgaggctttcatctagtccttatggtctagggttctttcaagacatgggcgccctgttaaaaatggcctcagggtataaaagcaagaggaaacatttgcaggagagcatttaatccacatggattcatgaccaccaacatcctcacctttgaaataattttggttacatcagcagggacgccatagcagggcacagccatatggttggagccacagaggcatcagggagcagttctgagaccaaagaacaatgatgccaccatttactgcaggctatctgccaatcaatgggctgattcatgagctcttgattccttacaaggatgctgggaagctggtactagtttagacctattttccaaatgagtgaaggagaggtcagaaagcagtgacatctgtgaggtcacacagagagagactctttgacctggggctaagtggcaaagcccaggccaggggccaggccatgttgatatcccaggtagcagaagtggtagtgtcacagacttggatgacgcttactacgccgggtgctaagggtgagcacactgcctatgtgacatcagggcccactgcataatttctggagtcatcttgtaggaaagaggctcaaagcctggcctacatggtgaaacctcgtctctactaaaaatacaaaaattagccaagcatggtggcgggcgcctgtaatcccagctactacgaaggctaaggcaggagacctgcttgaacccaggaggcagaggttgcagagagccaagatcacacatttcactccaacctgggtgacaagagcaaaaccccatccaaaaaaagaaaaagagaagaaagaaggaaggaaggaaggaaagaaagaaaggaaagaaggaaggaagggaggaagagaaaaagaaaggaaagaaagaaagaaggaagggaggaagagaaaaagaaaggaaagaaagaaagaaggaagggaggaagagaaaaagaaaggaaggaaggagagacagaaaaagaaagaaaaagatacagagagaaaaagagggagagagagaaagagagaaaaagagaaagaaagaaaagaaaagaaagaggatgaagttgagtaagtaccttctgctccaggctgtgttgggttgggggatttgagaggcatggggatggttgtcaacttgtagcatgttgaattgacttttaatgagcatcttcaggatttctgtttactgctgcataatgaggaagactttgctgttattacttgaaattaacctttttggatgcatcccttacacatcattgaagaataatgactgatttcttcttttataaaaacgtgcttcataaaataaacgtattataaatttttaacacggaactcacaagataatttcatctttatttttcttcatagtacagcttgctcctgacagtatattcattttcttgcttattgtctgtctccccagctaagatattccctgaagaaaggcagggtgactctgcctgctcactagagcttgggtgtggggaacggtgccaggcacttagaaggtactcagaaaatacggactgaataaataatattactggcacatgaagagaagaagtgcatggaaactcaaaggttccaggctctaaaatgcccaggaaacatcaatgccaggaaggcaatgtgagtctgttccctccggcattgataatctcttcctgacttcccgaattacctctgtttgtggaccaagctgggagcttgggacatatgtatcctgtatgaatagtaaattattctgtataataatattcattctgtatgaaaattattctgtatgaataataaattaatagattaagtgataataataattaaatcaccacttccttttgcattgtgtgttacaggctgaattgtgaacccctaaaactcatgtgttaaaagttctaaccccccataccttacaatgtgacagtgtttggagacgggacctttaaaagggtgattaaaatcccagcactttgggaggccaaggcaggtggatcacctgaggtcgggagttcaagaccagcctgaccaacatggagaaacactgtctctactaaaaaaatgcaaaattagctgggcctggtggtgcatgtctgtaatcccagctactcaggaggctgaggcaagagaattgcttgaacccgggaggcagaggttgcagtgaactgagatcacaccactgcactccagcctgggccacaagagtgaaactcccatctcaaaaaaaaaaaaaaaaaaaacagggtgattaaaatcaggccatcaggataggccttgtttcaatatgactgctgttcttataagagaaaaatgtggacacagagagacgccagaggtgcagccacacagaagaaagaccatgtgaagacacagcaagaaagcgactatctacaagccaaggacagaggccttaggaaaaaccacccctgctgacaccttgatttcagacttcctgcctccagaaacatgaggaaataaatttctgttgtttaggccacccaggcggtggaattttgttacagcatctctagcaaactaatacagtatgctatactttccctttcccaggttttattagagtttagtaactgttgttcccattactgagatgagaaaactgagacccagcaagggaagtgacttggctaagactccatgacttgatggatttcactgcagaaagctttgggagaacctcgtgcaagagcctgggtcttctcccattcccaccccacacctaagtgttggcgagcttttgggtggtgcctcctctttgccagggcttctgactccgcagaggtcctggcccctttccccgtgtgtcccagcactctccagtgacccagagccctcctgtgaatggcaagaggtggatggtggattcaataagtgggagactgtgtctgcatcagagacaacagggtccactgttccaccaacgtgctccatcagagaggcaggaaggtctccagagacggtgaggtctccagtgaatttccctcctgccccatcctcctcccttgcctcacttctacccagagtctctagtgaggatgatcagagatgagagctcctctttttggagtgaccttaccagttattatgggttgaatcgtgtgcccacttccccagccccactcaaaaaatgttgaagttctaacccgcagtacttcataaagtgacttaatttaaaggtagggtatttacagggtaaccaagttaaaataaggtcattagggcagaccctatccaatataaaatggggaaatctggatacagacatgaacagaagatgaactgaggagacacagggagaagaca

SEQ ID NO: 9443 - DNA, 6000 bp, Homo sapiens
ctgattcttctggtacaccaaggcgagaacccgggatacagaaagccctctgtccatgcgacaagtagaggcactaattgagctggttaacacaagtcgcctatagacggcaaaactaaaagatcaccctgtaacacacgcccactggggcttcaggagctgtaaatattcactcctagacactgttgtggggttggagccctacagcctgtccgtccatacgctcccctcgaggtttgagcagtggggcactgaagaagcgcgctacacccccatcgcatgccctgcaagggggacaagggaacttttccagtttcaacctcattattttatttgaccactttgaagatacgattattctgcttcattgtttgagaagtcagtagttaagcttaattatctctccctagaaagtaatccattgttttccctctggcttcttttaagttttttttccctagttttgagctatttcattatgatatgcctaagtgtattttgccttaatttacacattccaattaaaatctgtaatgtttctggaaactgaagattgatatccttcattaattttcaaaccctaagccattatctctttagatattgcttctgtctctttctctatacttctaggacttcagttacctgtatgttagacctctacatgtatcctctatatctaatttattcatatgctttattttctgtccttttatctctgtgctttaatttagatatactcttctgacttaactctaccatcactagctttctcttttcagaggtgtgtaatatgctaacactatctggtgaattttcacaatttcagttctagaatttccatttggttctttataatttacaggcttgtgataaaattcttaaccttgtcttttatcctcttaaccatattaagcataattatttaaaagtctttgtgaaaactccattttttgatcccctagagctcacttgtctgttactgttcttgtttttgtttcagatacagggcctcattctatcaccgaggctagagtgcagcagtgtgatcttggctcactgcagccttgacctcctgggctcaagccatcctcctgcctcagactctggaggtgcatgctcagctaattattattattattagttttttagaaacagggtgtcactatgttgtccaggcttgctcttgttttttgcaaccattttgtcttttctccttggatgcctacttatttttgattcagtgttgaacactgcatatgaacaattgtagaagtaatttgagaccatggatgaggttatcattcccagggaagatttacatttgctgctggcaaggactgacatgatttgaatggagtcccaaacaacttgtggtcccaaaacagtacagtgggatacctccttggtggtaccaagcctccaaattttgtcgtcctagggcaatgagagtgttaaaagtgctgctcagagtcctagtgtctcaaacattcatctggaattggcagatgcctttcaagaaaaagcagccataaaccactcacctctctcatgtcctttctctctgatattggcctcataattattcactgcctttttagttctctgaagctgtctgaaaactaaagtcctccagtgactttttcttttttaaagacagggtctttctctgttgcccaggctggagtatagtggtacgatcatagcttactgtaaccttgagctcatgggctcaagtgatcctcctgttgcagcctcccaactaggcctatagacatgcatcaccatgccctgttaatttttaaatttttttgaagagatggggttgaccaggctggtcttgaactcctgggctcaagcaatcctcctacctcagcctcccaaagcgctgcgattatacgcctccacagacttttcaattccacctataggaaagtcccatgggaattggaatttagctataacatgtcgtttcttgtaccagttattaaataatgtctttcagctctattctcccttcccacctctagacactgcttctgatgccagggctgagactctaaaaaacatatttctcattggcaaataaagaagatctgatctaatattccctattagactaagctgataggttgatagagggagaccacagggccacttcctgtgagcatcaccccagctaggcttcttcaacaaggcagcagcacattcttcccacagaagctgaatccagtttaagtttttccaagacttgcagaaccagcctcagtatgccttctccttagagatctgggtgagagtctcccagtgccctctttagagggcttactcccagctccacagccacccctcatccatagtgtgtgtctaagtcccgtagggaccctcctcagaggtctgagtcccatccccatgggatctctcctctgggctcaatgaccccagccccagctggtcaacacacctcctcagagatctgaattccagctctgcaagcccttcctttaagctgtaataattccagcttctctttcatctttgagctctaggggtggtagctgtgtcctatgtttgtaactccatatcttgggattttctttttattattttaaatttacttcctgttaactattgtttatattcagttccctttgtttaaataactgatgcactttctctctcttctgtggtttgaaggtttgtgtccccttcaaaattaatgttgaaacttaatcccgggccaggcgcggtggctcacacctgtaatcccagcactttggaaggccgaggtggatggatcacctgaggccaggagtttgagaccagcctggtcaacatggtgagaccctgtctctactaaaaatgaaaaattagccaggtgcggtggcgtgcgcctgtagtcccagctacttgggaggctgaggcaggagaatggctggaacctgagaggcagaggttgcagtgagcagagatcgtgccactgcacaccagcctgggcgacagagcgagactcttgtctcaaaaaaaaaaaaaaaaaaaaaagaattgaaaggtttttttagggttacttagcaagttacctacaagtggtgagaatattaaagtccctttcaagtcagaacatttaatttttttacaagtatattaacaactttatttcctgttaactacaactatcacttatattcacttctgtctattcaaataactgttgtgctttctgtctcttctatggtttgaagagacagaaagatttgtgtctcctctaaaattaatgttgaaacttaatccccacttgaggtcccgacgtattaacaatcctgtcactttgcttaactatgattttcttaaattctttcttttagggtataaaattttagttttaatccccaaaaagccctggggaaggtgatttagggagtgatggtattaattactaaaaaatttatataatgtttggggtaaagggtacttggagtcacaggcatcattgccaaaataaagagatttgggaaatgtagtactaaccacagcaaaacccagctctatatttagcggatgaggccacatggattttagaaagggcgggctgcagaggtcttggctaatactggaaaagagatttaatttgaaagtgaacagtctgttctattccttaacatatttttggctactagatggtcaagccattgcgcaaataattgcaccatccttgtcttattcaaggtgggccgttcatttcttaaaattaccagtgagcaacatgggaagcagcagagacggctatcgattaccccgtagggagtgcctgtgctgaatgccaagggcttccctttcctgacagacatcttttatgcagctgaatcatctgtatgcaaaacatcagccaacggtgcctcggaaaaacaactggctgctgggcaaaccaggtgtgggctccagcttccacctgctactactgtcgtgcagccacgggcactctgggtgatcctcactggcctggggctggtcatctgctgctagatgaccttcgctgactctctacattgatattccgacacagtgttctctagaaaccgcatgagccaggaaaggtgtttcctaaaggagcaggggccgagcctcacgccgaaacacgtctgtaacacgtacagtcacgcgtcccatgcatccatgcattctgagacatgcgtctcggttgtgggatcatcacaaggtaacttacacaaactcagatggcacagccactacacaactaggcagctgatgcggtccgctgctgctaggccgcaaacccgcaccgcgtgtgaggtgcgttattcccctggcacggtaatgacatacctgtacgtgtatctccaaatacaggagaggaaatgtccttagctaagccctcaccagaggacaggaagtttccagctccgttatcatgttatgggaccaccgtcatatacacggtcctcctcagaccaaaaggtcgttcgttatacggcacatgtggttcttccaagacccttttccatctttctgtcacatccgtgcctgagtaaaaagtggccctgaactcaaccgtccagagttggcggcagaactagcaccactggcccgctccacatgtggaaggcgctgggcaagggccgccgcagaccccatcaggattaatcccccgaaaacctttcactcgggtagctggcacacaccgcgtcagggcagagggcgcgcgggactactttccgcggaccctcggagcgggcggagggatccgcgcaggcgggacggggcagaggcgggggcaggggcgggggcaggggcgggggcaggggcggggcagaggcggggcaggggcggggcaggggcgggggaaggggcggggaaagggggtgcgggccggggcgcggtcagggaggagggcgggggccaggaccgggagctcggggcactgcgcctgcgccgtcgccaccggtcagcccgcgcgaggggtcggcgttcattcctgccgctgccgccgccgccgccgaggtcccgcaccagccatggcgcagatcctccctgttcgctttcaggagcacttccaggtgaggcccggcgggctggggggctgccctgtcagccgcgcctccgccgggccggactgccaggcttgaccccgcgcccccagccccgctgagccgctgcccagctggccgcgccgatttccgacctcccacctgggctggggctgcggcgtcccgggcgcggcggccgctcctgaggacccgcttgggtgccgtcgccgaagcccgttaccggcggggccggctggggaatggtgggggtggaagccaacgccccctgggacgccccgctcagtgcccgcgaggaggcacacaaattcccgctgcaggcagggcaacccaagggccgcgcggatcccacagctccacgcccctccttggcgtcctgcggtccttattcgcccctgagtttgcctctgtgatcggttttcgtccccagggcggcttcgcctgggaggaccgtgaacatgcgtgacccaagagaaaaatttctcagggccaagcctaaatagggcttttcaatgcagtaacacccccaaagcctgcctttttaataaggtcccagtttgttctccatttgtttgtgttcagaaacataaggactggccccctgctttgagcaaaggctcaggtcgggcgtcgtgcgggccgctcgcgggtctgcccgggagcggtgctggtccccacgtttaccctgggaggtgcggcagaggagggatagccagcggctcctccctgagtgctctgtgttaaatcatcacactaccattcgttgcgattcgcttactcttttctagatgaggaaaccgagtctcaaaagtgttaaagaactcatcttcattcaataagaacaggattcagactcaagtctttttgaccacaaagtagtacatcgaggaacgtgcttgcttgaaagttcctattttcacagtgcagagcactgtta

SEQ ID NO: 9444 - DNA, 6000 bp, Homo sapiens
tgtgttgggaccttgtgaaagtgacttaacctctcggtgcctcagtttccccattggtaaaaggggtgattatgctccccactacacagggtttggaggatggccgtgcgggccgtgccgagcagcgcgatggtgcaggccgtctgggtcagtgctgagagagcgagtgttccttcgacggttgcaatcagaggtagcttccaaggctgggtgctgccaggaggagctggggaggctgatggggcaatggggagcacagctcacactgctggcaggcagcctggggaggacagagggggctgtgctgggcgctccaggcatgtggttccctttcctgtggggcgaagaccagcatgggggcagggcccagctgtgtcaggaccactcagactcttatgacacatccagagtccctagccccaccccaacccacccagtccacgagaaggaacagggtggggaggtggggcccaaatctgcgagttcccaagggaggcctgtgtgcagtaagttgtcgggggcggcgctggcacagctggaaacatcttggggtttgaagccagagcctcaggtgagactcaagggtccctgggactctcttctgggtgtctgaccgtttatgcttcgtggagttagaggcgaagacatttctgtgatgtcttgaattctgctttttcctgattttgagcaaatgaaagccagcctggtgtaggcagtcgggtgccttccccaagtaaggggctgagagggtggtcatgccgggacccaggggacagggagtagcattcctaggggtgcacaggcagccccctagaggcagggatgtgtgggggtccttgtgctgctgtgtgcctgcagggcggcactattcacatggccctggagctgcagggtgattgctggccctgggctctgtgtcctggctctcccgcccctcctgaagtggcccccatgagacaaggcaggtatgtcctgtgagcagccctctgctgcccagcgtggccagggctcagtgggaccacggcggctgcaatgctgctctctgcagctcagagtcactctcatcgccagcagtcgagtgcagagcctgggccccccggcctccccagcccctccacaccaccccaggaccgaggcagcagctggcttcggtttctgccatgtttttccaagtatgtggaatgagctaaaaacagcaggagtggggccttatttgggagttgccactgccgtccttggaagctgctgtccctcactgccacccctccagccccatcctcggtggaacatgcccctgttgctttgacttttgtcgcccgaacatccctcctggttgggggcctttgggcagtgggcttagtggcgtgcgccatgccacttgggccacacgtgcccaggctggtggctctcggggccgtgtccagagggtggctaggctgtgctcccggcagtgcccagatgaggctggggtgtggcttggggatttgtgggccaccggccacagctcacccagcagagttttaacagatgttcgtctgtcaagtttgctcccagctgtgttgtctgaggcaggctgccttcccatagcggcggcagagctgaagagatgggaaggagactgtgtaggccgcagcaccgaacatatttgctctctggcccttcctagagtgcttgctgacctctgtccgacagctggaaggaaggataggacccgtcctacgataaccactattgacatttgagcgcatttccttcccggcttttgtgtgaaggtggcagtctctttgcttttgtggttgggatctgctgcaggcacggcgggctgtttgcctgaggcttcctggaggacagggctgggctcggagctgcaccagcatcctgcacgcactggggcctcagcagagagccgtggcgggcggggcaacgtcaatgctggtgggcgctgggcctccacgttcagatcagccctggcgataggttcgggccaccctctctctggcctccgtgcagtggcccaggccgcccccctgcctggcacacttgcctctggctttccactgaagcgctcctcttacccgccgctccccactgggtatgggtccagtcgtgtccctgaaggagatatgctgacgtctggaacctgtgtctgtgacctaatttggaaacagggtcttggcagatgtaatcaagcaaggacaaggtcaccctggagtagggggcctatatccacggtgctggtgtcctcatgagagcaggagagcagacactgacactcgggtgaaggctgcatggagtcagagcagggcttggtgtgatggcggccacaagccaaggaaccccaggtatttcctgcaactccagaagctggaagaggccaggaaggatcctcccctggcgccttcagagagagtctgtccctgaagatgtcttgacatttgacttctgggttgcaggtcttggcggcggggtacatttctgatgttagaagccacctggttggcggcgatgtgtcactgcagccccccacaggttctgggtgtccatgtggtcgggggcagaggtgggcagggacagacatgtccatgacactggcccatcccttaggactgctttttgaggacaaggctgcttaccaggaagttgtaccctgcctggcccttgcccctgccctgtgcttggctcgtggaagggatgtggcccttctctcctgcatgcgtgcaaggaggaagggagaggtcagaaacccgcctggaggaggctcgggcgaggggaaggtttcactttccggcaacattgtggggctggctgtttgtttaaacaaccccaaagaaaaccatttggccaaactgttagtttccaaacaatttacttccttggtgtttgaaaaactcctaccaaggctctgtagctggtcccagggaaggagttggcctctcttctttatagcccaacacagtcccctgcacctgcccctcccaaccccaggcctgcttacctgtggccatggctgctgcccggacctcactacacacacaacctcctggaggccagctgtgggcaccagccttggcaggcatctggcagagcccaggctggtgggactctctctgcagctgctccctgccagcctggctggacagagtccccaccacactggggtcacctctgtactgctcacagctcactcagaccttcaggcaaataggttgggtcctggctctctcccaggtgtcacaatctctgcaaaattcaaaaacctcaggggccttgtagcctgaggcgtgtcagagactcctccctggagtcagtaaacacctacagattcatcccagcagtgaaaggactgcttcaccacagaggtttgatttattcctaagtaattggatgggatgccgagaatgggttcctgatggtggaactggaggccctttgctgacctagttaacagagggctagggctgggtgtgctcagtccctgaaggttctaggcccatttgggacgccccgccagaacctgccacatggtgacagctacctaaatcccagaggctcttgagctggagaacagacctctcaatctcagcaggtcccctgcacgtaccccataaccctagcctgccttcacagtacagtttgtggctgtgtattcacggatggtgtcgttcacctaaggtctctgccctgtgaccccaagggcgtccagagggcagatcccaagtctgtttcatccacctctccttccctagcagctggtccagggcctggcctgaagtaggttcctacagagatactggtgggatgatggaggcagccaggcatcaagtgacaaacgcgcttcctggatgtgctggctcctgggattgaagtatttgaggaagcgaagtgaagtgagctttcctcttgcagctgtgtgtccttgggccgggagcctaccctctctgaggattggggtccttgtcagtaggatggggcatcctcatagctcgaggggtagtgtgtgaaaattgtgttaatgatttttttttttttttgagacggagtctcactccagtgcacaggctggagtgtagtggcacgatctcagcttactgcaacctctgcctcctgggttcaagtgattctcctgcctcagcctcctgagtagctggggttacaggagtgcgccaccaagcccagcatagttttgtatttttagtagggttttgccatgttggccaggctggtcttgaactcttgacctcaggtgatccacctgcctaggcctcccaaagtgctgggattacaggcgtgagccactgcgcctagcgtactttagtgatttcttaggacgacggagggaactagctagcaaggcaggcttggaatgtgttttgggatcaaatgccggtttctgtctggcactggcgttctctgtggggccatgatggacacactgctgaggtcaagcgtgattcgtctcacgctgtgcctggcagtctcgttggaaagttctgtagacaccgtgtggacagggctcttcccagccaagccctggaggacttccaggactgtgatctccccaccgtggctgattaagcagggacccttcgtggagtctatggtcccctctaagtcatagctagacagggactcaggcaccatcagccctggctgttattcactgtggatgaggagacaggcccagagaggggcaggaacctgcccgaggtcaccaagcacgggcaggccccagaggtttcggtctcagattctccctgctcatccctggatgtagcgctgctgtggacgtggggctgtgctaggggctgtggagagcagagggcttctgccaggaccccagtgagccagtaggggtggtgccttggccatggggcagactgggggtacgggacagccatccaccggggtgtggggaggaacagcttccctgaggaggcggtgccgtgtgacctgggccttgaaggacaggtccaatgtcaacagaacattttgggagtggagcctagagggagaaaacttgttgaaattcagagatccccctccccctaccaatacacaccaaatcagacgcctctgaccagatctgaatttggctctcagagatttccattgtagccaggcagttggggcactttctgagtgctgcctccacctcactgtccccagcctgcctgcctccgtttccctagccctgggcctgtgccgctgtcaccatcacctgggcgccctctagtggatgaatcggattatgcacgagggggcttggagcaggattcagaaggggctcctgtccttccttgaaatgctggacgccgggatcctggaacagctcttcaggtctctgcattcctcctggcaacagccagagcctgggcgcagggggctactgttgtttgaaggctgaaggctgcagcctggtagggcactcaggagacctggcagttggctgcagggccaggtctaggggccagggcatgagggatgctctgggctggctcagccccgggcccccatgcggattgtgactgtgggggcatggccacatgatgttgaggggggatctctgaccctgaccttcttggctctgtgcatccttgaaaccagaaaggtctggaacaaatcagtgaacaatgccctaactcggggagggagccacatcctgaccccagcagcctcagaaggatccgtgtcagggttatggggcaccctgggggccccgagtctgcatgggtctccacatgcaacttctgccggaaactctgaaaaatcccaactggggggtcataggacacaatcagaaatgctgatgccactgtgtgtggatccccgggccctggggggtcaggagcatgtagaaggtgggccacagggggttcataagagaatcctgtaaccgcccctgccccccaaacttagaagcccactggagggccatgggtgaaagcttgggggggtgtcctgtggagtgggtggtggggggtctttgggtttacatgctgc

SEQ ID NO: 9445 - DNA, 6000 bp, Homo sapiens
gctaacatggtgaaaccctgtctctactaaaaatacaaaaaattagccgggtgtggtggtagacgcctgtagtcccagctactcgggaggctgaggcaggagaacggcgtgaacccgagaggcggagcttgcagtcagccaagattgcaccactgcactccagcctgcgcaacggagcaagactctgtctcaaaaaaaaaaaaaaaagaaaaaaaaaagaaaagaaatgatctggtctttgtgctgccatggatgcattttgcctcttctatgatttgtaggcgtttaactctcctctttctccttaaatacataatgcttgtttccagggcagggtccaatttttctttgttctgcctggtcattcagacatttctatactgcattgctctgtttctaagggacttgagcgttacctgaataacaaaaatttgagtcactggcagccccgatctcaaatctcatttcttgctgggtcaggggacagcccaggaagatctaacatcattaagatttcagtagtttggcaaggcaagcagggaagggagaattctctttttttggagagagagtctcactctgtagcccaggctggaatgcagtggcgcgatatcggctcactgcaacctctgccttccagattcaagcaattctactggctcagcctcttgagtagctgggattacaggcagctgtcaccacacctggctaaattttttgtatttttagtagaaatggggtttcaccattttgcccagtctggtcttgaactcctgacctcaagtgatctgcccgcttcggcctcctaaagtgctgggattacaggtgtgagccaccatgcccagttgggaagggagaattcttatgctaccagttcaataagtaaaaatttcagaagaccaactgctgatgtccctaggttaaagaaaaaaaaaaaaaagacaaaacccgctgttgtttcataggccaccaggaaatatcctggttatccctcaaagccatactgcttggttgaacaggatcaggttgtggggtactgccaagtggaaaccgctgacttaggttggggctaattcagcacaagaacaagcttgtaggcacttggacttccaccttggtggtccaaataataatactaagagatgtgtcagggctgggcgtggtggctcacgcctgtaatcccagcactttgggaggctgaggcgggaggatcagttgaggccaagagtttgagaccagcctgaccaacatggtgaaaccctgtctctgctaaaaatacacaaagttagctgggcatggtggtgcgtgactctaatcccagctacttggcaggctgaggcaggagaatcgcttgaatctgggaggcgggggttgcagtgagctgagattgggccactgcactccagcctgggagacagtgagatcctgtctcaaaaaaaagaagaagaagaagaagaaagaagaagaaagaagaaagaagaaagaagaaagaagaaagaagaaagaagaagaagaagaagaagttgtttaaggcttctctttccaaggcccctggttaagcttactgtatcactaaccaaattagttgatgaataattaccacctattaagcagttactatgttaggcactgtgctaagtgtttacttttgtcccatttaatccttagaacaacactgtgactattattgttatcctacaaatgaggaatggaaggcttagtgaaacaaagtaatttgcccagcatagtggttgcaccaaggggttactggggtgctttgcttgccgcatgtgaatctctagcagccccactcaagtcaccttacataattaaaaaaaacccaataataatgataatgatattctttgatcttgacaatgaatgttttttcactctcatttaaaatgtgaataaaggtcaggcctggtggttcatgcctgtaatcccagtacttcgggaggccaaagggggggaatcacttgaggtcaggagttcgagaccagcctggccaacatggtgaaaccctgtctctactaaaaatacaaaaaattagccgggcgtggtggtgggcgcctgtaatcacagctccttgggaagttgaggcacaagaattgcttgaacccaggaggtggaggttgcagtgagccgagatcacaccactgcactccagtctgggtgacagagcgagactccatctgaaaaaaaaaaagtgaataaagtgataatggtactactaataagctattattagttagctataagtgttagctgtaacacttatggagcgcttatcctaaatcattccgttcaaagttctaaacgtgataacattaaattcttacaataatcttttcaggaaggtattattgttatcctaatttgcagatgaagaaactgagacacagagggggtaagtagctgtcacaaggcatcatgacttgcaggtggcagagctaaaactctgctatttttactgatttataacacagcctaagtaatacaaacaatatgctcaatacaacaactcaccttcaaggcaagtcctcccgacttcccttccaaccagtctgcaatccccaaacaccttttatatggaagttcttagtcaccactggtcccagattacgtgggcaggaggtgggaagcctgcgttctcatctgggttggtctgactctgaagcagggatctttactgttgtactgttccagccccagccaggttaaacccaggttcaaaggccaaatcacacactggttggaaatgaccttggaaatcatctaacccagcgtttctcaacctccgcactattgacatttggggttggataactctcctggggggaccgtcctgtgcatgataggatgtcaagcaacattcctggcttctacacactagatgccagcagcacctccccactgtaacaatcaaaaatgccttcagtcggccaggcgcggcagctaactcctgtaatctcagcactttgggaggccgaggcaggcggatcacctgaagtcaggagttcgagaccagcctggccaacatggtgaaaccccatctctactaaaaatacaaaaattagttggtggcgcacacctgtagtcccagctactggggaggctgaggcaggagaatcgcttgaacccaggaggcagaggttgcagtcagccgagatcgcgccactgcacttaagcctgggcgacagagcgagactctgtctcaaaaaaaaaaaaaaaaaaaaaaaaaaaaatgccttcagtcactgacaaatgtgggagtggaggtggtggaatggcaaaatttctccttggttgaaagccactgatccaaaccatctcattttacaaatgatggagctgaggtccaaagagatgaagtaacttgtttaagctagttagcaaagccaagattagaatccaggttattcacgcaatatccttttatttctataacgtacagggcacgatatggaactcagaggaagtcactgcagtccttgtcctcacagtctggtaggggagagaatctattgcacagatatctctatctccacgaagttggtaagtcataaagtgctcctcaggcagcaaggtacgaagaaagagaatatgttctcgtgttctgaattccggatctgccacttttttgctgcaggatttaactaaggttcagtttcatcatcaatgaaatggagatcatggtatctacttatatcaccagtttgaaacgggtctgtggatgcattgtgcaaactctaaagctcttacaaacatcgggtattattactaacttcattaggaatgtgagttatattagagtaaaagctctcagaactggggtgaaccatagaggggtggcttcattcctcgaccttccaatttgagacattttttcttctgcgggaggggaagcaggcaaatagcctgcctctcacagagtgcccattccctctccgggaaccaaggtgctcaggcgagtaaactcaggacttaactctgtacaactagtaccgcaagcaggagccactccctggccttcgggtctctcaagccccgcctgctccaggatacggccccgcccagaaaggagacagaccccgccccccccgcgctgccccgcactccagccgcgctgtgcctccaggacaatcccaggcccgtgccggagattcccgagcttccccgatcgcttcccggcctccctcgggcagccagcgaggagactacggagattgccgagggggcctggccccgccccccccgcgggccgccaccgcccccctcgccgtagcctcccgcgcgggctggagttctacatcccggtccctccctccctccctctttctctctccccgccttcccggtgctgccacagtggcgggtcggaggatcccggccagtcagctcgttcctgcctcgcgcccctcctccccccaaaataaacagccctccccacgcctcgggagcccggaccgcccccttcctccctcggccggcgtgctgtgagggagagtgtgagccagcgcggccggtgggcgagctccgggagtgcgagaggcggggcggcgcggcgggccgggccgggtttcgcgtgtgcgtgcgggggcgcgagcgagtgctcatcacgacccgccagtggccccgcgccgacaacccggcgggcgggcgggcggggagcaagcggtcaggcaaggagcggcggccgcgaggcgcggaggggcgcggagtccgctcgcgcgcacgcacgcacgcacgcgggggcgggggcaggcgcgcgcccgcctgtcgcgacagtcggggccgaggcccagggggaggtggcctgtcgcgggtcgcccggctcccggaggcgaggggggcgcgggcggatggcggagggcgcccagccgcatcagccgcctcagctcgggcccggcgccgccgcccggggcatgaagcgggagtcggagctggagctgccggtgcccggagcgggaggagacggagccgatcccggcctgagcaagcggccgcgcactgaggaggcggcggccgacggtggcggcgggatgcaggtgaccgcgcgggacggggcgcccagttattgcgggggtgggcgtgagggtcgacaccgggctccccggcttggagagagggagggcctccgggagtcctgggttggaggtgggatggggggccattcggggcctggttggaaggtggggcgagctcgggctaggaacgaaggttgcaggactgaacctggtgtgcccgagagggtcctgattcctgaggggccaggaggcacgacgagtggataggttttggggggaaatcgaacaaggttgagatggattccattttttcaaatccttccttagtgccttggggtggagtggaagccgggaaatcctggcttctctggactgagtcgaggaaaaggagatctggtgggaaacctcccgagaagagggagtaccttttggcagccctgggcacacgctgggatggggaagagaagtggcatttcaatgagaggagtgaaaagaaaactcctcgagagagccccgaggggatgtggctgagattgtgggttaaatcacacagagtgtgagaagtacaaggagtttggtaatgttatggggacacggtggtgctcagtctcatttactttgtggagcatactaatgagtctgaagggagacactagacatgtccctcctgttctttgccaattgcattctacatcaccaggacacaaaatagctctttaatgtcccgggctataaaaaaaatttttttatagggctattagaagactggattctcaattctggattgaaagataaacgtggttaatttgggtagggaatgggaaaggtattgatgtcagctgacttcatagttttgaagaagaccttgaaacctttggaggttttacgatttggtctttgcccagaaaatactgctatgacatgatgagtctcacctaccaacagttgtgcagacttgtgcctaattctc

SEQ ID NO: 9446 - DNA, 6000 bp, Homo sapiens
cccagagggcaggtgggtaggaaagcttcacctgcatcacctccgtcagcaccaagtcttccagggagatctgctccattgccaggaagggcctggccaccagcaccccccaatccaggtgctgcagggctggcatcagcctccccaacagccgctccagctgtgcagcatctgcaggctgtccggagaagtggggcaggagagactgggctgggaggagaggagcaacttaacccagactcttggaagcctcttgggcctcctctccatcccttcccggctgccactcattagtgatgtcctctggggctctgtgttcagaaggtttctaaggattcattcaggcttaggggaaggagtactgtgatagattagttatgtctgctgaggacagtggaagtgaagctaatatgtaatatgtaccaactggtgccttccatctctgggggtccaggcccctgccccagcctgcatgacagggcctaggaagctcaccttgcacaggtagacattggtggcaggcagctggatggtgacatgcttccacgccaagtactcatccacgcaggtgcgggcttgcagctcaggtgggtaccagtgtccccgtatctggtactttcgactcaggtataaaacgatgaccatgctgtgggcagggggtgtcagagatcttttctccagcctgtcagggccaggtggcttcattgctcatactcagggtgatttgaccaggttttctccccaccttcaccttcaggggaggacctcccctatactgcaactccctccaggcagtatctccccacgaccaaaccactctgtttctccatttccaactctgatcctccctgggcccatgtttccacctcccctcccagttaccataccatcctgccctctgtgcccaggccccactccctggcatcagggtccccactcagagtgcctgccgtgtgggccctgcccaaaaggtctccaagttcccttcctagtgccccagaacactaggtgcccattttctatcctcaggtaagccctgggaggtggatacattattcctcccactccgttttacagaggagaaacctggcacacaaagttctgtgatttccccaagggcatggattgaggaagtggtgagctgggattgaatgtggagtctcccctgggtctgcccagctcctaggactctgaaaggatgagctggggacatttggggaggagccagcctcaagcctgggccttgcccgctggcttcaggttgtccaggtttatccgggtgacctacgtcctttccccacctgggcagctccagctggctcagactctagccaggttccagcctccagctttagcccaaaggtgcccctgggtccagcctctgcatcggagctacacaggctgaaatgaggaaggggcctcagtgatttggaaagatctccaagccaaggaaagatctcccctctcgcctctgcctccccctacaactctgagccccagaacccaggcagatcctggctctgaccctgggtgggcaccaggtcaccattacctctttgctagtaggaagtcgccatctctgagggcaggcaccttccccagggggttcaccttcaggaactcaggcttcaggtgctcccttggtgggcagaaaggcgagaaggctcagtgtagggcctggtccttggcacccactccatggggcccagcccagccacctggctcaccccaagccaactccaccatccacagctcaaaagggatgtcattctgtcttgcaaaagtggatagtgtgtcaggtccaggaagagctcaagccccattgctgctcctctcacctgccctccccagaattctggacctccaggagttgctcagcccttctccactagttctgagctgtttcctgtccatagtctgctgtagtgggccagagcacagggcagatttgtcttcagggactttctctgggcattcctgggcagagaacttcatcttctctgttaactcttgctgataattctctgtagctaggcaccttgtaaaacccatgtcccagaatgccaaacctggaaatgcaatgtcagcgccgaaactgcattgaaactgaatgaatgaggtccccaccctcttatctaaatatcctatcagtctgttgaatgtcaaagtatgtaggggtggtgtgggggagcctatagggagtctccatttctgtagctttccacatgttccatgcagaattttcctctaatgacccttggacaccgtggtggtcactgtttccctgcataaacctttgatgatccttatctttagcgtaccagtgaaacaccaaattcagattttcagtctgtgcagtctatgtagttaataaaatcaatttctaatggaatatgcctgtgcctggtgtgtttgtacctaaccactgctaaggactttcattgatagctagaccttggagttccttcccctggacccctgacccaagtattttgcactcattcctctgccagtgtgtttcatggtgtcctgcttcccagagtgcctcagggaatgcttgcattggatataaatgaatcgttgcggtcaccatggatgggattcaggcctaactctcaccaagaccataaggccacagtctttgatatagattccccatgttaaatctgccatcctcagtgtagtgagagtgatattgagagagaaaagttaggtaattaaggtgggtccttggtaaaactcctttaaacagaggaacagcctgaaaaatcaggcttcaggcacagataaggaaacttgcacaaacctctggctcactcagataaaggaacaatgcccaacacagaaacacctttgatctttgtgcctaaggcatgcccacagctactttgataagggaacaagacccagcatagaaatgcctttgtcctttgtataaccagtgggcttccaggaaatagtctcttctccttttgtggacatgtacacggtgggctacagtgggttccagtgggcactttcctttcttggacgtgctttagaatgtgagcctctgattggtcctgggccaggctatcacttcagctcctgattggtccctcaaggtccaggggccaagctgagtagtgctttctccaagaccagtcagtacattccttcctttcccagtccataaaaccccctgacccagcctcataatgggcaacctgcttgggccccccgccagctgcaatgagctttcttcatttgcttattaaacttttgcttcaaccttaccctttgtgtccacactccctaattttcttggtcgtgagacaaagaattctgggtgataccccacaatgagagactggtacattgtggtgcacgggcaagactgcaacaatatgttttctgcttgcttgtttggactggcctcttcctaactctccagagtgctctctccccactgtggccctgagctttgcctcacggtaacactgtgctgcatgacactccagcatgatctgcatgtttctcacctccggaccttccccacacaactttcttgctgcttggaccacccttcccacctattttcaactgtttctctccagcgcatctttcatgataaggcttgagtggaagctgtatccgaggctgaaggttatccatgcagctttgaaaccatctgtttatgcttctgtttaccccccaaatactgtttaccccaatactcaaagtcaaggttggtgactcaacaattttcagaacttctagcttatcagtatagctttattgtactgaactgagtttttcaccatgctgttactgtctttgaggttaaaaagcccccaacattcactcctatttgaatcatctgtgcaagactcaagcagctatgaattcaaccacagtgtaaagttcttccctacaatgctttattgttattctagctcccaagagagtaccatctttcagcccaagacccttgacagaaccccttcaactctgtcgccttttttcatctctggaattctgacaccacccatgacccctcttcttgttcatttactaggttttgttcctttttttccttttgtttcaatatcctattgtatctgttccttttgggcttcacatcctttttggaaagagaggcacaggtaatataatgaatgaggatgctcctcctccctggttccctctaagtcaagtttctccaacgcgctggtctgcttggctttgaatgcggctcaacacaaattcataaactttcttacaacattttgagattttttggtgatttttatttttattatttatttatttattaacttatcagctatccttagtgttagtgtattttatgtgtggcccaaaacaattcttccaacgtggcccagggaaaccaaaagattggacaccccgctctaagtgttccccaagtttccactgttttcagagcacatgtcccaggtaataacacacagcccatcatttagtgactgctcagggtgcaagctgtggagaagagagtccgactacgagctggtgctctaagcctccagcacgctaggactgacgacggggatccggaaacaacaagctccactcccgcaacacacacacacacacacacacacacacacacacacacacacacgcacacgcacacgcacacgcgcacgcgcgcacacacgcgcacacacgcgcgcacgcgcgcgcgcgccgcccaagggtagccgtctgcagggccccagctaagcagcccgcggagagcgagcggcgcgtgcgcccccgctgattggctggcacaaccggcaccggagccaatgggagcacgccttgttgtcaggcgcgcagccggacggcgcggtggtcgggacagactggccgttgctgtggagacgcctggtgagttcctggaaggctggtttgaaggcggtgccggggtgggggtgaggctcagcagagcccggggcacaggccggaggggctgcaggcgcgaggctgggttacgtgaggaagctgggggtttcgcgggcagctttagagccccagtcagggaaaccgaggccgggcttcctggctgcctcgcgagcctcttcatggctctcgccgccgccctgaggtgcctagaatgggttccggcctccggggaggttcccagtaaccgcaggagccaccattgatttggcgtctgctgggtgcaaagcccagcgcgctaaccctttactcgcgacctttcgcttcaccttcacagcagccctgcgaggtgagtgttgttattggtgccatttacaggggtggaaactgaggccgcgggtaggtgaaatgatttgctccaagtcacccagtgggtgagcgcgactccagactgaaaattttgaccgttctgcttcactgcctccccgcaagaggcgggccctggccagatggaactcacctggcattcccaaggtatctgcacaagtggctttgggagtcacttaactcttcaggacctgggttattacaggttataagtgtgggaccgtcggattccatgtggctaagattctttctatgtgattattgtggttagaaatagaatatgcttagaacagtctcgttcagcggtcggcaaacttttgttgtaaatatatcagtgtttacattgttatattgtaagtataatgagtataatagtattcataatagtagtttaggcttggggggtccatactctgtctacttaactgtagcgatgtagtgtggatacagccaaagacaatacataacagactagctgcgtcgcaataaaattttaattatagggaccgaagttttaattttatatattgttaatataattttcacgtgtcatgattttttttcccaaatatgaaaaaatgtaaaaaccattctttgctcgtgggctgtacaaaaagggtgggctggttagcttgcagaaccctcatctagtacaaagcctcatacatgaggggaaacagactgagagactgacatctatgtcaa

SEQ ID NO: 9447 - DNA, 6000 bp, Homo sapiens
catgggatttgggcacggacgtacatccaaaacatttcagaggcctcttagaaagctagaggctgtgagagacgatgctggcctttggaccactggggtagccatggaagcagagagaagccatggaattccaaattttgaagatagagtcaatagatttgtaagaaattatgttgcagtacaaaaaagcgtcgtggggagaagtagtttgctggggacactggcgtcctcaggtctacagataaaggagaggttcagataagaggttgagactgtacggcaatgatgttgtttatgcttcttggaattaaagtaacttgatttgcacagtgagccatttgctggagtattgtcacacctcctttgcattctagctggtgctttgaggtcagcattaagctaagagctttgtcctgacgctgatagctttttgctagatgaacagagaagattcttacgggtgtgaatcaggagtgaaatcccagctgggacagagagagtccttctaggcccccagagagtctgtttataacattggagcacaaaaagagaaactaggacaaatttttaaagaagcaaatattcttacctcatacggtatggatagaaagtcaggtatattctgaaaataaactaaaaggcaacactgaaagaaagggccaaaatcactattcccagcaagctattccatttcaagttcttttctgtcaccaatttggaactcacttgctggctgaaaagcagaagccaaaaacaactaatttcgatcttaaatagccataaattttaagataaggaaatgaattcctaatgagcaaactccaaaggctgacaaatataagaatccaatgttatttatttttctcttgttaactaataaatgtgctctgtgcttatgttcttactttttaaaacaatttaattgacgtaaatatgcgtttccataatatgcatttccataacttcaaaaagtatagtcttgccctttgggttcaaatcaccctagccctgggcagccactgatctgctttcagtcacaatagattacattcaccttttctagaacttcatataaatggattcaaacagtacatgctctttttgtatcaggatttttgtctttttttcttgagacagagtctcgctttgtcatccaggctggagtgcaatggtgtgatctcggctcactgcaacctccgcctcctgggttcacaccattctcctgcttcagcctcccgagtagctgggactacaggcacccgccaccatgcccggctaatttttgtatttttagtagagatgaagttttgccatgttggccaggttggtcttgaactcctgacctcagatgatccacctgccttggcctcccaaagtgctgggattacaggcgtgagccaccatgcctggccagttttaattgttaattatttctaaaataattgcaaaaatcttctgcaacatggatgaaacttgaagacagtatacttagtgaaataagccagacacaaacggacaaatgtcatttgaatccacttttatgaggtacctaatatagacaaattcacatagacaaaaagtagatttgaggttatcaaggtgagggggaaggaagaatggggggctgtagttaatgggtttagagtttctgtttgggaagatgaaagagttctggagatggatggtggtgaaggttgcccaacagtgtggatgtacttagtgccacagaactgtacgtttaaaaatggttaaagtggaaatattgatgctatgtgtgtattaccacaattataaaaaaggcaccaggcatggtggctcactcctgtaatcccagcactttgggaggctgaggcaggcagatacctgaggtcaggagtttgagaccagcctgaccaacatggagaaagcccgtctctactaaaaatacaaaaaattagcagggcgtgatggcgcttgcctgtaatcctagctactcgggaggctgaggcaggagagttgcttgaacctgggaggcagtggttatggtgagctgagatcatgccatggcactctggcctgagctaaattccatctgaaaaacaaacaaaaaaaagaaaaggaaatggggctctacatagcaggagagagagggagagatcaatattacacttttttttttttttttttgagacagagtctagctctgttgccaggctggagtgcagtggtgcgatcttggctcactgcaacctccacctcccaggttcaagccattctcctgcctcagcctcctgagtagctgggagtacaggtgtgtgccaccacacccagctacttttttttcttttaagtagagacggggtttcaccatgttggccaggatggtttcgatctcttgacctcgtgatccgcccaccttggcctcccaaagtgctgggattacaggcgtgagccaccgcttccagccaatatcacacttcttcttttttttttttttttttttttgagacagagttctgctcttgttgcccaggctggagtgcaatgtcacaatctccgctcactgcaacctccgcctcctgggttcaagcaattctgctgcctcagcctcccgagtagctgggactataggtgcaaacccacgcccagctaactttttttttttaattttaaatttaatttttattttttgagacagaatttcactcttgttgccccagaatttcactcttgttgcccaggctggagtgcaatggcatgatctcggctcaccgcaacttctgccaccagggttcaagcgattctcctgcctcagcctcccaagtaactgggattgcaggcatgcgccaacatgcctggtttattttgtatttttagtagtgacagggtttctccatgtttgtcaggctggtctcgaactcccaacctcaggtgattcacccaccttggcctcccaaagtgcaaagggattacaggcatgagccaccgcacgctgccttttttttttgtattttagtagagatggggtttcatcattttgcccaggctggtcttgcactcctgagctcaggcaatccacctgcctcagcctcccaaagtgctaggattacaggcgtgagccaccgcacctggcccaatattacacttcttaaatgcacttctcatttcttaattgtctgaaatgttatattctcataattttaaaagaataaagatttttttggggccggcatggtggctcacacctgtaattccagcatttttggaggcccaggtgggtggatcacttgagttcagaatttcgaggccaacgttgccaacgtggtgaaactctgactctataaaaaatagaaaagttagctgggtgtggtggtgcatgcctgtagtcccagctacttgggaggctgaggcatgagaattgcttgaacccaggaactccggaggcagaggttgcagtgagccgagattgcaccactgcactcaagcctgggcaacagagagagactcagtcaaaaaaaaaaaaaaaaaaaaaaaaagctgggggtggtggctcacgcctgtaatcccaacactttgggaggctgaggcagggagataatgaggtcaggagttcaagaccagcctgaccaatatggtgaaatcccgtctctactaaaaatacaaaaattagccggatgtggtggtgcacgcctgtagtcccagctacttggaggctgaggcaggagaatcgcttgaacccgggaggcggaggttgcagtgagcccacatggtgccactgcactccagcttgggtgactgagcgagactccatctcaaaaaaaagaaaaaaaatttttttgaaaataaaaaataaaggctgagcatggtggctttatgcctgtaatcccagcactttgggagcccgaggcaggtggatcacgaggtcaggagttccagaccatcgtggccaacatggtgaaaccccatctctactaaaaatacaaaattagctgggtgtggtggtgcatgcctgtaatcccatctacgctggaggctgagacaggagaatcatctagaacctgggaggcagaggttgcagtgagctgagatcatgccagcctgggtgacagagcaagactctgtctcaaaggaaaaaaaaaaaaggaatgtctagatgcagtagctaagtacgcagaagccatttcagtgtgggaggcgaggtgactgaatccagggactccaggtttctggctgaggggttgagactgcccatggtcattgtgatgagatgaagacagaaaatgagctgggctgggggaaggtggtcatctcctctggacgtgattagtttgagactcctgttgggtagcccactgggcatggtcagcaggaaattgaggagctgagagggtttggagctgagatagactccagcctcaccatgtgggcaatagtgggggtcacagagtgtgaagatggccaagaaagaggtctgggtgggggctggggagtcagcagccaggcatgggccatggagaaacagatgccagggtaagaggaaaggggagtctcagaccccaggggaaaagagtcactggaaagaggggccagtcccatgtcatatccagcagagacaccaggtacagcagaaggaccttggacatgaccatgaggagggccttgttggccatgacctgggagagatgggggtgagagcctgggggaccacaccatgtccccagcacacgaaacagtgcctggtagacagaatgtatttatggatggacggacaggtagatggatggatgaatggacagatgatagatggatgcaaagacagatgaatagatggacagatgcacagatggacagatggatggacggacagacggaatgaatgatcagaaaaggcttcatgaacaaagtgagactgagctgcatctccatgggtagatacaaaagcagaggactctcctcttgagtcaggaatgacccagtgtcctggtccagggaggaagtcagcctccttgactggggacacttgtggcagatttcagaggcccttaaaatgaggccaagtgaggtggacaggtccgagccagctgaggactcctcagccacacggcacagctgcctgaggggatgtgtcactcagggagttgctgggacctactgggcccagcgttgccatcagcaccaacagcttcagagagggggacacatgccggggtgactccaaggctgtgggcggcacctgcctcagatagagaacaggcacagagacactactgggggacactactgggacactggccacccccctaccctgtgcctagatcacagcctacacactgcagccctgtgcccctcacacccagcaggttcctgctccagcgcggctcctggactggccccgggtgctggccccgggggtttcaatccaagcataattcagtgaagcatgtgtttggcagcgggacccagctcaccgttttaggtacgtggctctaacttcccagcctgtcccaccctctcctgtctctggaaaaatctgttttctttctctgggtcttcttcccctctggcctccaggccttaggcatgaaaccctccctttctccttggggtctgggggaagtgggctagtctcaggtcaactggcttgaagggcctctacagtgggagcagccgccttcaggttccaacagtgggacacagcctggtcccgggacctgggctgggattgggcggggtcagtgctcctcccctctcccagggcaagtgtctgagtgagggacagaggccggttctgataaggggccctgcagtggccttagagacagtccccgggaccccagggtctaggctgagggctggatgcccatccagcctgggagggccacacagggccctggggacacaggcgtcaccccaaggggagaccaatggagggcacagagagggctctgggtctaggctgcagctctgtggcctgtgctgggtcgtaaggacatggggacatagagggatgggtgagactgg

SEQ ID NO: 9448 - DNA, 6000 bp, Homo sapiens
aggtattctctgaaacatggtaagtttttactgccattacttggggaggataaaaggagagggaagaaaactagcttccttaaatatctaccctgtggcaagcaatatgatgtgctgggggcagggcagaagagtggaagagtaagaaaccttctgccctcatggagcacacattctggcagtcaagattcaaatgccctgtttaaagttaacatatttgggctgggcgtggtgggtcacgcctgtaatcccagcactttgggaggccgaggcaggcgaatcatgaggtcaagagttcgagaccagcctggccaacgtggtgaaacgccatctctactaaaatacaaaaattagctgggcatggtggcaggcccctgtaatcccagctactagggaggctgaggcaggagaatcgcttgaacctgggaggtggaggttgcagtgagctgagatcatgccactgcattccagcctgaaagacagagtaagaccctgtctcaaaataaataaataaagttaacatatttgatgcttctcagaagaggcgatatgaaaaaaagaaaaattaaaataacaaaaaagttaatatatttgagcatataaaaacaacgctgactttaggccaggcgcagtggctcacacctgtaatcccagcactttgggaggccgaggcaggcagatcatgaggtcaggagatcgagaccatctggctaacatggtgaaaccccgtttctactaaaaaatacaaaaaattagccgggcatggtggcgggcacctacagtcccagctacttgggagacagaggcaggagaatggcgtgaacccaggaggcggagcttgcagtgagccgagatcacgccactgcactccagcctgggcgacagagcgagactccatctcaagaaaaaaaaaaaaaaggtcgggcgtggtggcttacgcctataatcccagcactttgggaagccgaggcaggtggatcacgaggtcaggagatcgagaccattctggctaacatggtgaaactccgtctctactaaaaattagcctggcgtggtggcgggctcctgtagtcccagctaccagggaggctgaggcaggagaatggcgtgaacctgggaggcggggcttgcagtgagccgagatcacaccacttcactccagcctgggtgacagagcaagactccatctcaaaaaaaaaaaaaaaaaaaaatgctgactttagcatctgacagactttttagtataaccctcagtcatacaatcaggggtccccaaccccagggccatggatgggtgtaggtctgtggcctgttaggaaccaggccacacagcaggaagtgagtggcaggtgagtgagagaagcttgtctgtatttacagccactccccattcctcacatgactgcctgagctctgccttctgtcagatgagcttcaacattagattctcataggagtgcaaaccctattatgaactgtgcatgcaagagacctaggttgtgtgctccttatgagaatctaatgcctgatgatctgtcactgtctctcagcactcccagatagactgtctagttccaggaaaacaagctcagggctcccactgattctacattatggtgagttgtagaattattttattatatgttacaatgtaataacagtagaaataaagtgcacaatgaatgtaatgcttttttttttttttttgagacagagtttcactcttgttgcccaggctggaatgcaatggcacaatcttggctcagtgcaaactccgcctcctgggttcaagtgattctcctgcctcggcctctcaagtagctgggattacaggtgcacgccaccatgcctggctaatttttgtatttttagtagagatggggtttcaccatgttggtcaggctggtctcaaactcctgacctcgtgatctgcctgtctcagcctcccaaagtgctgggattacaggcatgagccaccgcacccggcctgtaatgctcttgaatcatcccaaaaccatcccccccatcccaggtctgtgtaaaaattgtcttccatgaaactggttcctgaagccaaaaaggttgaggactgtggatgaaatgattatttactgagtacctaccataagcaagcagcatgctcatactcgggacaggaaagtgaactaaaccagacttggtccctgccctcaaggggcttacatctactggaggagacaggacaatgagtcaattacgtaaatcataattatgagttataactgtcatcactacttcaaagggaacaacactgtaagatgacataatagtgtgttttgaccatacaaggagatcaaggtgctaaaggaggagcacaagttaattagataaaggggagcagggccgggcgcggtggctcacacctgtaatcccaccactttaggaggccgaggcaggcggatgacgaggtcaggagatccagaccatcctggctaacacggtgaaaccccgtctccactaaaaatacaaaaaactagccgggtgtgatggcaggcgcctgttgtcccagctactctggaggctgaggcaggagaattgcttgaacccaggaggcggagcttgcagtgagccggatcgcgccactgcactccagcctgggcaacaagagcaaaactcggtctcaaaaaaaaagaaaaaatggggagcggaaataatatgccatccaaaatgtaccatccaagcagcgggaagtgaggctggaaaggtaggaagtgcccagactgtgctggccatcaaaatagcactagctacatgtgacaattaagtccttggaatttggttaatgtgactgaataagtaaaattttaaggctgaatgcagtggctcatacctgtaatcccaatactttgggaggtggggatgatgtcactgcactccagcctgggtgacagaatgagaccctgtctcaaaaaaataaacaaaaggctgggcgcggtggctcacgcctgtaatcccagcactttgggaggccgaggcaggcggatcatgaggtcaggagatcgagaccaccctggctaacatggtgaaaccccatctctactaaaaataccaaaaaaaaaaaaaaaaaaaaaaattagctgggcttggtggcgggcgcctgtaatcccagctattcgagaggctgaggcaggacaatggcatgaacccaggaggcggagcttgcagtgagctgagattgtaccactgcacactccagcctaggcgacagtgcgagactccatctaaaataaataaataaataaataaataaataccaaaaaaaaaattagcctggcatggtggcgggcgcctgtagtcccagctacttgggaggcggaggcaggagaatggcgtgaacccaggagtcggaggttgcagtgagccaagatcatgccactgcactccagcctgggcgacagagcgagactctgtctcgaaaaaaaaaaaaagtaaaatttttttaaagtaaagcaataaaagaatggctactccatagatagaacagccaagagtaaaattttaattttaattaattcaaattttggccaggcgcagtggcccgcacctgtaataccagcactttgggaggccgagtcaagcagatcacctgaggtcaggagttcgagaccagcctggccaacatggtgaaacgccatctctactaaaaatacaaaaaattagccgggcatggtggtgggtgcctgtaattccagctacttgggaggtgaacacagcagaatcgcttgaacccgggaggccgagatcatgccactgcaatcccagcctgggcaacagagtgagactctgtcttaaaaaaaaaaaaaattaaatttttaaatggaagcagtgcaaatttagaaatactgattatatcttgaaatagtaatgttttggacatatggagtttaaaacattactcaaattaatttcacttggctttcttttttactttttaaaaaatgtggctactagaaaattccaaatcacatatgtggcctgctttatgtttctattgcacaatgctaagccagattgtgaagattttagttctaggacatggaagtctcccctcttttaatgcagggtggtgtagttggaagagaactgcgcttggagtcaaagacccctgggtcctgcccctcactggatgccctgatacacccactaggcagccggtaaactccttgaacggcctaagtttctgcacttatcagacggaaccaataacacacgcttttaggactctaggagatctggagttgattctccagtagttctctgtcccttcctcacaatgcaacctttaagtagtccctgggcctcagcttcccttgcttgtagaagccgccataacggcacggggagggggcaggctgccagaggtgggtcatggtgcgtctgtccgtccgtcttacctgaaagcatcggcggaatttgacgaacccggggccggtcccgccacgggtccctcaggggaccccgcaaagttctgggtcggcccccgacagccggtgcccccaaactcacagcaaggggtgccctttgccttgtgctgggggatgaggaggggagttggggagaggcccattttgctactctgagtccaggcgttctctaggcaacgccggcgcggtctccactttcccgtttagcataacaatggaaccttcgtgagccgccgcgttgtccgcgagatgccgtttctatggtgacagccgggccgggggcccagaccaatgtgtcagtggagagggtgaatgcaggtcctggtcctagaggcatgaaaaggaccccagaagacactgcctttgtataatccgtttgctatcccgaggtgattcacggagtttctggggattggcgcaggctggcgctgggaacccccgcgccggttacccctttcctcggtggtagaggccgggcggggcagcgcatgcgcgtggcgggcaggcggcaggaggcgggtgggtcaaggtaactctgggctacagagtccttgctgggggttcggggagcgcttggaccccggcttctgggacgcgtcaggtacgtctccgagtccggcgtcgccggccagcgctgcctgggttcactcgggggcccgagctgagtaggacgtccgggcctcgcctggagagaggcttcaggagggcctggggaaggggacggaggccgggcgaccccgggcggtggccgccctcctctgtgtgtctccgcggttgtgaattggggcggtaattcctccccgtaggtcgccgtgaagatgattgcatgagatcgtgcgtgtgaacgtttgttgacagctgttacttgagtccgacagccctgggggccgtgcatctgcgtaacatggctacctctgaactccttgggggacacgtatatctttgagaatccgatgaaaaccagagattccgcccttgttttcttagaattaaagtaagataatatattttatggcctgttgcaaacggaaaacctttacacaatgattagtgattagtatcagtatctgtggactgggaaggctctacttactcgatcctcttcccagggtcgttgtgaggatcaagtgcacagcttcctataaacactaaaacactataacatcttgtgagccaggtactattattattcctcagtgcaaagaaagaagccgaagtccaagggggataaatgctggggtcccactgtgggtgagccgcagagtgatcattggaagccaggtgctcccccttcacttcctgtgtgcggagcacgctcgccctgggagtttcactagaaagaaggttgccatgggccagtgggacagcttgtatctcaagtgcacgcggatgccccagaatcccaggatctcagctgagctgtttgtggattattagatctgacttaaaaggtagctaatccagacccttcctcatctgtaatacatggatgacagctcccagctgtagtgttatgagaattagtgcggtcatgagt

SEQ ID NO: 9449 - DNA, 6000 bp, Homo sapiens
tctgccttgctacttctctcatcccatagcttgccaccctcccccgtgcttcagccacgctggcctccttgctgttcctagaacatacctagcacattcctgcctcagggcctttgcacttgctgttgcctttgcctgaaatgctctccctgctccaccccagatctctggaggagacctgaaacctttgcagtgggttcatccctggtcatgccttttaaaaaggcacccccgaccaggcacagtggcttatatttgtttttgtttttgttttgagacggagtcttgctctgtcgcccaggctggagcgcagtggcaggatctcggctcactgcaagctccacctcccaggttcacgccattctcctgcctcagcctcccgagtagctgggactacaggcgcccgccaccatgcccggctaattttttgtattttttagtagagacggggtttcgctgtgttagacaggatggtctcaatctcccgacctcgtgatccacccacctcggcctcccaaagtgctgggattacaggcgtgagccaccacgcccagccaagtggctcatatttgtaatcctagcactttgggaggccgaggcagtcagatcagttgagcccgggagtttgagacccgcccgggcaacatcgcaaaaccctgtctctacaaaaaacaaaatggaaaattagccaggtgttgtggcacacctgtagtcccagctactcgggagactgaagcaggaaaatcacctgagcctgggaggtcgaggcttcagtgagctgtggttgcgtcactgcactccagcctgggtgacagagtgagaccctgtctcaaaaaaaaataaataaataaagtagccgggtgtggtgttgtgtgcatgtaatcccagctactcgggaggctgaggcaggagactcacttgaacccaggaggtggaggttgcggtgagccgagatcatgccattgcactccagcctggacgacaagagcaaaactccatctcaaaaaaaaaaaaaaaaaggcagcccacctccactttgttttcctccatagcacttgtcaccacctgacatacttactagtttatttattacctatctctcctcaccgaatgtggaagtctcataagggcagtgttcttgtccctgcttacctggcatgtactaagtgctctattgaggattgttgaattaacgcatgaatcttcccaccaaatctcctcctttctctgtgctcatcatctaagtaaaaggcaccatcatctaccagtcatccccctgggtattatcccagatttgtccctcttttcaaaaacccaagcatacgccagatcttgttgacttaacatcctaaatatttctcaaaccatcccttctgtcactgccttggttctcctcttccatagcagatgcctcaaatgcatagagtaacatgctgctttgcacactgtgaatgtttcagcatcctctctgccccctgcgctctctgtctacctgccaggcccagacctggccctcctctagtggccctgtctcggcagatcctccaccactgggccgacggcctgggccaggaacctgggagtcatcttccactcccctttcttccgcttccaatcaactgccagagtctttctacttgacctatttggatatttttgaaaactgtccatttcttttatcctcatggccaccatcctggtcccggccacctccttccttctcttatctgggttatcccagcaggctcctaatactggtctccctgcttcctgtctgactcagtgggatccctctgaaacacaaatatgatcatgtgactctcccacttaaatgagtccctacccttacaagataaagccaattgcttctgttgcacccatatccctccctgatttgttctcctcagctcggccacagtcaatttctgcctttgccagttcccccctcactttgaccatgcgatcccttggcctgagatgcgctttctatcttctctgctcaatccctctgccctcccagacccagctggaaggtcacctcccctgtgaagtcttccctgactcccccagcagaattaactgccccctctcttgggcttctggctccactcagtttgtcacaggcctgatgagcaaggatatcttgataaaggtgataactggccgaaaagcagttggggcgcccaatggcgcagccttcagaagcaccttctgtgtttttggaactgttggcagcatcccaaggtgaaatggtagaagcatatggcatgatcatggggaaatgggtctggggaagggaagagaagccacatatttggagcagattctgttcctgttctaaaggcttggaagatgttactttattgaatccttgtaacatccctgggaggcaggggttttaaaaacaaagacagtggtggccgggcgcggtggctcatgcctgtaatcccagcactttgggaggccaagcagggagaatctttttttttttttttttttttttttgagacagagtctaactctgttgctaggctggagtgcactggcgtgatctcggctcactgcaacctccgcctcctaggttcaagcaattctcctgcctcggcctcccgagtagctgtgattatagccacacactgccatgtccatctaattttttttttttttgagacagagtctcactctgtcgcccaggctggagtacggtggcgcgatcttggctcactgcaacctccgcctcccgggttcaagcgattctcctgcctcagcctcccaagtagctgagactataggcacatgccaccacacccggctaattttttgtatttttagtagagacgaggtttcaccatgttggccaagatggtcttgatctcctgacctcgtgatccacccacctcggcctcccaaagtgctgggattacaggcatgagccaccgcgcccagctcgggaggatcttttgagctcaggcgtttgacaccagcctgggcaacatggtgatagcctgtctctacaagaatacaaaaattagccgggcgcagtggcacatgctgtagtcccagctacccgggagactgaggtgggagaatcacttgagcccagaagcttgaggctgcaatgagccatgattgtgccaccgcactccagcctggacaacacagtgagaacctgttttttttttttttttaaatggtgggggtcagggagagatggcttgcaaatgaatgtttgtttaattttataaaaagcaggcaggtgccaggtgcaatggctcacgcctgtaatctcggcactttgggaggcgaaggcaggtggatcacctgaggtcgggagttcaagaccagcctgaccaacatggagaaaccccatcgctactaaaaatacaaaattagccagacgtggtggcgcatgcctgtaatcccagctacttgggaggttgaggcaggagaatcgcttgaacctgggagtcaaacatctctctaccaatgggaccctgtcaatggcttgcttagaaggcaacaacttccctctgtcctccagatgaataaactcctgcctggggcccacttggtcagagcctgtccctacaaccccttcatctctctcctccaactctgtgcaagccacagtgggctcccgtgacaagtgtgctttttttttttttttttttaagacagagtctcactctgttgcccaggttggagtgcagtggagtgatctcagctcactcactgcaacctccacctcccaggttcgtgattctcctgcttcagcctcccaagtagctgggattacaggcgtgcaccaccatgcctggctaattttttgtagttttagtagagatggggtttcaccatgttggctggactgatctcgaactcctgacctcaggtgatccaccggcctcggcctcccaaagtgctgggattacaggcatgagccaccgcgcctgcccccggcagaatgtcttatatacataaatgttgtcctctccaattaaaatgttaacattttaggttgggcggggtggctcacacttgtaatcccagcactttgggaggcccaggcagaagaatcgttttaggccaggagtttgagaccagcctggccaacatagcggtactccgtctctacaaaaaatgtaaaagattagctgggcgtggtggcgggcgcctgtaaccccagctactcgggaggctgaggcaggagaatcgcttcaacccgggaggcagaggttgcagtgagtccagatcacgccactgcattccagcctgggcgacagagcaagcctccgtctcaaaaataacataacataacataacataaaataataataaaatgaaatgaaataaaataaaataaaatgttagctttttgaaggcctgtcctgctcgctgcagaacccactatagagccaagcagggtcacctaggtagcatttgctgagtgaatgaattgtcctccccttaccaactgtgttcacaaagaaccctcaggagttcaagaccagcctggccaacatggcgaaaccccgtttctactaaaaatacaaaaattagccgggcgtggtggctcatgcctgtagtcccggctactccggaggctggggcaggagaggcgggcacctgtaatcccagctactcgggaagctgaggaaggagaatcgcttgaggccggaaggcagaggttgcagggagctgtgatcgcgccactgcactccagcctgggtgacagagtgagaccctatctcaaaaaataataaagatgggcgaggagcaatcggccccgaggaaaagacaaaacaaaacaacaacaacaacaacaacaacaaaacgtgcaagagcgcgcctgcgcacacggtccgctacgacccccatccctcttcgggcgtggggtggcgctgggcgcatgctccccggcagcgcggtcatcctcgcctccttcgggccgctctagccgccccactcgctgctctgcggggaggcgggcgctcccgcaggggttcctccaagatggcggcgcagaggaggagcttgctgcagagtgtgaggaacaggcccgctctctgggcttggggttgggagcctgggcgggggtgctgtcgggtgcaggaacggctccttctccgagtttggacagccaccctctccgtggtggggtgtgtcagccaccttctcctctcctcgggctggccccctcgttcccgaggccagggcgtgtgtgcgcggcgggcccggcccccgggtcaagggcgccggggctgtgggctgctgctgccgggcgtcgagggcgggagcgtcctggagccagaagggaacacggcgggcggcagcagagctatccgagtctcgagcccactgcgacaccgagcagacgtgcaatgataataacagcagcatccacagtgtaccgcttactgcatccccggcgttgtgttaattgctttacatttgtcagtttcattttcgtagcagccccctgagataggtgctactgttattcctatttgacagactgagacactgaggtggtcgtttgcctaaggccacacaaatggtacgtattgaggcaggattaaaatcaggcagtgtgattccagaaacccccttaacccctgggctgtactaaaggaatgaccagtggtagctgtcactgggttctggtcctggctctgactgtgtctccctcagcctcagtttccttctcctaaggcgagagcgctgagtggaagaattgtcttcagactcatccctacccccggtctggaccctcatgggtttggcgctgtcttccaggccctgcgtcctctgacgcgtatgtgcacatagatgcacacacatgttggcaccatggactactctgacctaccagggtagggtgctggcctcctgggtccttcctatgcatggcactgttagaattgtctatggacttgtctgcctcctgtactagaaagtaaactccgccgggcgcggtggctcatgcctgtaatcccagaa

SEQ ID NO: 9450 - DNA, 6000 bp, Homo sapiens
tagtggcatgatttgcgagagaaataggggaactggtgaatgttttctattggttcaaatgttgagtgcatacctgtggcatagtttcattgataggtgttggcaaaggagcatggagcataaggctgtagtattcacagtaagcttttcaaaaacttaagtttcaaatgcaaatctaaaggatgtctctgctcttcctaagccttctggtagatagtactagaaattcctaagtgaatgctttataggatattttattattgattattgataacaattgtggcaaaatatggtgttgttgatagaagtatcgaagaagtccatagaactagcataatttcttctgaccaaccacctcactgcagtattattgtgttggcttggatgcctccagtttcagtgattaggactcacaggctgcaacaaagacaggccattccacagtgacacctctgccagggctttctctctaatccaaaatgcaactgggcaactacctctggacatgggtagagttgtttgaaaaggagacagaatgaaatgtaaaatgtaagacctaaaggaatatgagaaagctacttctcacaccaaatttctactgatgaagatttgtggaaggaagtaatagggggccctgagggaatatatgtttataaatgaagtagagcattacaatataacggcagtggtagaagtgcctgaggttgtatttcgtcctaaaatgatataagtcctatgctaaaagaatgacctgagaaagatgcattcctgggaaacttctaattgaaagagataagccattagataaagtcatttgataaacataaaggaataaagcctagttaaaaccccagctagatatgtaaatgtgaatatgtcaagaaacagcctagttggtgtgcttcgtagatgatagaggaaacagactttattaaagactggctcaggtttagatgtggcaccatctcaaacatgggctgtgaccacacatggcagggatcgtgtcagaagtaacgtgcactgccgatgggtcatatgtgagaaggagaaactggtgatctgttttccaccaggattataaggctgtatcaaggtaaacaaaaacctgtgcttttaaaaatcaaactctttgcggaacttgttttcaactgtgtattgtttcccttctgtgctaattcatgtaaataatgaaataaaatgtcgtcatactctccttgagaatatcaggtcagcaataaatgtgttgggctctggtctgagcaccttagaagcagaagttggtttcctgacttcactgcacaaggcaatgcttgatcagttgctttgaggcttcgaagcaggctgtttctagatccctctctggacatttttcttcactgttaatgcttctctcatcaaccttttaattatttttatctctttaattactgcaggcgagtttataccgaggtggctacagccgatttgccccctactgaagtgacgtgagacccctgcaaatgggacagccccccagttcatgaggcctggctattgcaatatttactagtagaggaactctatagcaagatgaagaggaaaaacaaacaaacaaacaaaaaaaaacacaaaaaaagaaagaatacttttttatacctcactatgttctttgaatatgtatttttcctttaaatttctgcctttaattcttttgttccaaagattgtgcatttttttctttttttttttaaactgtggtaaaaaaaaaaaaaataatgcatttccatgtctgtatgtccgtgcttagcttattctatcaatcacggaagaggcagtcaaggaggaaggagagacattaggagccgataaatgcatctgatcagaaatcagcagacagaattaccaaagtgtatctggtgctgaatgactgggggacaagcagaagtggaagagatctttctgcaacaggatattcttctagtcttctgagtttctggtctttgacaggcaattctggttggctgtggctggaatccacatgctgatagataggaatttgtgcttacaaagcaggagaattaaaaagacgctttcctctcctcttccctcctgtcttctccgttctttttacaatcatcttacacgcacagcctgagacagctggcatagtttttggaattatagtattgatatttccaaacgtgctctcagacagtggataataaacacctcattaggaaaccgatctcagaatgaactctggagtatgaaaaagatcatttctttttgttcctgtaacctagcattccttctaggcttcttctcctttaattgaaccacagcttagctcatgtattcttttattaacaccctgctctcatgtccataagattcaggaatttaggacccagggacagaaaagtgaataagccagtgaccagatttcccccagatgtcttgaggattagaagtacaaattgttgacagccattaaagagggtgaggaagggaaaaggaatattagaagatctggtatttcttacttttttcttgcctcagaaagtacaaagtttaaaaaatagaataaagaatctgctggggaaagatagagtaccaggtcctaggtcagtagtccctggaagttttggtgatgaggacatggaagggcaggcagaggcactttgtacttgctccaaagccataggaattttcatcttccagagcctttatgagtcacttctctatccacagtcttgagcctgtggctatcccgctgagcttctcactgtcctccaaaaacaccccgctgagcacccggaccactttgtacacattaacactacaggacataaaatgcagaggccctgagattgctgccctcccatattggaaggagggtctgcgatggcaagggtcttctatatcaccagaaagagtcgcgcagtgagtcactgccgttgccatctggctgtaattttctatgttatcaaggtaggagggagtgtttctcttctagctgttagatagaactgataaaagcaagtgtcctacagcatttcccaaatgaaggcattaggaaatagaaaagcacggtctttttggctccctggtctagtcacattggtactagggtgacctttcacccaagggacagctgctaaagggagtaattcagagacatggagcttctggttatgggtttgttttgggtttgtttttaactcctgcctccacacatgttcttgactgataactgactcatgtccctgaattaaaatgactgacctatgacagcatcaagcattctttgtaagcagagtgatatatctgagagggcgttgacctgttgtgtagaatacatatcctttcccccttcagaatcctgtctcgcctcgtaactgggagagaggctgtgcctgaaactaggggcgatgtcaaggaagctagaggcctcgatgcaattattactgactctggggaggaagacagagaataaggggacaccaactgcccagtccactggccatttttaagggtccccccaccccaagccaaagtttggtttgttgctgttaagacaatttttgttgtatgtatataaatattttagttagaggagcggggaatgggatgcgggctttcacagttctagggaatgggggcagggaggattttgcttttgcttttgctttgagggagaactttagctgactaaaaaaacagaagtttggggtcatgatcacaaaggggccattcccaaaagatggcaagccacgtattcagtggagactaggccaaattctaaatggttttatccatagcaggggagaataggagaatgagtttaagagtttttctcttcttttttcctagaaagaggtaaggataatgggaaaggtagagaaggcggctcccacagaccttttaagagaggcagaatcttgagcttgaggcaccttgagtgcatctcagttcagctggttctggctgaggcctccaaaggcaagctctgtgctttccagtggtttctgctgcatttccagggatggtgtttaacaccgcttcctccagctcccttttctaagaaagaataaatggagttctgctttttatgaaagggtctttggttttcagtgtcaacactgagaattggggctcttgcaagcatctggatttcacagtatcaacctccccgtcaccttttgaactttgagactccgtacggtcaacttcaccagaggcaggttgctcgaagcagcactgcttgtctgttcctgactctggttctcactgtattaaaaaagagagtcagaggagtctggcatttcgtgagtttgttagaggatgctggctgataattccagaaaacttactgatgctaaatcacagtacatgcatgattctttttcagctttactatagttcatgacctggactttctgtactcttggaagctgggctccttaaaggaggcctctagtgaacacctttatctccatgtccctcttagagcccagagagctgcccataggcattttccagaattcctcatgtcacctagttcaatttccattaactcagatcagccattgtgattcaccatttgtcaggctctcaggtttaacaaaacctactatcaccatcatccttcaacagccacagtctgaattgagccaacatttttttttctttgagaaagaagtggactggggcacaacttttagtctgaggggagctagtggaaatctagacaatagaagtcatcgatagcagcttttcctcaaatgtgtgactcctcaggggctaaactgctcttagcttagaattatgctttactagagatctagcagataagtgggttaatcactaccatcctgtaactagttatatagcttccagacatgagggagacatcaaacagggatggaagcaaccccaaggatatgcaagaagggcatgatgaacccccttccctctggcaggagaacaaggccaaccaagggacagactggaaagcacttagatgtttaaggaggagaaaggggaagctttgaccagtccttgccttttgccaagttcagccagttctccgctgcttgcaacctctagcgcagtaacatttgcagaattgcagattttcccccagatactaggaggaaagggactttggggggtggggaaggggtcgtggtgttttaaaagcataagttacctgtttgcactgttttaagataggaaaaaaaaatagtgggcaaggtgaacatcagacgtaaatttgtgtgtttttattttgtcatgctcttgaaaatgtttgaccatttgtagtatacacagtgaaacttgattctctgttgcataaaacactatatttttttggaaatgttactgtccaaaagcctcttccctccctttccttttcctatgtacttccttcatacttgctttactgatcagccaggcaatagccatccaagagctagagcatgaaacagggccctttccaagtaggctctgggtgtcctaagccagcgtgtgccctctggtttagtgagtgtaatagagtccctggcacctttctttgcaaatgaggctaacagaccagactgcagcaagttatcagattcctcaatcagatgcactaggagtgaggagcccagggatggagggggttcctgaagtattgcagttggctgtagtagctgagttcttttccatgttaccgaaactgtagccagttacagtttactcaggaaaacggtagatcaattcagccatggtagtgctggttggcagggattggtaacggagagaactgctcatcagccaaaactcaagccttgccttttaggaggccaccagcagagggacttggtcctccttgtctggtacttgtgtacatgccggtgacctgaggactccactcacactggcgagcaaaaagggagcagtgattctcttttctctccccaccccctgccctttgttaccaacaccagtttcccagggggtacatgagtttct

SEQ ID NO: 9451 - DNA, 6000 bp, Homo sapiens
tccctttctgaggcaacacaggggattgaaggatttctccctagagctgtcatgaggcagtaagaggtagtgggatgtgagcctacttgggaacccgaacgcccttggaggtaccagctctgcctaggacctcacctctggctcgtggtcaggctaacccatgctaccagagtgcctgttcccgctacctgttcagcttggccccctccctgcacaaagggggtctatctgacaaagatcctgtgcaggccgtccagggaggacacctggcacagaccatggcaactgccaccattcatggcctgaaaccacagtttggttccaaggaattctccctgcccccattgcttccccatgaccttccctaccttgcagcctagccagaggagccagatccccacaagcccacaaaagccattttttagggaccaggggtcagaagatggatcgactgccctacttttctccatgtgaatgtcagatgtggcttttctaagatccgggctcccctcctgagatgaaacagaagcagctcagcagtcttccaaagagtgggctattctagaagcctgggcagcaaggtgggggtggggctcagaggggcccagtataagcatcctattgcctcagggaggctcttgattccatcagatcacacttcaggcctcagctcacaccaagaggccttggagcctgctggccagtcttctctgcccaatctgttccccagattccctgcaacccctctctctccacaaaggtcctcacccagatatggtacccactgccacacgcaccccctttgcatgcactgcctacccacctcttgccctcctcattctcctgtctgtcctaggcccctgccatcctcaccttcctccagtggcccatccttcctccactcagtcctccaggctgtggctgggtcactgcccatccacaagagccctggtattggtgactaagatcccagttctgcctcctggtgatggagaactgtggggacagccatcttggggcatcttttccccttcagtagggcactggtagcaacaacagccctgtgcacaccaggtgccgcatgtgccgtccccgtggatgtgcacgtgatccaggcacagctgtccactgagatggaggcagccccagactgagggacagggatccttgagtcgatccctgctgtggctgacccaggaaggtcatttctgtcttcctcatctctgcgtcctcactcatggctcacacagagcatttggactcagtgacatctaaagttcagcacaggctggacaatttctgagtagcagaagctctagcctgcaagaatcaagtggagctgtgggcatctggacaggatggtttttgggggtctgtgggtctagggaggagaaacgcacttcactctgtctcgaccgttggggaaaggagaggaaactggctgactcggaactgtaaggctcagcagtctctgctgtcacactctaggtagaaaaattgccagacacaggtcacacagagccagtgtcccacagcagggaggcaggtaagcagcagcaaggccttgtgcctccaaaccaactggaagcttcaaagctcccaggctgagaacggggactgttaacactgaggaacattcttgccacggcaagaaaggagccagggccaggcacggtggctcacgcctgtaatcccagcactttgggaggctgaggcaggtggatcatttgagattaggagtttgagaccagcctggctaacatggtgagaccccatctctactaaaaatataaaaattagctgggcgtggtggtgtgtgcctgtaatcccagcaacttgggcggctgaggcaggagaattgcttgaacccacgagacagaggttgcagtgagccaagattgcaccactgcactccagcttgggcgacagagcagagaaaaaaaaaagaaaggagccaggagaaatctacaggtctgcacccactcaggccttggaagggatggctatagggtgccactggggctatgaggtcccctgggcagctcagccgacagcacctttggcagcagcctagctctgggatctgggccttggatttgcaggaccagaagcccaccaccactggggtggggggtgtgaaggtacttacttggaccagccacgtgagccaaaggccaagcatatatttccaaggagggtgtgaccacttaagcaggctcctgctggcctgtgggtgagcatggctggggtggcctggtctcctgggctccttaggttggcagagagctgcaacttcataggccttcaggagtggccctgaggtgggtaagcagttctctctctggggcagtggtcagaggcttgtgtcctggacatccaggtgctttgtgggtaattaggtcccacagggttttcctgcatagggtgctgacagtgccagtaagcgcagctctttgagcccagagaatcctcaaggatcagggcaggcagtctcaccagcctctgattgtcatagcactatcacatgacgctccagggacctcttggtatgtacacaagcacttcctggggggttggggggtgacagggtaaggctcagcttagtgaggaacctccatgctcagggcctgagtgtttttacctgtcagacatggcagtatccatctgatggggctttggagagggctggcacagatacaggcacagagtgcaggacatcgtgtggtgctgggagggggaccaaggaagctggaacccacaaggcctcggagcccagctgggagcaacattctcccagggaagtctccccagaggctttactcagcagaggcttagcacagaagccctgagctcccctcttccaccacaggactccctcctgctgtgatagccaggcactgggaccccaagctgcccagcccattctgagcctcagtgtgttcatctgtgctggtaggtggagtggtgcctgcagatcccttctttggcaatgtgtctgagagagcacctatccactctactctttctgtgggaaggcatgcgcgctggggagagctaggtgctgcccgtgatggacctggaggcctctgggatgcaggggactagtttccagagagccacacactcaccacagacaacacacagtttcttcctggcctgggtgtgatgagcagatgttctcagcttcctttggtccaacttgatcttacaggaagtagataaggtatgaagtaaggtcatgagctgtgcaaggtgtgagtgtcgctttggtcctcgtgtctgctacagccctgtggacagccgggaagagtggcccaactagctctggagctagtcgggccttggggacaggtcccagccatagtggccttattgctgtgtgactgcaccagtgtccagtgtttctgaacctgtccctatgtgtgtctgtcaaatgactatatgaatgtaggtagatggcaaggggctgttgtggcttgagcaacatgcagatttagaactccttgcttaagaccctgaccatggtgaggagccccttgtcctcacacagccttgaggtagcttgtgctcattgtgactcccctgcaagtgaatgatctctaggtaacccagcctccttcttctgtgtccccagcagcaagtccagtgcctggcagggagcagtatccctcgaggagatcctgaggcactgcctcttgagttcctcctggagggaaggaaggagggcagagagtgtgacattacccaggctgaaggggcaggttggacctggggctgatttggactaggggtacctggaaggggcacagagtaagccttggaccgctggctccaggaaccagcccaggggtaggccaggtggaaaccagccagctcagagaggagatgtcactaggacaggtgtcaccaggataggggctaaatgggtctgaggcccctgggtgtctgtggagggaggaacggcgctatgtgataagagagaagctcgctatgtgataagagagaagctcatgggggcaaagggttgggggtgggtaagccagggcttggggcagcatctctctcacctagcccgtgcaggttggcccatccctgcctttccttggcctcccctcagctggagtgggaggagcagccaggagttggtagactgtcccagtgcagcctaccttcatgggaaatcaggaagatgctgtgtgcacactggagctgtgagtaccaggggcattggccagacgctgtgagtgaggccctcccctcctgagcctgtttctcatctgtagcagggtacagtacccgcttccaggccggagagcgaccctccctgagctctgcaaagctgctcatgtcctggggatggggtactgttgctgttcttggaatactgaaactgggggaaggggtgtcctgagagctgcctactactcccaaccctacccctcaaacccagtgctttctctgtgggcctcacagcctagctggaagatgaggccccttccagctgtaaaacccacttaccatggcatctcttttttgccctccgccctgaggacattactccagcggtcttcactgcagcccccctgcccaactgtaacagcaaggacagctcggctgtggccagtcgtttcccccacacacctacacttctgcctgccacagggcactactggcacaactccagggggcgccattcacataggcaccgcctgcagaggggggatataaccctcacacacagttggccaatgccatcccggcctgccgcactcctggccacccctacaccatgctctctggggccccacagcttcctgcagtgagagctgcacccactttgcccggcagcggtccacagcccgccaccagcggccagtccagggaaccggagaggattggccggcaaaagtcagttgcgctcctgggcccgcttccagtagagtgccggcgccccgtccggccgcgcctgccccgccccggcccgccgcgagcgagagagcgaacgagcctccgcggccatggcccggcgctcgccctagctccactgcacagatgccacggcggagccggcgggtaggaacttggcgggggcgggggccgggactggggccgggactggggccggggctggggctgcgcaaccgcttcgcctccgctgcccgtctgggtctccactttgctggcgcttttgctcaatcgtcccctggtgggctctggcggccgccccccgcctcggcgcaccaggcgcagcaggaagcccgtgggctgtggtttccccggcgcccccgcggaggaaatcggccggcggcggggtgctgcgcccccatgcccagggcgggctggcacccggttcagcgtcaggtgggcggccaagccggcttgggcggcggcgcgcgggggcggcaggcgctggtgaagcccgcacacgcgccagcgcatccagccctaccaagccccgggctgggagctggctcgtgggggcgtgcgctgcgcgaaagcgaaagccgcccgccagagcaactttgcggcggaaggcgccgacgaggagctgtgccgtgccgctcttggggatggtgagctggccgcccggccgggtgggcagcgcgtccgggcgcggtgcttcgctagctataaataggtgctgtgcggggacaggaagatggttccagccctttacaagcaccggcccgttatgtgcgctgggctaggaccttgccccgcagcggagtgggaggagtgaggttaggggtaacggttgcatgggatggggggtgggcacatagagcctacagcagagttggcggcggggctctcccatgcacttggttgtttgtcgtttctgcttttcccgggagggggaagggaggaacagcccggcagttctggggaccttagcgctccacgtcttatttggcaggagaggctggaaacgagcgggcgccagctgcaggcaaattgcaggctttcccagcccttgtctgcagagagaatcattacctg

SEQ ID NO: 9452 - DNA, 6000 bp, Homo sapiens
tagagaaataaagttagggaaataatagagttagctgtaatttgacttcatttatgttaaggggaatgttggggcaaaggatattaaagtggtattgtattagaggtgcttctggaaaggtatttaatatctgttaggtgtaaattgttatttacacttagttagggttattgtgtgggggcgtgccgtgaagagcctttataccaacaagtttttattattgcaggaaatgctctccctttaatgttgcctttcacttgggtgtcagaggcagcctgggaaagttggagcaagccctgccttgtagacagggactcttagatccacttttatagcagtgctggtatgtgggtggaaggtagggaagctgagttacttctgtatgacaagaacacctaaaaaaaattttttttaaatgagtgggtattattttgtctagaatctgaactattctaataaaattgaaaataaagcctttctcccactctttttgtacatcttcctttcagcttcagatttctgaaagatactgaaaataaaactgaagtaaggccaggcgcggtggctcacgcctgtaatcccagcactttgggaggccaagacggttggatcacctgaggtcaggagttcaagaccagcctggccaacatggtgaaacatatctctactaaaaatgcaaaaaaaaaaaaaaaaaactgccgggcatggtggtgtgtgcctgtaatcccagctacttgggaggctgagacaggagaatcgcttgaacctgggaggtggaggttgcagtgagctgagatcgtgccactgcactccagcctgggcaacagagcgagactccacctcaaaaaaaaaagtgaagtaaatttataaatttgaagatatctccaagtgcgctcttggaagaaagaatgcttttataatattttgataactacataggtgctcttcattctgatgtatccatgtgtgaataaataaatggctagagtaatagaaatcaaggcattattgtttgatttcaacaaacattcatttactgtgtattcagatactgggttaagaactggggatatagtataaaacatgatttctaccctcagactgctcatagtctagtcatagttatgcagaacagtaactccaaccgttatgtaccatggattaggtgctaaggtaaagtatgctcacagataagggtacctaaaccagatgtgggagcaagtagggtcaggaaaggctttctggagtaggggatttctgaagtaagccttgaaggatgaataacccatatagtcggccatattcaagggaaaaagaatagaaacatggtgttcagaagagatgtatgtgctcaaaaatagaaatgtgggagccgtcagggtaaattcttggtaactgaagtgatagaatgagttggaacaccttgagcaagtgtggtcagcaatgttaacttctttgaggtttggacccttttgagaatctgataaatactacagatcctctctgcgtggaaatgcatataagaaaaatttctactggggtgcctgtgttaggaaccatgcactttgggttaagaacctctggtgtgcagtaaaaagagatctgaggatgacaccttgcaagtaacaacaacaattgagaggatggtagaggaggaagaagagtacgatggagaagagggtgaacagggaaagaggaaagttaagaaagactggtatcattttaagttaagagtgagagtttcccaaaggagggaatgccaaataccacagacaaatcaaagaagacataaaatgtccattaaatttggccatgatttggaggtcttcagtgacttcagtaaggtaaatttcaattgagtagtatggaggaaaggaagctggggttctggagattggatgaaacactcaaagagttgagactacagggagaagtacctctttccttcatttgtttatttaataaatatttcttgagtacttaccacgtcccagacactgtcctgaaagctggggatttgtccatggagaaggcagggcctccttcattagctgacatctcatcgtgcccaccctgttccaaagcttcccagcccctgcctgtctctctcctcccaaacacacatacaggaaatgtcctaaaatgattttctccttggtacattaccgggcacattcagccaccaggggactccagttttgctgggtcagacccaggctgctcaattgctcttctctctcttggacaccagggagcaaattgtcctctataataccagggacacacttcaaaatatcattgtgccagtcagacctcactatgagcctgtcattcagtgagtttataaaaatcattgtaacattttttttaagcttgtaccaattctttcctgtaataaatttttaagcctatttgcactgtaaaatattggttctaaatgtagaaaagtagcatgaattcctggcctgaggaaacctttatcctagtcttggactttttgcatgtggggacccctcatttgcccttttctttaaaaacaaaataaaacaaaacaaaaaaactccttggggccttgtctctttccatgatgtatggaggctgcagtcacacctaagtgtcaaggtagctgctgcttttctaaggatgggggcgggggacattgtgggggagatgctatcttcttagtgccccaggctttttgtcaagaatagtgtaataaaccagaggattcagagaatgatacacagtgattctgaggtttatttcaattattagaactgaaaacacagttatcccattagtatgattcaagattttttccaaaaatacactgggttgctcttgcttccagtgaaactcacctgcccattttctgcttactcactttgtctttagaaaatttgactgctttttatctccttctgattggcttttcagttgcaaattcagagagtactatatattctgtgttccaggtcacttctaaaaagtgttaaataagaacaggcctagtacttatctatattactttactcagcgtttttcctaatatttgaagatctcattctttttaaaattattactatggattatgccacaagtatacagatatctgtaaaatgcacagaatagagcctgatatactatgttacatcagtttctccaggttccacagatggtcctgtatttcctgtgttcctttcagaattgttaaaatgattattaatttaggagcgggtgtaatgatgttgtattggcagtgtgccagccaatggtgttatacaacacatttttttaattttaaaattttaaaaattgaattcacaatagagatagggatttgccatgttgccttggctggtcttgagcttctgggcccaagaaatccaccagccttaacctcccaaagtgctgggattacaggtatgagacactgcgcctggccaatacagaacatttttaaaagcctggtactgcatgttgccaaacagtccttatggagacagcaaaaaactatgtattctcagtgtgatttgttattttgaatttagatttctgtagatgtttattttttaaatggagagctcgtgttgttagccgtgggcttgtaaaaaataaaaatagataaaaattaaaaatgggaagcttaattttggaattaatctttttaacctttgggtagtcttttagaaagtatatcctaaaaatacatagcataactaaaatatctcataaatccttcagaatgagctatttattagaatgctgtaaaaaattagaaaatcttaattttatgagacaactgataaactcatcattttataaattgttttatttgaatgtgtgataatataaaatagggaaattatgaagtttatattcagaggttaaagatttttccaagatcactagtaaagggcagaattagaccaacttctggactgaaccacatctttgatgcattttttaattatattattttaataagagaactttaaagaaactcttattgtcagtattctcctaaacctgtagctacagcattctataacaattactatttacaataatgacacaaatttctagggtatatataagaaaggatttacctttttcaataaaggctgaaacatagaaggctggagaaaacaaaaggtgaattttcagttaaccaaaattttattgaagctggaagccttaagcaaatttgcatgcacctttgtgtatctcttaagtttcttaagcagtcatatttgtagacacctttttcagagtctccaggtattttttatagtaggaaaaaaatcatttaaattacctctcattacctgtgtcctctcttttagtcctttgctctcactaggctggtttggtcttccaggacaagcaagttcttgcatattcctgttccttgaaaaaccttccagttagtggtcatgtaatagcttttcacttcttcacatctttcttgttaaatccactgcatctataaactgtacatcagtaaaaatgttttattaatattaaaaataattttgtttcatttcttatttgacattcatggctggaatctcttaaatctgtatgaactatagtaagctgctatgaatgcttccagtgctatataattaattccatcatcgcatccttaaaatatgccagcacatggcgcttgcccctccctacctcctcccccctacacacacacacacacacacacacacgcacacacgcacacacgcgtgcgcacagcgtacaccaaactgccattctccagcaggcctgcttctggagttgggagatgtcagcctgctgggagggggtggggggaggaggaagaggtggggctctactctgattaattaccttaggcattcaggggtggggcttccttcagccatctgcctgagatatgggagggagctggagaaagaaggagggggagagactgccagagaggaagagaaaagaaaggaagaaacattagaaagaaaaaggaaggaaaacggtataaagagagatcaattacccacccttaaatagctagattggggggggaggggggtggaaaagaaagctgtggaggtgtgccccagcacggctgctttgaaaggtttatcatctatccgtttggtttatggagaaaaagaaaatggtaactcaggtaagatttgtgcttcctcggcatgtttcttttctcctctctgggatctaaataaaggtttgagggtggagtatagtaagaagagttttaatcattattgtcttcttagaacagaccagatttattgttatcagctgaaaagtctgtgtctgttgagtccgtttatgtgtgtgttatgtatccgtatcctttcttccccctccctcaactccatagcagattcctgtttcctgtactgtgcagctgtagctcaggaaagaccctgtggggatttgtctacctctttgtcttggttctgagaagagggagggagagaaagactgcagaggtaggaagagattcttgtagactgccaaaaagaggggagcaggattccttttaagaatttcagaagaatttgtgttatagggaaatctgattccttgttcactttggtttctcaggattggctatggaattgtagttttgctgttactctaaactgcttattaaaaatgaaggttagaaaagaatgtttcattttcatgcctttgttactggcaaagaaaattttcagtaggagcattcaggtgtgacagaggcaggtagagccctccttgacaggagaacgaatctgaatgtataaatcacaatcacacaggctttaaaatacatttgaaggagagagagtaggaaatggaagatacctctcctccctctgtctcccctctcgtttttctctcttctcttctctctctcccactcccactcactctctcccccaaccccctcaatccccctttctctcctcatccttttcccctctttctccctgcctctttttggttatgccaggc

SEQ ID NO: 9453 - DNA, 6000 bp, Homo sapiens
ttttttattggaggaataataacatgcagactgatgcagtttgaaacattttcttcccatgtgtgtgtctatgtttgtgtcagtccctgtgtctacatgtgtgtacgtctgtgtgtgggcgggtgtgtgtttttctgtacacctggggggagaggtatctgtaaagtcagttctcttctctcctgtagggtggatatgcagcctacagatatgcacagcctgctactgcaaccgcagccaccgctgctgcagccgctgcagccgcttacagtgacgggtatgtacagagacagtggtgagctttgggatgcatgagagctgttccatcccaaaatgtcacccattttcctcccttcaccatttccacagcagctcttagcacatcgggcatcttgccagcctgggctttctgcagacctcttgatggcctctgtcatgcctaaagcacaaggcaccgactctgtcctccactccctctttcttgttctcatctcttctttgactttgactccagtccctctcttcctcatctccaactcctttcttttccattttatggaagtacttcagatttttttcagttattgcatttgggagtagaaatagaaaggttttttcctattccttgtaattccagtttccttatgataatccaagaccaagtgactcacaagtcttaaagcacagtaatccctttaatttttttagatcatacacttttctttatctgtctgattgtgtttcttctttccagttatggcagggtgtacacagccgacccctaccatgcccttgcccctgccgctagctatggagttggcgctgtggtaagtatataatataccattgctttataaaaccatttcattccttcttttacccgtagactacagaagatctagggaggtagtaaattcagcctttcatccaccatcaaggtattaaagccacatagatctacctggaagtttcatgtcaccctctttatttgtgtgttattataatgtgagccacatggcctagttaagggcagcagaaaggaatgatcattgataatatgccccgagtagtggcatgatttgcgagagaaataggggaactggtgaatgttttctattggttcaaatgttgagtgcatacctgtggcatagtttcattgataggtgttggcaaaggagcatggagcataaggctgtagtattcacagtaagcttttcaaaaacttaagtttcaaatgcaaatctaaaggatgtctctgctcttcctaagccttctggtagatagtactagaaattcctaagtgaatgctttataggatattttattattgattattgataacaattgtggcaaaatatggtgttgttgatagaagtatcgaagaagtccatagaactagcataatttcttctgaccaaccacctcactgcagtattattgtgttggcttggatgcctccagtttcagtgattaggactcacaggctgcaacaaagacaggccattccacagtgacacctctgccagggctttctctctaatccaaaatgcaactgggcaactacctctggacatgggtagagttgtttgaaaaggagacagaatgaaatgtaaaatgtaagacctaaaggaatatgagaaagctacttctcacaccaaatttctactgatgaagatttgtggaaggaagtaatagggggccctgagggaatatatgtttataaatgaagtagagcattacaatataacggcagtggtagaagtgcctgaggttgtatttcgtcctaaaatgatataagtcctatgctaaaagaatgacctgagaaagatgcattcctgggaaacttctaattgaaagagataagccattagataaagtcatttgataaacataaaggaataaagcctagttaaaaccccagctagatatgtaaatgtgaatatgtcaagaaacagcctagttggtgtgcttcgtagatgatagaggaaacagactttattaaagactggctcaggtttagatgtggcaccatctcaaacatgggctgtgaccacacatggcagggatcgtgtcagaagtaacgtgcactgccgatgggtcatatgtgagaaggagaaactggtgatctgttttccaccaggattataaggctgtatcaaggtaaacaaaaacctgtgcttttaaaaatcaaactctttgcggaacttgttttcaactgtgtattgtttcccttctgtgctaattcatgtaaataatgaaataaaatgtcgtcatactctccttgagaatatcaggtcagcaataaatgtgttgggctctggtctgagcaccttagaagcagaagttggtttcctgacttcactgcacaaggcaatgcttgatcagttgctttgaggcttcgaagcaggctgtttctagatccctctctggacatttttcttcactgttaatgcttctctcatcaaccttttaattatttttatctctttaattactgcaggcgagtttataccgaggtggctacagccgatttgccccctactgaagtgacgtgagacccctgcaaatgggacagccccccagttcatgaggcctggctattgcaatatttactagtagaggaactctatagcaagatgaagaggaaaaacaaacaaacaaacaaaaaaaaacacaaaaaaagaaagaatacttttttatacctcactatgttctttgaatatgtatttttcctttaaatttctgcctttaattcttttgttccaaagattgtgcatttttttctttttttttttaaactgtggtaaaaaaaaaaaaaataatgcatttccatgtctgtatgtccgtgcttagcttattctatcaatcacggaagaggcagtcaaggaggaaggagagacattaggagccgataaatgcatctgatcagaaatcagcagacagaattaccaaagtgtatctggtgctgaatgactgggggacaagcagaagtggaagagatctttctgcaacaggatattcttctagtcttctgagtttctggtctttgacaggcaattctggttggctgtggctggaatccacatgctgatagataggaatttgtgcttacaaagcaggagaattaaaaagacgctttcctctcctcttccctcctgtcttctccgttctttttacaatcatcttacacgcacagcctgagacagctggcatagtttttggaattatagtattgatatttccaaacgtgctctcagacagtggataataaacacctcattaggaaaccgatctcagaatgaactctggagtatgaaaaagatcatttctttttgttcctgtaacctagcattccttctaggcttcttctcctttaattgaaccacagcttagctcatgtattcttttattaacaccctgctctcatgtccataagattcaggaatttaggacccagggacagaaaagtgaataagccagtgaccagatttcccccagatgtcttgaggattagaagtacaaattgttgacagccattaaagagggtgaggaagggaaaaggaatattagaagatctggtatttcttacttttttcttgcctcagaaagtacaaagtttaaaaaatagaataaagaatctgctggggaaagatagagtaccaggtcctaggtcagtagtccctggaagttttggtgatgaggacatggaagggcaggcagaggcactttgtacttgctccaaagccataggaattttcatcttccagagcctttatgagtcacttctctatccacagtcttgagcctgtggctatcccgctgagcttctcactgtcctccaaaaacaccccgctgagcacccggaccactttgtacacattaacactacaggacataaaatgcagaggccctgagattgctgccctcccatattggaaggagggtctgcgatggcaagggtcttctatatcaccagaaagagtcgcgcagtgagtcactgccgttgccatctggctgtaattttctatgttatcaaggtaggagggagtgtttctcttctagctgttagatagaactgataaaagcaagtgtcctacagcatttcccaaatgaaggcattaggaaatagaaaagcacggtctttttggctccctggtctagtcacattggtactagggtgacctttcacccaagggacagctgctaaagggagtaattcagagacatggagcttctggttatgggtttgttttgggtttgtttttaactcctgcctccacacatgttcttgactgataactgactcatgtccctgaattaaaatgactgacctatgacagcatcaagcattctttgtaagcagagtgatatatctgagagggcgttgacctgttgtgtagaatacatatcctttcccccttcagaatcctgtctcgcctcgtaactgggagagaggctgtgcctgaaactaggggcgatgtcaaggaagctagaggcctcgatgcaattattactgactctggggaggaagacagagaataaggggacaccaactgcccagtccactggccatttttaagggtccccccaccccaagccaaagtttggtttgttgctgttaagacaatttttgttgtatgtatataaatattttagttagaggagcggggaatgggatgcgggctttcacagttctagggaatgggggcagggaggattttgcttttgcttttgctttgagggagaactttagctgactaaaaaaacagaagtttggggtcatgatcacaaaggggccattcccaaaagatggcaagccacgtattcagtggagactaggccaaattctaaatggttttatccatagcaggggagaataggagaatgagtttaagagtttttctcttcttttttcctagaaagaggtaaggataatgggaaaggtagagaaggcggctcccacagaccttttaagagaggcagaatcttgagcttgaggcaccttgagtgcatctcagttcagctggttctggctgaggcctccaaaggcaagctctgtgctttccagtggtttctgctgcatttccagggatggtgtttaacaccgcttcctccagctcccttttctaagaaagaataaatggagttctgctttttatgaaagggtctttggttttcagtgtcaacactgagaattggggctcttgcaagcatctggatttcacagtatcaacctccccgtcaccttttgaactttgagactccgtacggtcaacttcaccagaggcaggttgctcgaagcagcactgcttgtctgttcctgactctggttctcactgtattaaaaaagagagtcagaggagtctggcatttcgtgagtttgttagaggatgctggctgataattccagaaaacttactgatgctaaatcacagtacatgcatgattctttttcagctttactatagttcatgacctggactttctgtactcttggaagctgggctccttaaaggaggcctctagtgaacacctttatctccatgtccctcttagagcccagagagctgcccataggcattttccagaattcctcatgtcacctagttcaatttccattaactcagatcagccattgtgattcaccatttgtcaggctctcaggtttaacaaaacctactatcaccatcatccttcaacagccacagtctgaattgagccaacatttttttttctttgagaaagaagtggactggggcacaacttttagtctgaggggagctagtggaaatctagacaatagaagtcatcgatagcagcttttcctcaaatgtgtgactcctcaggggctaaactgctcttagcttagaattatgctttactagagatctagcagataagtgggttaatcactaccatcctgtaactagttatatagcttccagacatgagggagacatcaaacagggatggaagcaaccccaaggatatgcaagaagg

SEQ ID NO: 9454 - DNA, 6000 bp, Homo sapiens
ttttaatctactaactggattaccttgctgagctaaacacaagtaattcagtgatcttgctgaaataattttttttgaccagtggccccttgttaatgaaagtaattaatagtaatgttattatttcttagttcttatcttaaagcagagttacttagagaaaaaaaggttggtcactagtgctgaaataatatccatgcccctacatgaaaagcaagaatactttatgaggtaactactgagttaggcctaatacaactgttgcttttaaaactgtgtgttctgtattccacatgtgagggagcaaaggatacttcttcaaaaacacacagacaacaaaacactatcatttttgccttgagtttgttctgcttctctccatacatttcccatctgtggaaatctgtcagcatacatttagttcttatttcctccgaaaggcatattagaaatagaaggaatagagagtttagtatgaaaagtgcaccgaatcggagcttgaagagaagacacaagggaaaagattttaaattgctggttatgcttaagttaaatgaatttaggctattaattgtgcaaggtttttgtaatccctttcacagtcccattcttagacagtgattcctgctagccatttactttctgtttcttttatggcacattcctctctggagaactgatctagcaattctgttcctagtttgtaaaaagacctaccgtgataggatttgggagtgtggcagctagattatgtatccagccctccctcttcttttttggccagtagaaaaggcatagttcgccctaattcactttttaaatgggttaacaaactgctcctaaatcacctcctgtgaaaagcatgcttgcatccaaaggaaagaaaaggctggtgggccccttagtgggctttttgtatgattgttttccttccacagctgtgttttttgaactgctcttcctgtgttctgttatagaatagtcttacaggaaccaatcattagcgctaaaatacctcaggtaggagtgccagtgtgacctgccaatcaatcagattgtggattgcagtgaaaaaattgaattatactaaccattccagctccacgttagagatgggaacagaggcttttttggacaatcaagacttgtgagcgtgtgatctaagccctgctacctcagcagtgcccacagtcacattccgtacataatggcacttcctctaaaattaagtgctcctgtcctcttgacacatatcccagccaggtgtgtaatatgcactgtcccatcactgccacctcttttaatctgtcagtcacatgtacctgtggtatttaaactgtttttttatatttagatcttagcagttggggacattttcttactactataaatttagaaaagagaaaaaagaggaagtagaactgtacaaataggatttctgaatcccacattgggccctgtagtgagataccagttgtaattggactgtgctgctacataagtttgaagttgccttaaaaatctagacatatgggactcaaacattgagacatgcatttcccttggcctcttctcctttcacctaagaagatcagtgagttcatttggataatagcatacttgttagaaggattgctgatagctggatgctaggagaaagaaaatagtcgatggcttttcacaatccagtttatttatgtggctacccagcaagattttggaaatgaactaatttggggagatgtggaataataatgtttgaaaggtttgattattgaaaatcgtctctcatctaccatagaaataataggtggaagacatcaggttgatcatagcaattttttcccttaaccccaattttaaacaataataagataaaatttaaatactttaaaatttttttcataagtacttttcaaaggagacagagctcaatcaaaagcagtgacggtatcaccattattgtaagtttgtgtgttactcacatttaatcagtgatgccattttgccacaaaagaactctataatatctcctagaaccatggttcttagcaggggtggggaggtggtgaggaaaaagagggagttagattcatccaaggataaataaagtgattcctggaggcccagcattaaacccacgctagttggaatagatctctgctctgctgtagtgattttcagcatcacacctgccattccttacccaccccctgccgccatcccccaaccctctgctctattgatctatacactacatgtaggtaacaagctttcattttgtctgctggtcttgaaatacacactctcctcctcagtgtcacataatgtcattgtcttccgggtagaaagaaggtgtcttgacatcacatgctcaccaaagtcctgttttaatgtaaacctaaaacaaaaatataataaaattaaaagctaggttaaaatcaagacaaggcaaaagtctgccagtgtgagattaaactaataaatatgcagataaaggtcagatataggagggattatattctattgtattttgctctagtttaaaacccagctacagaactgtgccgaaagatcatgtggtcaacgtggcaacatcataaagttaatttgatgataaaattggctcagagcagagtagaaaagccctaggagatgacattgagccatgaaaaactgagactttaacaactgcagaaaacactggaaaggatcttaaagccaacttttcaaaggcattttcctttgaagaagctggaacttgaagtcagagataggttacagatatgtgaaaaagtaaaattcctaaacacaggaaatattttagcagaatgctgtggattagaatatacggttgttgacagagggcgagcatacatgtgagtgctgtgggtcaggactgaattatattgccagtgtcaggcaggttgaataggggagcgatgaagcactgggcagccccactggggacaccaggtatcattcagaatgaattgcaaaggaataagaataattctttttaaaggggcatgtgtgtatctgaatcaagcttagccaagccaaatttatccagctatcagagttccaaaaagccgtccgtgtgtgccctcctacattagggtgtgctgtggccatgctaatccccattttttgttttatttcaaatcacacacagatagaatctgcaaactgcttcagatcaaacaggtctgattgtgtgtaaatacatatgtcctttttaatttttattattaatggttgcttcagttttgcatcagtgcatggttaaaagcaatacacatcagctatttcatgacttcatatctccaaatgaattatttctcctctttttttgtttgtttgtttgtgcagtcagctgaagaaatgttaacatctcactctaaatctctcagtggagtctctgttcccttctctgatataacagatgggttactgcttgttataattattaacattgtggtgtgggccagggctagggtgggcaagattgactatttctttgggctggggaggggccagtcgttagggtatggaatgttaactcaagtggtgactgactgtttccgtaataccaggtcgttgtggctgcacgctctagtaattgaggctgtgtacttcaccgagcttgtggtagagcctagggcaaaccgctgtcccaagagaatgctgggatagatagagttagccaatacgagtctgaacgtggtgattttgctggttgtttagctccagatgttggcatgcttagtttttaatgtgattaataaatgtggcgccatatccctccccacgcctgaaccctgtctcttctacctccttcccacccttgttctttttgaaaaacttaagaaacagtaatgaaaaccttggtgtttcaaactgcactttgttctcatgttttataaaagcctttagatttgctagtaagagtgaaagctgaaaaaacggtttctcagcctgaaatttctatgcactttgaaatctggaatagaaataaatatatctgaattttctttttctcacattttgtgatatgttttgttgaataaagcagcaaaaatactttcgagtaagtgtatgtgtgtgtgtgcgtgtgtgtgtgtaagagagagagagaggaatacatccatgatacacaattaatttttctacttttggagtagtcattagtgaattaccaagttagtttagtaggatattgcctatctatcctaaaatagttcatcttttaaaggtttctctgtaatgccattattataaagtaatcaggagaataatcatgttaaagtcatctgctttaaaaaaaactcttcatgtgttttttcttagtgctgatattcttgagccttttgttttcagtaaagtatttgccaaccctgttctgttttcttccacttgaaaagcagagaacttcatcatgtttaaacttcaaagtcagacttgacttatcaaagaaggaaaccgctacagatagattctctccatctccttctggattggaaggaagattcttttccatagtctgatccatttgaattgttttgattagcagtaacattactcctaaaccaccaaggttcctatggcttcctgtaggcctaggaaaatgaggggaaattggttctgtcagcaacctcacttagaacctgttttttaagaatacagcttaaagccatgatttgatagaatactcagagatcgtacctccagtacctcactcagtcttcctgagagtcaggtgtgaaacctacccttggttgagtacttttgaacctcagtatccctttgcaagaatttatacctctgccgtatggcataagacttcagtttttaatttttttacctaggtaaacatgaattgggctttaactgcttttgttgccttaactttaaaatttttttaatgttactttgatggttggagtaatactaaagagtaaaatgctgaattacccttgtttgcaaagaagttttactaaatagccctgctgtaactttacactagcaaacaaattctaaactaatggaaccatctctagttataatgaaaaattactagggttcattttagtgttaaaattccaactgtaattaacatttgctttgtttaacaaatgcttaaaaaaaaaaaaggtaaagaaatactttagttagtttaattatgttgtggccaggatttacagctttgcccagatcctggctagaattccaaggaaccatgttgatcagaaacggcccccaagggtgcttcctgccatgttcccattcattaccatttcattgtcagtgtttggtaatattaattagagtcttcatatatctctggaagaattcgtaattaagaaggaaatgtttactttctaagtcactcatttgaaaaacaaaggaggaataatgtataaccactgaaagccagtcagggatttttttaagtacatttgaaactaccctgacttcaagcagcataaacttgaagagcaggaataaatttccctcacaatgcagtttcttcatttagagaaagcataaattatataaggaagaagcaaaaggctttagaagctcataagaaattataggtatttctaaaataaggggtaacaaataaaagaagcaagctaggacttgccatgcaagatggttaagaagaacaggggtccccttagaaaatagttgttctcaatcccaagaaatgatacagaagtaaatttgaaatttcttttgtagatttagaaaaatcgaacatttgaaaaaataggaagtagaaagcacagggcagaaaccttcagatatccatgagaaatgagcacattttatccacagaaataaaatgtttatgctattgttcactactgaaatgatgttcagttgggccagttgaacatagttgtttttgatagtgaaaggccaataataaaaatttgcatctgaattacgtttaggtaaaatagatgaattctatttcataaataataaaaa

SEQ ID NO: 9455 - DNA, 6000 bp, Homo sapiens
aaaaatcgaacatttgaaaaaataggaagtagaaagcacagggcagaaaccttcagatatccatgagaaatgagcacattttatccacagaaataaaatgtttatgctattgttcactactgaaatgatgttcagttgggccagttgaacatagttgtttttgatagtgaaaggccaataataaaaatttgcatctgaattacgtttaggtaaaatagatgaattctatttcataaataataaaaagtagagtttgccacttttaaaaatatcctgtctcatgtggcaagcatttgttgttgtgattgtctcttgaaatgctttctgaaagagtgcatgattcaccctgatagtgaaaaccttttgtatatttgagttatctaaactgagttgaaatagaaggatgtgatggtttgaaattctttaggactgagaggatatttggactattggaagaaaagctcagagtctactgtaagattaatatgtaagaatctcaaaaccttttagggaaggaaaatgcagttaagtgctagaagcagggttcctgatctatttgaatccagccaaagaatcctcagaaatttgtaattgatttgctcaagtatgaaatgtagatctgagttggcaaactttccgtaaagggccaagtggtaaatatttttggctttgtaggacattggtctctgtcacaagtactttcaaaaacaggtggcaagctgcattggctcacaggccagagtttgctgacccctgatctacattgtttttccttctaaatattacctgattatcttagcttcttggcaaacatgctaggccggatggagcagaggtttctgttacatgctgtagtctcttattaatgaatcaatccaagaacacgttagagaatctgaagtcaacacatacagatttcatatattttaactttataatttatatttcttgtcagagtgctcccaacttgctgtaaatattttcgcttttgaaagttccaacaaagactgtgaagtaagacagattcaaaatcatatcttcattccttgtatttaacaggtactaccaaactttacttttaatactatcacaaattggaaagcaaatccttgcatatcgtagggcttaattttttattggaggaataataacatgcagactgatgcagtttgaaacattttcttcccatgtgtgtgtctatgtttgtgtcagtccctgtgtctacatgtgtgtacgtctgtgtgtgggcgggtgtgtgtttttctgtacacctggggggagaggtatctgtaaagtcagttctcttctctcctgtagggtggatatgcagcctacagatatgcacagcctgctactgcaaccgcagccaccgctgctgcagccgctgcagccgcttacagtgacgggtatgtacagagacagtggtgagctttgggatgcatgagagctgttccatcccaaaatgtcacccattttcctcccttcaccatttccacagcagctcttagcacatcgggcatcttgccagcctgggctttctgcagacctcttgatggcctctgtcatgcctaaagcacaaggcaccgactctgtcctccactccctctttcttgttctcatctcttctttgactttgactccagtccctctcttcctcatctccaactcctttcttttccattttatggaagtacttcagatttttttcagttattgcatttgggagtagaaatagaaaggttttttcctattccttgtaattccagtttccttatgataatccaagaccaagtgactcacaagtcttaaagcacagtaatccctttaatttttttagatcatacacttttctttatctgtctgattgtgtttcttctttccagttatggcagggtgtacacagccgacccctaccatgcccttgcccctgccgctagctatggagttggcgctgtggtaagtatataatataccattgctttataaaaccatttcattccttcttttacccgtagactacagaagatctagggaggtagtaaattcagcctttcatccaccatcaaggtattaaagccacatagatctacctggaagtttcatgtcaccctctttatttgtgtgttattataatgtgagccacatggcctagttaagggcagcagaaaggaatgatcattgataatatgccccgagtagtggcatgatttgcgagagaaataggggaactggtgaatgttttctattggttcaaatgttgagtgcatacctgtggcatagtttcattgataggtgttggcaaaggagcatggagcataaggctgtagtattcacagtaagcttttcaaaaacttaagtttcaaatgcaaatctaaaggatgtctctgctcttcctaagccttctggtagatagtactagaaattcctaagtgaatgctttataggatattttattattgattattgataacaattgtggcaaaatatggtgttgttgatagaagtatcgaagaagtccatagaactagcataatttcttctgaccaaccacctcactgcagtattattgtgttggcttggatgcctccagtttcagtgattaggactcacaggctgcaacaaagacaggccattccacagtgacacctctgccagggctttctctctaatccaaaatgcaactgggcaactacctctggacatgggtagagttgtttgaaaaggagacagaatgaaatgtaaaatgtaagacctaaaggaatatgagaaagctacttctcacaccaaatttctactgatgaagatttgtggaaggaagtaatagggggccctgagggaatatatgtttataaatgaagtagagcattacaatataacggcagtggtagaagtgcctgaggttgtatttcgtcctaaaatgatataagtcctatgctaaaagaatgacctgagaaagatgcattcctgggaaacttctaattgaaagagataagccattagataaagtcatttgataaacataaaggaataaagcctagttaaaaccccagctagatatgtaaatgtgaatatgtcaagaaacagcctagttggtgtgcttcgtagatgatagaggaaacagactttattaaagactggctcaggtttagatgtggcaccatctcaaacatgggctgtgaccacacatggcagggatcgtgtcagaagtaacgtgcactgccgatgggtcatatgtgagaaggagaaactggtgatctgttttccaccaggattataaggctgtatcaaggtaaacaaaaacctgtgcttttaaaaatcaaactctttgcggaacttgttttcaactgtgtattgtttcccttctgtgctaattcatgtaaataatgaaataaaatgtcgtcatactctccttgagaatatcaggtcagcaataaatgtgttgggctctggtctgagcaccttagaagcagaagttggtttcctgacttcactgcacaaggcaatgcttgatcagttgctttgaggcttcgaagcaggctgtttctagatccctctctggacatttttcttcactgttaatgcttctctcatcaaccttttaattatttttatctctttaattactgcaggcgagtttataccgaggtggctacagccgatttgccccctactgaagtgacgtgagacccctgcaaatgggacagccccccagttcatgaggcctggctattgcaatatttactagtagaggaactctatagcaagatgaagaggaaaaacaaacaaacaaacaaaaaaaaacacaaaaaaagaaagaatacttttttatacctcactatgttctttgaatatgtatttttcctttaaatttctgcctttaattcttttgttccaaagattgtgcatttttttctttttttttttaaactgtggtaaaaaaaaaaaaaataatgcatttccatgtctgtatgtccgtgcttagcttattctatcaatcacggaagaggcagtcaaggaggaaggagagacattaggagccgataaatgcatctgatcagaaatcagcagacagaattaccaaagtgtatctggtgctgaatgactgggggacaagcagaagtggaagagatctttctgcaacaggatattcttctagtcttctgagtttctggtctttgacaggcaattctggttggctgtggctggaatccacatgctgatagataggaatttgtgcttacaaagcaggagaattaaaaagacgctttcctctcctcttccctcctgtcttctccgttctttttacaatcatcttacacgcacagcctgagacagctggcatagtttttggaattatagtattgatatttccaaacgtgctctcagacagtggataataaacacctcattaggaaaccgatctcagaatgaactctggagtatgaaaaagatcatttctttttgttcctgtaacctagcattccttctaggcttcttctcctttaattgaaccacagcttagctcatgtattcttttattaacaccctgctctcatgtccataagattcaggaatttaggacccagggacagaaaagtgaataagccagtgaccagatttcccccagatgtcttgaggattagaagtacaaattgttgacagccattaaagagggtgaggaagggaaaaggaatattagaagatctggtatttcttacttttttcttgcctcagaaagtacaaagtttaaaaaatagaataaagaatctgctggggaaagatagagtaccaggtcctaggtcagtagtccctggaagttttggtgatgaggacatggaagggcaggcagaggcactttgtacttgctccaaagccataggaattttcatcttccagagcctttatgagtcacttctctatccacagtcttgagcctgtggctatcccgctgagcttctcactgtcctccaaaaacaccccgctgagcacccggaccactttgtacacattaacactacaggacataaaatgcagaggccctgagattgctgccctcccatattggaaggagggtctgcgatggcaagggtcttctatatcaccagaaagagtcgcgcagtgagtcactgccgttgccatctggctgtaattttctatgttatcaaggtaggagggagtgtttctcttctagctgttagatagaactgataaaagcaagtgtcctacagcatttcccaaatgaaggcattaggaaatagaaaagcacggtctttttggctccctggtctagtcacattggtactagggtgacctttcacccaagggacagctgctaaagggagtaattcagagacatggagcttctggttatgggtttgttttgggtttgtttttaactcctgcctccacacatgttcttgactgataactgactcatgtccctgaattaaaatgactgacctatgacagcatcaagcattctttgtaagcagagtgatatatctgagagggcgttgacctgttgtgtagaatacatatcctttcccccttcagaatcctgtctcgcctcgtaactgggagagaggctgtgcctgaaactaggggcgatgtcaaggaagctagaggcctcgatgcaattattactgactctggggaggaagacagagaataaggggacaccaactgcccagtccactggccatttttaagggtccccccaccccaagccaaagtttggtttgttgctgttaagacaatttttgttgtatgtatataaatattttagttagaggagcggggaatgggatgcgggctttcacagttctagggaatgggggcagggaggattttgcttttgcttttgctttgagggagaactttagctgactaaaaaaacagaagtttggggtcatgatcacaaaggggccattcccaaaagatggcaagccacgtattcagtggagactaggccaaattctaaatggttttatccatagcagg

SEQ ID NO: 9456 - DNA, 6000 bp, Homo sapiens
cagtgtagctaggtgggtttagtggtgggggcagagagggaagttcccttagatgctcccttccccacttctgtcacccacctctgcaagctgtaattatccagccttttactttgaactgtacttcctcttactagtatatttttagctctcctgccagatcatgctgtgggagagcaggtccaggccctcatggaagtagggaagaaatcagttctacccactggtcttttccttatctctacttggggacagtcatggaactgtcatggaattattgggaaagtttaatgagttaatatgcagaggcgcttcacacagtgcctggttaatggttaactattagtagtagtctcacccttcacagttcaggttgggtgtcacttcctccaggaagacttccctgactttcccaggctgaatttggtgcctgcatcccctgtgcctccctggtacttcctaccactctgagttataattgtccctttgtttatctttctcccatactcaacagtgagcccccaaggggggattgtgccataccctgttcactgttgcatccccagtgttcctggctcagatggcagtgatgattatattttaggagaatgaatgaaactcatgacagctggggctctgggaccaggccctcagccttgtcactcacatgctatttaagttctcagggttgaagttccccccaagatgaaatggagctaaaacaaccccttcctcatggggccgatgtcaggagcaaatgagattttctgcacactacctgccacgctacatgttccataaacattcactgttgttctgcagttcctgattaaatacactctacttggccgtgtgtgttggctcatgcctgtaatcccagcactttggaggtggatcccttgaggtcaggagtttgagaccagcctggccaacatggcaaaaccccatctctactacaaatacaaaaattaaccaggcatggtggtgtgcaaatgcagtcccagctacttgggaggctgaggcaggaggattgcttgaccctgggaggcagaagttgcagtgaaccaaatttgcacagctgcactccagcctgagtgacggagactctgtcttaaaaaaaaaaaaaaaaaaaaaaaaaaaaaaaaagccaggtgtggtagctcatgcctataatcccagcactgtgggaggccaaggcgggcggatcacctgaagtcaggagttcaagactagcctggtcaacaggttggaaccccatctccactacaaatacaaaaattagctgggtttggtggtgggcgcctgtaatcccagcgactcgagaggctgaggcaggagaattgcttgagcccgggaggcagaggttgtagtgagccgagattgctgccactccactccagcctgggggacagagcaagaccccggctcaccaaaaacaaaacaacaacaacaacaaaaaccttctacttgtccaggcatccctggtccctccaacccaaaggaacttcagttttagctctggactcccatagcctcccagtatgtcccctctcacagcatcagtcacacttgtgacttgctcctctgtcaccccctctccctgcaaactgtaggctgagcaagggcagggccttagcctcacccatctgactatccagcacccagcccagggcctggctgaaaccagaggcttggaaaatgctttctgcaggactcagacacctggctcccttgcactgggcgtgggggtgggcccgtgaggttttcctgcctcggcacagttcttttctctggattaccctttccttctctctcagcctacgcaactctgttctcattcggcaagacagcgcaaatgccatcttccccaggaagtccttcctgagccgcccggtgctgtgacctctccctccttggaaatcttaaagctctgactccttcaaccactgacttgccacttgcacataagctctccagcttgatacctttaggtttgttggtttgttttgtaggataatttttctcttctgatgttacattcccaatgaaattttgttttccactgaggcgggtggcatttaccaacatctatcatcagagaagggcagttcctccagaaagttgcatatcacacatgctgcatggcacatacatacacataaaattattccaggcacacagaggaaagatcgtgtgaggacatagcaagagggcggccatctacaagccaaggagagaggcctcagaggaaagcagccatgccaacaccttgatcttagacttccagtccccagcactgtgagaaaataaattccattgttgaagccaaaagaaaaaaaaattccatttgttccctgactacttttttatttttattttttttgagacagagtctcactccgtcgcccaggctggagtgcagtggtgcaatcttggctcactgcaagctccacctcccgggttcacgccattctcctgcctcagcctcctgagtagctgggactacaggcacccaccaccatgtccggctaattttttgtattttttagtagagacggggtttcactgtgttagccaggatggcctccctgactacttttaaaaaggatttaaaaatggaataaggtggccgggcacggtggctcacacctgtaatcccagcactttgggaggctgaggcgggcggatcacaaggtcaggagagccagaccatcctggctaacaacggtgaaaccccgtctctactaaaaatacaaaaaaaattagccgggcgtggtggcgggcgcctgtagtcccagctactcgggaagctgaggcaggagaatgacgtgaacccgggaggcggagcttgcagtgagccgagatcgagccactgaactccagcctgggtgatggagcgaggctccgtctaaaataaataaataaataaataaataaataaaaatggaataaggtttgtaatttagataacggtattttaccaacaccaccaatttcctgcttttgctattatactgcagatatataaaatgtcaccattgtgggaagctgggtgaagggtatatgggactcaattttggtactaattttgcaatttcctgtaagtctataattatttaaaaataacttttaaaggctttgaggctgcttaaacatctaaaattatattaaatataaaaaccagtaatatctatattagataggacgtagagacttagcaataagtgcacttagcagtaagtgcaagcttatttattaacaactttttgataatattaaaaaagatggataacaacctcaggggattgtttttgagattagcagtaccatccacgtaatggaatactatgcagatactggaaagtgccaagtagaaatgtatttactattttgggaaacttttaccaatattttggtgagttaaaaaataccaacagtggctcacgcctataatcccatcactttgggaagctgaggtgggcagatcacttgaggtcaggagttcaagaccagcctggtcaacatggtgaaacccccgcctctactaaaaatacaaaaattagctgggcacggtggtgcatgcttgtaatcccaattacttgggaggcccaggcaggagaatcgcttgaacctgggaggcagaggttgcagtgagccaaaatcacgacactgcactccagtccgggcaacagagcgagaccctgtctcaaaacaaacaaacaaaaaaaaacaaatgatctatcaagtttggaagaatattcaccaaaatattaaaagtgattgtcttaggtcagtgggattgcagatggtttttttcttttttctttttttttttttttgagacggagtcttgctctgtcgcccaggctggagtgcagtggtgtgatgtcggctcactgcaagctctgcctcccgggttcacgccattctcctgcctcagcctcctgagtagctgggactacaggcgcctgccaccacacccggctaatattttgtgtttttagtagagacggggtttcaccatgttaaccaggatggtctcgatctcctggccttgtgatccgcccgcctcggcctcccaaagtgctgggattacaggtgtgagccaccatgcccggccattttttttctttttttgagacagggtctggatctgtcgcccaggctggagtgcagtgctgcaattatagctcactgtaacctcaacctcctgggctcaagctattctcctgcctcaggctcccgagtagctgggactacaggtatgagccactgtgtctggctcaaggtcactcatcttaagaatggaggggtccaaactagagctgtaaacctagtttggacagagagagacccctctgtaatcccagcactttgggaagccgaggcgggaggatctctcgggtccatgatttcgagaccagcctgagcaataaagtgagactctctctacaaaaaataaataagtaaataataagtaattagccgggcgtagtgctgcgcacctgtggtcccagctgcttgggaggctgaggtgagaggatcacctgagcctgggaggcggagggtgcagtgagcccagatcttcgagccactgcactctagcttgagcaacagagcaagaccctatttcaaacaaacaaacaaaaaatgagtgaccttgagcaaaaccctgcccctcttagaacctcagatttgccgtctttacacagaagatggacttcaaactccctacgaccttgcccggccccctcacgctgaattggctagcgggatggtttcccaagggctctgcgggagactgcagcatagcagcgccgcggctgccgaggggttaataccgttgggctcttccccttttcttgccccgccccacgggcaccacccccgccagggttgtacccttgaccccgccttcaggccttgcgtccaccggaagtacccgcgcgcgggcagctcacttccgcccggcaggtgacagccgcggggctccgagccgccggcagcccggacgcaccgggagagcgagaggtggaggccgcggacattttggtgccaagccgaaccgagccggggcgccgggagctattgggacctgcgggtgaggaagcggggacccgggcgagccaggagaagaagtggggcgaggggtcaggggtcctaggtgaggggtttgcggggtcagaggtcatgaagaggacgcggcgctgcaggggcgcgagcgacgtccccagccagaggaggaggaagggctgagggttcgttcattcattcgcgcccacttggccgccggcctgttcctcggccgccccatacccgcagcacctcctggggcttccgcccggagagacaggacttaggccccgaggaattccccactggcctgagggaaaactcttcgggctctgatttcctctttcggactcacctccatggccatcctgaggcctcctcgttgttcagggcgttatctctttgccaaggttgaaaaagaagaaagaaaaaaaaactagaaaacggtcccgtgccgcccgcctccggctaggcactggcttggtcttgtttgttggagcctctaagacaagttaactgaatggagacaccggtgataatgctgcaaaataacgagggagatgcttgctagtggctatcgagtcccttctgtgtaccgggcactgtgctaagcactttccttacaatgacacatttaaacttcacagcaacctttgtggggattaaatatccctattttatcgatgaggaccctgaggcacagagaggttaaatcccacatgtaaggtcattcgggtagtagaggcaaggccaggttttctgccaggctgtcagagacctgcaaagtacagagacaaaggaaagactggagttaaggttggggtgtaggggatatttaagacttttagccagacatggtggctcacgcctgtaatcccagcactttgggaagctgaggcgggtggatcgtgaggtcaggagttcaag

SEQ ID NO: 9457 - DNA, 6000 bp, Homo sapiens
tgctggcaggagggaggcactgcccagactggcctccaaaggctggttcccagaaggaggaggaagagagtagtgaagatcgtggggagtcctggctttgaggagccagagttctccttcttgccacatctttgatctcccttggtggtgtcttaagcccagatttaccaaagggaattgtcagctgtccaagggctagcaaattcctaggtcacctagattggattttctgaccataaaaactgtgggccaggtgcacagctgcctgaggggctcaaacctgtgcaggtgggtgctggaatcccctttgctatagcgttctctttgtgtgcatgtgaccagaggtgagagtggctggagaccgaagatggcagagcccgtctttctccaccagactgaggcccccgacttgccttgcctggggagggtgctcagtggaagtcctgggatgttcagtctggacaagaaaagtcttgggtgagcctgctccttctcttgtgaggcagactcagctgggcctctatatccccaaggagcaggcggagctgccgcaaggaagtgcacgtgacatggaggcatcttttggttcgacataaaaaaggatttttaaagctttaggtagtgagctcaccactcccaggagtattcaagcagatgccagatgatgatctgtagggaaaactatgtttagtgggaaattggacaaaataccgttgaaggcctcttttagtcacaagatactatggccctataattctagatttctctgcttctagctctctataagtctggaatctagaacccaagtttctccggtgctgaaaagttgaagactttgacactctagaattttaattctgggatctcaagattccagaattgggagccttgaggatgattctacaagtctcagttttggattcaaaggatcctgtgatatgaaagggaaaaagaggaggtctgacttggtgggatccagttttgccccactgggtatcagactaatgtgccctgcattcgtgcgtgtgtgtgcgtgtgtgtagcatgagcgtgtaaggctgtagaaagttttgcacacaaaggcagcctggctttcctatcatgtgtctgcagcttctctgccctggccataatgaaggctgtcacagggataataatagcccccaaacagagctggtgactccaggtagccatagcaactgtgaggtaacgctgctctgttgtagagatgtgtgagtacaaacagatgtcggtgccttcccattagcttaaatggtaaaacttaaaaggtccatcaacttcaaagctacaggtttccatgagcatgccagttaatgggggcgcttgccaagcgggtgatagcttcatattaaacatttcagcatcagtaatgggttgatgagattttaaatgctcaggccatccccagacaactcaggaggccagagacgggagaagagctgggattcgggtagtaatcagccctgccctgccccgcaccctcaggggtgttctgacactctcgggagggcacaggccagagagcatttgaaaaccgcacattgcgtctcaatctccaggagtctcagatctgcctcttggccttccccagcgcaccaggcagggggccccaggtcagatgtggcacagctcaatgccatctccttctttctgccctcctctctcacaccctggactcacctccagcgagtgaccagcagtaagggtcaaactgctgagagtctgagaccggggcagaccctctcagagttgtctttccttctgaggctgggcctggcacagactggggcctcagtaatgggctttcaaatgaatgaatgaacaaaggaacaaacagatgactgactgactgaatgaatgaatgagatcccctttggcatccccatggcttctttttttctttttgagatggaggctcgctctgttgccaggctggagtacagcgatctcggctcactgcaacctctgcctcccgggttcaagtgattctcctgcctcagcctcccaagtagctgggactacaggttcgtgccaccatgcccagctaatttttgtatttttagtagagacagggcttgaacatgttagccaggatagtctcgatctcttgaccttgtgatccacccacctcagcctcccaaattgctgggattacaggcgtgagccaccacgcccggccccccatggcattttagctacttattttgttactgcttcttccactgctaaagagatgggcctttggaggtcggctggcctagcatttggggttgacttctggaatggtcactagggaaggggcgccagaggtgcagccggtgcctctgacccttttggtcgctaggagtcagccgactcagtacacaggactcactgaatggagacacaaggctcctccagggagtggcggctcatggcaatcctagaatggtcaccagccaggctttagagacccacacagagggcgttctgacccaaagttgcactggggaactccaagtttggggattctttgaatttaactctttttctagctacatttcctattatttgtccaattcttaccaaacatctctgttcacattctgaagctgggatctgactggcagagctagtagatgctgactattcagatggagccctgacattggctttctcagcttggctgtgactggcagcaggtttgcgggagaactgtgtgtcccagaacatgactggctacacctgcacctcagcaagattggggcagggcagttatcttcaaaaagctgtgtaggtggggcagtcattactgacaaatccagtgcagacccaggatggcccaaacactggcttatcctttctgaatctcatctcccacagctgtaaagcggggtggtgctcgctacctcacagaggtgttgtaaagattagatgtaatcttgccaagcagccactttgtaaactgtatagtcttatgcagatggaaggaagggcctgtgcctaccttgatcatagcactaaacaaactgtactgtattttcattcctcttagttatctccctaaaaagactctgagttccttgaacacaggaaggtgttttatttgattttgttatcctcagcatgtagcagtgtctgacacacagtaggtgctctatcactgtgagagggatggatggatgggtggagttacagatggatagaaggatagatggagggatgggtggatgatggatggatagatggatggaggggggatgatgaatggagggataatgagtggatgaatgagggaatgggtggatggatggatggagggatggaggaacagatagatagatggagggatgggtgggtgatggatggatagatggatggagggagggatgatgaatggagggataatgaatggatgaatgaggggatgggtggatggatgaatggagggatgatgggtggatgaatgaattgagggatggatggatgaacacatggatggatggatagatggatagatggaggaactggtggattttggatggatgggtggatggatagatgaatgaatgcctggatagacaaagagatgatggatagatgaatagatgaattaagggatgtcggatagatggagggattgatagatgttggatggatgggtggtggatggatagatgagtgaatgcatggatagacaaagagatgatggatggatgaattaagggatgacagatggatggatggatgagtaactggatggacaagtggataaatggatagatggttgaatacctgaatggattgaaggaggatgcatggatgtaagataaggctaatcatcctccactctctttctttgcaaaaccatccacccatttactcaataaacatttattcagttcaaacttggcacaaagcaccatgtgaggcccaagagatacgtgggttaataaaacagagctcctgccctcctgaaaactgcaaagaaaggggcgtggcttcctgagttcaaatcccaactctgccagcgactagttgtacatcagtgatgtttccctactttctctcaattaaatagggataatgtcagtacctatcacattgggaggtcttgcggggattaaatgagttaccaaatgccaagtgtttgggacagggcctggcacccagcaaagtctcttgtgagtgctggctgctattatcctaatggagaagatggcatgaaaaccaggaaataggatgccctttgggaagcaatgcaacaggaacttacacaaagaaaggaaaggaggaagcaattagtggtgtctcaaaggagtatgtcaagaaaaacttttcagagggaaacctttgagcagggtcatgaaaacaggagttctctaagagattgtggacttgcctgggaccacctggctataagcacaaaaccatccggttcctttctgtcacttctggctgggtgaggggtctctggcaaaggggcagaaggtgcgtgagaggttgcgaatggccaggactgtcctggggccagccggggcacctggtggccaagcttagaaacatgacaggtcctcttgggagggctgaccgcagggagcgttgggtttcaggctgctggcgtcggcttctgtggtgccctttctgtcggctatgagagtccagacagtgcccaacctcctccccttctttccacacgcacaaccaccccaccccctgtggcctgagctgtcctgcctcgccacaatggcacctgccctaaaatagcttcccatgtgagggctagagaaaggaaaagattagaccctccctggatgagagagagaaagtgaaggagggcaggggagggggacagcgagccattgagcgatctttgtcaagcatcccagaaggtataaaaacgcccttgggaccaggcagcctcaaaccccagctgttggggccaggacacccagtgagcccatacttgctctttttgtcttcttcagactgcgccatggggctcagcgacggggaatggcagttggtgctgaacgtctgggggaaggtggaggctgacatcccaggccatgggcaggaagtcctcatcaggtaaaaggaagagattccattgcccctgccacccacaccctaagatcaagggtgttcagctgcaaggtggaaagtttgcacgtggggtaggtcagttggctgcattagttaagggtgttagaacggtcacttgctttttctttgcttttaagtgtcagggattggactcaggagagggaaaggagccatttcaggctgatgtcagcagctggaggaagcatgagaatcaaacctaggatgctcagagtccaccaggaagaattttagaattatagacagtcagagttaacaagggtcctgagagattttgtacagccacctctcttacaggatgaggacaaaaagggactgagaaggggaggacatttccagagtcacagctcattaaatgctcttaaagtgtcaaggttaagacatgctcttcaaggggagacagatctggttctagacttggctctgccactgagccactgggtgacctttgggaaagtactcaacctctcggagcctcaatttcctctcctgtacagtgaggggatatcctaatatctatatcctagaggagatgtgagaattaaataaaataatgcatgcaagaggcctggcatggttcctggcatatactgagtcctagaaatgttagtagctattactgatgaagcccaggctagggacctttcaaagcattgcaattagagaacagaagatagaggctcattagtgaccttcgatgttgagtatgtctctagtttgagaggtctgaatgatgtggtctgcaagtatatcctgccttctaccacaagggattccagaatacaccaaagaaaacaaaattctgaggtttgtaaatagagggtggctgtggtttgtacatagaagctcatctcctcgttgccttctatcccaaag

SEQ ID NO: 9458 - DNA, 6000 bp, Homo sapiens
caggggtcagaagaaaggagctgccctggggatggctgtgtatccctacaactgccaggcacatgccccttgaacacccgatgctacgtgtcccaaaggaaactggtctccacccacccccggcccgtcctcgtcctgggtaccccaccttagtaaatggcgccaccatctgcccggtcactcagcgagaaactcaactcctggcagcagatgacgggcactctggttaaatgactctctccagcctccaagttcaacctgcagggaagccctggaaatcctgtctccctctgccctgcctctccttcagctccgaaccccaccccactcagtacatggccccccaacaggctttcaaatgtctgccttccccaaaccaatctgtggttttaaaagaagtaaggtcaggtacagtagctcatgcctgtaatcccagcactttgggaggccgaggcaggcggatcacctgaggtcaggagtttgagaccagtctggccaacatggcgaaaccccgtctctactaaaaataaaaataaaaaattagcctgggtgtggcggtatgtgtctgtagtcccagctactccggaggctgaggtaggagaattgcttgaacccgggaggcagaggttgcagtgagccaagatcacaccactgtactccagcctgggtgacagattgagactccgcctcaaaaaaaaaaaatcaggacagtggttgtctctggcaggtgagggggccaggattgactggggaggggcgtgcaggaactttgggtgatgacaatgttctctaacttaatacagtttgagctacacaagtgagtgtagttgtcaaatctcagcaaatgtatatttaagacatgtgcaattaaatgtaaattttacatcttacagcaaaacagaaaatgcaaagaaattttgaactcttgttcatgtcatgtattgtggagtttctgcagggaatcagatagatgtctgcaatttaaaatgccacaaaacaagaagaatggatgggtgcgtagagggagagagaagcatgattaaattcatttagtaaaatgccagtggtagagtttaggtggttttcagtgtgagattcttcccactttgctgcatgtatgaaaatttttataataaaatgttagggagaaatgcctcctggctccagacgtgtcccctccattatgttaatcacatctgcaattagtgtgatgtttctaggacagcaaatcagaccatggctctcccttgctcggaaacccttctgtggctctccctggggacacgcccccacgtctgtggctcccaaggctgtccatgcctggcctctgtttatttctgtaatcatcactctccccttcactttttccaccacggaaacaccaaaatatttatgcgtcctgcatagcatgctattttatgtctcctatgatagaaatcgctcattttcatctaatataccttccccacttctttctaagtagtagaaactccaatttttatctggtgatgtggccatgtagaaataaagactacatatcccagcctcctctgcagtgaggtacggccattggatgcgcagcaagataaagtattaattacaacttctggaaagtgttctttaagataggggcacaaccttcttcacccctttctccttcctgctggttggaatgagggcacgatggctggagctcaagcagccatcttggatgaggaggtgaaggccatatgtgtaacatgacagagcactaaggtagattgaagctgggtccccgagactgtggtgtgccatgtcagctctgaatcccctgcctctagacttctatatgaaagagaaattaatactctcttgctgaagccatgttattttgagttttctgttaccaacaaccaaacctagtcctaacacaccaacttctatgtccttgaatgttttgatccttgtacttggaatgtcttttcctcactttgctcctaacaaactcccattgatccttcaaaaccttgctcggacatcaccttctcagttacatgttaattccttggtggaattaatgtttccctactccatgatttctctctaccttatatcacagtgtgcaattattgagcacttactatgtatcaggcaccatgctgggtgctccctcttttaatccttacaatgatatttaagataggttattcttttcaaaatctccactttatagataacaaaagcatagaccttggaaagttatgatacttttcatggatcacaaaagtagtgcatggtagggccgagtccaggagtctcattccaaagcctttagccctatgctgaatgacctcgattattgcccttatcagaaagtactgacaacattaggtcacacatccctccctcctaccacctctcaatgctcggaggccagccggtgtcaccttagtccccccagagcccagcacggagcctggcacacaccaggtgagcatgagtgctgtggaacgtgactatccgttctgagcccccaagtccttgtcttggtccttgtgcttggaatatcccttcctcactttgctcctaacaagctcctattgatccttcaaaacgctgctcaggcatcacctgagcctggcacataaagttcttcccagtaggtgtcacctcccacagccccacttgccccacacgtctctggcaggcttttgcagcactgtttggtacctctgcttagaacactctgcagaacgctccctcatacgttcacatccaggccagccatcacctctgaacaaactcctattgatccctcaaaggccttcacctcccaggcctaggcactgccttctcacccttccaaagcctttgctgaaatgtctgctgcgttccagatcccactgaggtatctcctccactggactttgagtcccttgagagcaaggaccatggataccttatatcaccgtgagcaactattgagcacttactgttgttaaaaaagtttaacctctagccgcctccttacatattttaagttgggcctaaaagtttttctgtacatcatgaactataacaagtggaggtatagacagactatagcctacactgtgccaatcaccgcattttggccaatcaaatgcagccaactgttcgaaccatgttcagataaaccagatgccaacctgtaaccaatccagctgtttctgtacctcatttctgttttctgtatgtcactttcctttttctgtccataaatcttccactatttagctgtggagtctccagacctactctggctcgggaggctgccctgctcgcaaatcattcactgctctgttaaactcctttacatttaatttggctgaagtttttcttttatcactatgtatccaccacattcagtgctccctttttcttaattttatttatttatttatttatttatttatttatttatttatttaatttatttttagagacagggtctcactctgtcacccaagctggagtgcagtggtgtgatctcggctcgctgcaacttctgccttctgggttcaagcgattctccagcctcagcctcctgagtagctgagactacaggagtgcaccaccatgcctggctaatttttgtatttttagtagagacagggtttcaccatgttggccaggctggccttgaactcctgacctcaagtgatcctccctcctcagcctcccaaagtgctgggattacaggcgtgagccactgcgcctggccagtgctccctttttcagtcctcatagtgacatttgaggtaggttattcttttcaaaatttccattttacagatttaaaaaaaagcgcccttggaaagttatgccacttttcctggatcacaatattaaaagatcacaattcatcttctaataatttggcaagccatccatggtcttctaagcaaggcgccatgaatataacgaatatagagacagaaaaagacccctccccactggctgggttgagggactggagagcccagatggaagggcagaggtgcaggcttttttccttgttgccactagatggcagtagggcacccgttgtcagccctggggcaaggtcaccgactgtctttgcctttgcctccagcaagccaaaaccctgggcagactcaatccaaaaataaacaatcaaagagcatgttggcctggtcctttgctaggtactgtagagcaggtgagagagtgagggggaaggactccaaattagaccagttcttagccatgaagcagagactctgaagccagactacctgggtcccaatcttgggcttggtatttcctcgctgtgtgactctgggtaagttacttaacttctctgtgcctcagttctctcaagtgtaaagtgacgcttgtaaaagtgtctcctgcaaaagaaagggctgctgggaggaggggtgtccctggtgtgcactaagtacaatatgagtttgtggcttttatattcctgcctctgaggcactcacagggtagaaatggggagaagccagtccagacaggtgcaccccaaagcaagagagatgagaaggctgcacccatgctggagccagagtggggaagagggcacatctgctgggaatgggtagagcggggtgggaggagtcctggcaggggagccgttcctatgcaatgggccttgaaggaaggggaggatgggtggatgtggggttaggtgactgtggaggcggggctggtctctgtccaggtgacaggtggatggtggagctggaggagccactcggagcctccaaggctggggagggtggaggggggaggcaggtcggtgtcccaggccacacctgttgactaagggattaggatgttgtgtccctgccagccctcctccaataagcccctctgggcctgcagggagaggaggagccttgccatgtaaactgtatttttagttccctgtgcctctccccggctgctataagacacctctccccacccccagccctggccgcttggctggaggctctgcgaggacagctggggagaaggggagctgtggtcagtatgatggatgctgaggggctggagaggagcagccctggtgggtgggttcctgggagtctggagcaagcttgggggttctgctgccccatcaagggccttgagcaggtcctgcaactcccaggcctcagccctgctctgagccctggcctggcgctggtccaggagggtagactctgccagggaggcacaagctaagctgggggtggggtgggagggcctgctggcaggagggaggcactgcccagactggcctccaaaggctggttcccagaaggaggaggaagagagtagtgaagatcgtggggagtcctggctttgaggagccagagttctccttcttgccacatctttgatctcccttggtggtgtcttaagcccagatttaccaaagggaattgtcagctgtccaagggctagcaaattcctaggtcacctagattggattttctgaccataaaaactgtgggccaggtgcacagctgcctgaggggctcaaacctgtgcaggtgggtgctggaatcccctttgctatagcgttctctttgtgtgcatgtgaccagaggtgagagtggctggagaccgaagatggcagagcccgtctttctccaccagactgaggcccccgacttgccttgcctggggagggtgctcagtggaagtcctgggatgttcagtctggacaagaaaagtcttgggtgagcctgctccttctcttgtgaggcagactcagctgggcctctatatccccaaggagcaggcggagctgccgcaaggaagtgcacgtgacatggaggcatcttttggttcgacataaaaaaggatttttaaagctttaggtagtgagctcaccactcccaggagtattcaagcagatgccagatgatgatctgtagggaaaactatgtttagtgggaaattggacaaaataccgttgaaggcctcttttagtcacaagat

SEQ ID NO: 9459 - DNA, 6000 bp, Homo sapiens
agcctcccaagtagctgagactacaggcacccgccaccacacccggctaattttttttttttttttttttgtatttttagtagagatgggttttcactgtgttagccaggatggtttcaatctcctgacctcgtgatccacccgcctcggcctcccaaagtgctgggattacaggcatgaaccacaaatgggcttttaaggaagaaatggctctgctgtgggttgtgtttgatttgagagagaccagagaaaacctaattgcagcccagggtgaccgtggtttcattttccctctctgcttctcctgccccctccctggggggccctccctggagcagagctgactctgacgcctccttcctgggggagctggggtttgattgtttttcaagggaatggtgggaggtgttgggacagggatgggcggtgcctggggagagagaatgtgtgtggctgcagaatgctggggagggaacaaggaaggagaggacctggcctggagactgcccagacgggcgcctgagctccccagcttcccctaaggagtaaggtctcctttcccatgtcctgccacccagaagtaaccacacccatgccctctctacgccccttgtgcagccttcagggtagaccgaggagagcacctccccttcctggtgaagggagcccgatacacgctggtgccggctggccaagaaggaggtggacaaacctggcgaccgctccctggcaccacctcaccagaggacagctcacacctccacaggggtcagaagaaaggagctgccctggggatggctgtgtatccctacaactgccaggcacatgccccttgaacacccgatgctacgtgtcccaaaggaaactggtctccacccacccccggcccgtcctcgtcctgggtaccccaccttagtaaatggcgccaccatctgcccggtcactcagcgagaaactcaactcctggcagcagatgacgggcactctggttaaatgactctctccagcctccaagttcaacctgcagggaagccctggaaatcctgtctccctctgccctgcctctccttcagctccgaaccccaccccactcagtacatggccccccaacaggctttcaaatgtctgccttccccaaaccaatctgtggttttaaaagaagtaaggtcaggtacagtagctcatgcctgtaatcccagcactttgggaggccgaggcaggcggatcacctgaggtcaggagtttgagaccagtctggccaacatggcgaaaccccgtctctactaaaaataaaaataaaaaattagcctgggtgtggcggtatgtgtctgtagtcccagctactccggaggctgaggtaggagaattgcttgaacccgggaggcagaggttgcagtgagccaagatcacaccactgtactccagcctgggtgacagattgagactccgcctcaaaaaaaaaaaatcaggacagtggttgtctctggcaggtgagggggccaggattgactggggaggggcgtgcaggaactttgggtgatgacaatgttctctaacttaatacagtttgagctacacaagtgagtgtagttgtcaaatctcagcaaatgtatatttaagacatgtgcaattaaatgtaaattttacatcttacagcaaaacagaaaatgcaaagaaattttgaactcttgttcatgtcatgtattgtggagtttctgcagggaatcagatagatgtctgcaatttaaaatgccacaaaacaagaagaatggatgggtgcgtagagggagagagaagcatgattaaattcatttagtaaaatgccagtggtagagtttaggtggttttcagtgtgagattcttcccactttgctgcatgtatgaaaatttttataataaaatgttagggagaaatgcctcctggctccagacgtgtcccctccattatgttaatcacatctgcaattagtgtgatgtttctaggacagcaaatcagaccatggctctcccttgctcggaaacccttctgtggctctccctggggacacgcccccacgtctgtggctcccaaggctgtccatgcctggcctctgtttatttctgtaatcatcactctccccttcactttttccaccacggaaacaccaaaatatttatgcgtcctgcatagcatgctattttatgtctcctatgatagaaatcgctcattttcatctaatataccttccccacttctttctaagtagtagaaactccaatttttatctggtgatgtggccatgtagaaataaagactacatatcccagcctcctctgcagtgaggtacggccattggatgcgcagcaagataaagtattaattacaacttctggaaagtgttctttaagataggggcacaaccttcttcacccctttctccttcctgctggttggaatgagggcacgatggctggagctcaagcagccatcttggatgaggaggtgaaggccatatgtgtaacatgacagagcactaaggtagattgaagctgggtccccgagactgtggtgtgccatgtcagctctgaatcccctgcctctagacttctatatgaaagagaaattaatactctcttgctgaagccatgttattttgagttttctgttaccaacaaccaaacctagtcctaacacaccaacttctatgtccttgaatgttttgatccttgtacttggaatgtcttttcctcactttgctcctaacaaactcccattgatccttcaaaaccttgctcggacatcaccttctcagttacatgttaattccttggtggaattaatgtttccctactccatgatttctctctaccttatatcacagtgtgcaattattgagcacttactatgtatcaggcaccatgctgggtgctccctcttttaatccttacaatgatatttaagataggttattcttttcaaaatctccactttatagataacaaaagcatagaccttggaaagttatgatacttttcatggatcacaaaagtagtgcatggtagggccgagtccaggagtctcattccaaagcctttagccctatgctgaatgacctcgattattgcccttatcagaaagtactgacaacattaggtcacacatccctccctcctaccacctctcaatgctcggaggccagccggtgtcaccttagtccccccagagcccagcacggagcctggcacacaccaggtgagcatgagtgctgtggaacgtgactatccgttctgagcccccaagtccttgtcttggtccttgtgcttggaatatcccttcctcactttgctcctaacaagctcctattgatccttcaaaacgctgctcaggcatcacctgagcctggcacataaagttcttcccagtaggtgtcacctcccacagccccacttgccccacacgtctctggcaggcttttgcagcactgtttggtacctctgcttagaacactctgcagaacgctccctcatacgttcacatccaggccagccatcacctctgaacaaactcctattgatccctcaaaggccttcacctcccaggcctaggcactgccttctcacccttccaaagcctttgctgaaatgtctgctgcgttccagatcccactgaggtatctcctccactggactttgagtcccttgagagcaaggaccatggataccttatatcaccgtgagcaactattgagcacttactgttgttaaaaaagtttaacctctagccgcctccttacatattttaagttgggcctaaaagtttttctgtacatcatgaactataacaagtggaggtatagacagactatagcctacactgtgccaatcaccgcattttggccaatcaaatgcagccaactgttcgaaccatgttcagataaaccagatgccaacctgtaaccaatccagctgtttctgtacctcatttctgttttctgtatgtcactttcctttttctgtccataaatcttccactatttagctgtggagtctccagacctactctggctcgggaggctgccctgctcgcaaatcattcactgctctgttaaactcctttacatttaatttggctgaagtttttcttttatcactatgtatccaccacattcagtgctccctttttcttaattttatttatttatttatttatttatttatttatttatttatttaatttatttttagagacagggtctcactctgtcacccaagctggagtgcagtggtgtgatctcggctcgctgcaacttctgccttctgggttcaagcgattctccagcctcagcctcctgagtagctgagactacaggagtgcaccaccatgcctggctaatttttgtatttttagtagagacagggtttcaccatgttggccaggctggccttgaactcctgacctcaagtgatcctccctcctcagcctcccaaagtgctgggattacaggcgtgagccactgcgcctggccagtgctccctttttcagtcctcatagtgacatttgaggtaggttattcttttcaaaatttccattttacagatttaaaaaaaagcgcccttggaaagttatgccacttttcctggatcacaatattaaaagatcacaattcatcttctaataatttggcaagccatccatggtcttctaagcaaggcgccatgaatataacgaatatagagacagaaaaagacccctccccactggctgggttgagggactggagagcccagatggaagggcagaggtgcaggcttttttccttgttgccactagatggcagtagggcacccgttgtcagccctggggcaaggtcaccgactgtctttgcctttgcctccagcaagccaaaaccctgggcagactcaatccaaaaataaacaatcaaagagcatgttggcctggtcctttgctaggtactgtagagcaggtgagagagtgagggggaaggactccaaattagaccagttcttagccatgaagcagagactctgaagccagactacctgggtcccaatcttgggcttggtatttcctcgctgtgtgactctgggtaagttacttaacttctctgtgcctcagttctctcaagtgtaaagtgacgcttgtaaaagtgtctcctgcaaaagaaagggctgctgggaggaggggtgtccctggtgtgcactaagtacaatatgagtttgtggcttttatattcctgcctctgaggcactcacagggtagaaatggggagaagccagtccagacaggtgcaccccaaagcaagagagatgagaaggctgcacccatgctggagccagagtggggaagagggcacatctgctgggaatgggtagagcggggtgggaggagtcctggcaggggagccgttcctatgcaatgggccttgaaggaaggggaggatgggtggatgtggggttaggtgactgtggaggcggggctggtctctgtccaggtgacaggtggatggtggagctggaggagccactcggagcctccaaggctggggagggtggaggggggaggcaggtcggtgtcccaggccacacctgttgactaagggattaggatgttgtgtccctgccagccctcctccaataagcccctctgggcctgcagggagaggaggagccttgccatgtaaactgtatttttagttccctgtgcctctccccggctgctataagacacctctccccacccccagccctggccgcttggctggaggctctgcgaggacagctggggagaaggggagctgtggtcagtatgatggatgctgaggggctggagaggagcagccctggtgggtgggttcctgggagtctggagcaagcttgggggttctgctgccccatcaagggccttgagcaggtcctgcaactcccaggcctcagccctgctctgagccctggcctggcgctggtccaggagggtagactctgccagggaggcacaagcta

SEQ ID NO: 9460 - DNA, 6000 bp, Homo sapiens
gagagcatttgaaaaccgcacattgcgtctcaatctccaggagtctcagatctgcctcttggccttccccagcgcaccaggcagggggccccaggtcagatgtggcacagctcaatgccatctccttctttctgccctcctctctcacaccctggactcacctccagcgagtgaccagcagtaagggtcaaactgctgagagtctgagaccggggcagaccctctcagagttgtctttccttctgaggctgggcctggcacagactggggcctcagtaatgggctttcaaatgaatgaatgaacaaaggaacaaacagatgactgactgactgaatgaatgaatgagatcccctttggcatccccatggcttctttttttctttttgagatggaggctcgctctgttgccaggctggagtacagcgatctcggctcactgcaacctctgcctcccgggttcaagtgattctcctgcctcagcctcccaagtagctgggactacaggttcgtgccaccatgcccagctaatttttgtatttttagtagagacagggcttgaacatgttagccaggatagtctcgatctcttgaccttgtgatccacccacctcagcctcccaaattgctgggattacaggcgtgagccaccacgcccggccccccatggcattttagctacttattttgttactgcttcttccactgctaaagagatgggcctttggaggtcggctggcctagcatttggggttgacttctggaatggtcactagggaaggggcgccagaggtgcagccggtgcctctgacccttttggtcgctaggagtcagccgactcagtacacaggactcactgaatggagacacaaggctcctccagggagtggcggctcatggcaatcctagaatggtcaccagccaggctttagagacccacacagagggcgttctgacccaaagttgcactggggaactccaagtttggggattctttgaatttaactctttttctagctacatttcctattatttgtccaattcttaccaaacatctctgttcacattctgaagctgggatctgactggcagagctagtagatgctgactattcagatggagccctgacattggctttctcagcttggctgtgactggcagcaggtttgcgggagaactgtgtgtcccagaacatgactggctacacctgcacctcagcaagattggggcagggcagttatcttcaaaaagctgtgtaggtggggcagtcattactgacaaatccagtgcagacccaggatggcccaaacactggcttatcctttctgaatctcatctcccacagctgtaaagcggggtggtgctcgctacctcacagaggtgttgtaaagattagatgtaatcttgccaagcagccactttgtaaactgtatagtcttatgcagatggaaggaagggcctgtgcctaccttgatcatagcactaaacaaactgtactgtattttcattcctcttagttatctccctaaaaagactctgagttccttgaacacaggaaggtgttttatttgattttgttatcctcagcatgtagcagtgtctgacacacagtaggtgctctatcactgtgagagggatggatggatgggtggagttacagatggatagaaggatagatggagggatgggtggatgatggatggatagatggatggaggggggatgatgaatggagggataatgagtggatgaatgagggaatgggtggatggatggatggagggatggaggaacagatagatagatggagggatgggtgggtgatggatggatagatggatggagggagggatgatgaatggagggataatgaatggatgaatgaggggatgggtggatggatgaatggagggatgatgggtggatgaatgaattgagggatggatggatgaacacatggatggatggatagatggatagatggaggaactggtggattttggatggatgggtggatggatagatgaatgaatgcctggatagacaaagagatgatggatagatgaatagatgaattaagggatgtcggatagatggagggattgatagatgttggatggatgggtggtggatggatagatgagtgaatgcatggatagacaaagagatgatggatggatgaattaagggatgacagatggatggatggatgagtaactggatggacaagtggataaatggatagatggttgaatacctgaatggattgaaggaggatgcatggatgtaagataaggctaatcatcctccactctctttctttgcaaaaccatccacccatttactcaataaacatttattcagttcaaacttggcacaaagcaccatgtgaggcccaagagatacgtgggttaataaaacagagctcctgccctcctgaaaactgcaaagaaaggggcgtggcttcctgagttcaaatcccaactctgccagcgactagttgtacatcagtgatgtttccctactttctctcaattaaatagggataatgtcagtacctatcacattgggaggtcttgcggggattaaatgagttaccaaatgccaagtgtttgggacagggcctggcacccagcaaagtctcttgtgagtgctggctgctattatcctaatggagaagatggcatgaaaaccaggaaataggatgccctttgggaagcaatgcaacaggaacttacacaaagaaaggaaaggaggaagcaattagtggtgtctcaaaggagtatgtcaagaaaaacttttcagagggaaacctttgagcagggtcatgaaaacaggagttctctaagagattgtggacttgcctgggaccacctggctataagcacaaaaccatccggttcctttctgtcacttctggctgggtgaggggtctctggcaaaggggcagaaggtgcgtgagaggttgcgaatggccaggactgtcctggggccagccggggcacctggtggccaagcttagaaacatgacaggtcctcttgggagggctgaccgcagggagcgttgggtttcaggctgctggcgtcggcttctgtggtgccctttctgtcggctatgagagtccagacagtgcccaacctcctccccttctttccacacgcacaaccaccccaccccctgtggcctgagctgtcctgcctcgccacaatggcacctgccctaaaatagcttcccatgtgagggctagagaaaggaaaagattagaccctccctggatgagagagagaaagtgaaggagggcaggggagggggacagcgagccattgagcgatctttgtcaagcatcccagaaggtataaaaacgcccttgggaccaggcagcctcaaaccccagctgttggggccaggacacccagtgagcccatacttgctctttttgtcttcttcagactgcgccatggggctcagcgacggggaatggcagttggtgctgaacgtctgggggaaggtggaggctgacatcccaggccatgggcaggaagtcctcatcaggtaaaaggaagagattccattgcccctgccacccacaccctaagatcaagggtgttcagctgcaaggtggaaagtttgcacgtggggtaggtcagttggctgcattagttaagggtgttagaacggtcacttgctttttctttgcttttaagtgtcagggattggactcaggagagggaaaggagccatttcaggctgatgtcagcagctggaggaagcatgagaatcaaacctaggatgctcagagtccaccaggaagaattttagaattatagacagtcagagttaacaagggtcctgagagattttgtacagccacctctcttacaggatgaggacaaaaagggactgagaaggggaggacatttccagagtcacagctcattaaatgctcttaaagtgtcaaggttaagacatgctcttcaaggggagacagatctggttctagacttggctctgccactgagccactgggtgacctttgggaaagtactcaacctctcggagcctcaatttcctctcctgtacagtgaggggatatcctaatatctatatcctagaggagatgtgagaattaaataaaataatgcatgcaagaggcctggcatggttcctggcatatactgagtcctagaaatgttagtagctattactgatgaagcccaggctagggacctttcaaagcattgcaattagagaacagaagatagaggctcattagtgaccttcgatgttgagtatgtctctagtttgagaggtctgaatgatgtggtctgcaagtatatcctgccttctaccacaagggattccagaatacaccaaagaaaacaaaattctgaggtttgtaaatagagggtggctgtggtttgtacatagaagctcatctcctcgttgccttctatcccaaaggtgatacactcttctcttggccccttccctcaccattctgagctggttccctcagaagtctaataggttaagaatcaacgtttctgccaacgggaggaaggaagtgggcgccggggttgccacaagtgaatggattgtctttggcactttaatttgcagattaatttctccttatttgtgagccagagccaattttcctcttccactccgtcgtcctttgggtctcccttgggctttacccatttccagcttccgtctacctcgggagcatggctggtcctggaagctccgttatctaaaatttgagccgttggtgatccgtgctagaaacacttgaggaagaagagttgagttttctgttgactgtaatggcatcgtagtgtgtttatgtctttcttctcctgtccctgtcatctggctgcaacaggccctgttggattgcacaaagtgctcccccgaccaacacacacacacaaattgacatcaactcctgggccacagatatgccatgtgaccttggacaagtctctccacctctgggccttatttctctgctggttgagcgaagggattgtcttccatggtctccgagatcccgtcccacgctcatgccctagaattctctgagtccttgatgcacttttgcctttggcgaggaggcaggacagtcaggcgtggaggtaggagaccagagtttgcagagcagaggtctttccaaggtgatttgggagctgccagacctaaggcagtgacttgtacgtcttgaaagagactcagggtgttgcatcatcagggaggatcacggaggtttgccgggggccgggagccagggataagacataatgcctagggttgctggtccctgaaaggtcccagaggcctggtgccctgtcacgtcttaggttgtgggacatgcagagactgtgccagctggttctgccctctcagtatttggggtacagggaggatggcctccctgggggcagggtggaggaggctcatgcccaggactgcaaatgccacccgtgagagttggcatcttgactttgttctagatactgactctggattttctaactgaccttgaaaggttatgtctccaatcttctgattgtaaaagagggcaaattccatgaagcccagtctgtaaaacactgaggccttcactgcacgtacacaaacataaaattctagaacacagaagctggaaggtcacttggagattctggctccaggagtggggcttcggaagggagggggctgctgagtgggctccacacccctgtttttcctttctttactcaaaccttttttgttttatttactttggctgttttggggagcggggggaacaaaggatttcaaggtcataaaatgtttgaaaatcaccagtggtggtcactacttctcattacagggaggaactgggcctgagagtctccaccggttaatggcagccacaggcaggaccaaaaattcctgggtgatggtgatgataatgataatgataatgataatggtagagatgatgaggaggaga

SEQ ID NO: 9461 - DNA, 6000 bp, Homo sapiens
tgctatgtgtcataaacaaccaacattccttgtaaatcgtttgattttgtaatgatctctcattagatatttaactacactattttaagtcttttgtcattagagttttactctgatgctttcctgaaatctcttgcaatcagctacagggcaaagtgcttcatcttcaacaaaaagggaccaatgaaaaggcccatgacaggtaccatggggtaggcttctgacagcatttctttatttctttttttgagatggagtctcactgtgttgcccaggctggagtgcagtggcgtgatcttggctcactgcaacctccatgtcccgggttcaagcgattctcccacttcagcctcccgagtagttgggattacaggcgtctgctaccacaactggctaatttttgtattttttggtagagacagggtttcaccatgttggccaagctggtctcgaactcctgacttcaagtgatatagccacgttggcctcccaaagtgttgggattacaggcctgagccactgcacctgggcgtgacagcatttcttaactttgagatcacatgactgcactgagccaggatctccactggttgagaaaagatgggttcatgtacctgctagcccaagatcaagcagaacaagaattcagtacctgcatgcaactgagtaaactgctgaaggatgattacagtctttttatgacttttgttcagaatattgttggctctttatgttttattttctgaatattaaaaaaagaaacctttccccggctgggcacggtggctcacgcctgtaatcccagtactttgggaggccgaggcgggtggatcacgaggtctggagagcgagaccatccttgctaacacagtgaaaccccatctctactaaaaacacaaaaaattagccgggcgtggtggcaggcacctgtagtcccagctactcgggaggctgaggcaggagaatggtgtaaacccaggaggcggagcttgcagtgagctgagatcacgccactgcactccagcctggggaacagagtgagactctgcctcaaaaaagaaaaaaagaaagaaacctttcccttttctcttaacctatcaatgactcgtaatattatagtaaatgatacttctctaaacaaaattgaagcaattatcttt[450 bp omitted]aaaggctttaaaaagctcaatctaagattccctattaaaagtttcagcaaacttaaaaaggcctgtgtggtcaattactgttcgtgctgcatttatgtaaataatcaggccaaatttaatgagaccagaattatttggtaaataagaataatctcactttgattatcttcaatcaaaagggaagggtttgtaaagagaaatgctatgcttcagtggagaaatataacacccccttgggagttatcagatcctagtctagttcactgtcttttgtaggtgttttgttttgttttgttttgtttttgagacgcagtcttgctgtgtcgcccaggctggagtgcagtggtgtgatctcggctcattgcaagctccacctcccgggttcacaccattctcctgcctcagcctcccaagtagctgggactacaggtgcccgccaccacgcctggctaattttgtatttttagtagagatggggtttcaccgtgttagccaggatggtctcgatctcctgacctcgtgatccacccgcctcggcctcccaaagtgctgggattacaggcgtgagccaccgctcccggcctaattcttttttgagatggagtttcgctcttgttgcccaggctggagtgcagtggtgcgatctcggcttactgcagccccccacctcccagttcaagcgattatcccgcctcagcctcctgagtgcaccaccacgcccggctaatgttttgtatttttagtagagacagggttttgccatgttagccaggctggtctcgaacttctggactcgggtgatttgcccacctcggcctcccgaagtgcttgggattacaggcatgagccaccgggcccggcctatccttgaggttttatgatctgcctgtcacttggactgtcactgccttcctacacgtcagcccttaccaaatcctcccatctactttccttcagtatctggctacctaccactctcttcagactgacatttctaatttgtctcctccctgacttggtgtcaccaagaactcaaatccctattgggactcaggtggtcttgtagctgccctttgcccccaggatctgaaaaaaacagccctgcagactgaagccggaaaacttgatataaacttgaaagaactcagaaccacaacagattctccaggggcagcctttgtgcctggagctgctgctacacaggccgcccaggaagaccccccctccagctcctgcatgccacatgctctctccagaaagtaaccacaactgggataccaatgcctatgccatcatcacagacttcacaccacacaccaggaagtccctgagtgcccctgctggccttgttagggcccaacggccagaaacctcaactgctgccctgtaggctcaaaaactgggtttatcaacagctccattcatctttgtttttatttctttctttctttttatttttttattttattattattttttttttttaaagataggggctctctgttgctcaggctggagtatagaggcaagatcatggctcatggcagcctccgcctcccaggctcaaacgatcttttcacctcagcctcccaagtagctggaactataggcccatgccaccacgccgggctaatttttaaattttttgtagagatggggtctttatgttgcccaggcttgtttcaaactcctggcctcaagtgatcctcctcggcctccaaaagtgctgggattacagacatgagccactgtgcctggcctgttatttttgtttcctcattaaatgcttgactgcttgcatcatccagcaaaaatcctttgctaccaagtctcaacagatggtcccgctggtagtttatgaacacaacacagaacagaaaatggacggggactgttgagaggaaagaagcaggtctctgctcttcttgcacagggggagtgctgacaaagaccctccctccccacactccagccaggctccttagagtccccttctccactgggcctcaccctggcctatctaggctggaacgaacactaacatagctcctaacagctcaaggccacattcccagaacgatcctagccccctctaaagtgcctgcctgagaagttcaaggctgccacaagaatttcctgtgtgttccagccaacacctgaggatggggcccctgtctcccagtctctgtgggaggttgggggcctgacttcggtaagccccagtggcaaacccagatcagttggtttcacaggggccaaccctcccttcccagttttggtgattttctgtttccctaactctactgagtccccaccccttcccactccctcactctccctttaaactccaggcacatctagacaaatcagcatggagccagctttttctcatgttgtcagtagttaccaagtaaaatctgttttttctgcattaactagtgtctcactgggctctgcagggcagctcctacggtccctcaggcttggagggtcactttaaacaataaaaagcaacaggacacaaaaatccctggctggaaaaatccaaaaagcaggtctgttagcagggcaggcccggagtgacttcccctttctctaacattcccacgtggtcctgcacaccacacatccccccgaccctggggagtcctgggccccttcctggtggagcagcctctctcttgcagggaaaggccctggggtaccccaaggcctccaacagggagcctgttggagaagtcaccaaggccctctgagtctggggctccacagaccctcccccaggcctcctgcaactctccagctctgagagtctgatcccagcccaaggaccaagtgggaccctcccctgtgactctaccacaccctcaccaggtcaagccctactccagggagaggcttatcctcctggtctggacccccaacccagtcttgaagcgggatctctcaccgctatctggagcccctcatcacagcacagatcttcaacctcagctttccacaaggagtctggggaccccaccccggtccaaagatccccacccaaggtccgaattccccagttcccatccagattccccaccccaagtccggagactcccacccaacgtcagatcacttcacagcggtccgaattccccacaccctatcccagtgttccaccctaggtctgaaggcccccgccccgaatccggccgcattcggccccggtctagccagcgctctcacctctcccgcgacggcccgcccgggactggacccgccccggtccggcgcaggcagcgcggcgggcagccctagctgccccagaagccccacgacgatggcggcaatggcggtggcgctgcggggattaggagggcgcttccggtggcggacgcaggccgtggcgggcggggtgcggggcgcggcgcggggcgcagcaggtaggatggggtcggggcgtccccgcggtaggtgtccgcgcggccggggtgtcctcgtgagggtgtccgcgcggcggtggccagggtgtccccgtgggggtgcccacgcgggggtgtccacataccggcctcttggtctagtcttgctcaggagtccgggctgcttctagccacaagtagcccccttcccaggtggggaaactggggctgggtgccttgtctaaggtcctgctgtgctgactgcacctgtggtctcccagagctggtatcccagtaacaactacagttctgaagatgatgatatcccacctcccgaggtcaccaggcaccggccccactggccagacttcccaacttctccccagacccctagactctagaggttagaggctgcacagagcaatgggaggatacacactcgtcctcctggagcccctgaagaacagttaactaaatcaggacaataatcataactgagcactcgaagcagaggctgggtgtctggtcactcaggacagttcaagcctcatcctgtaggacagactcccctagatccgaccagagcgccaccatatctgttatgtgtggccagtttcattccatgcacgacaacatggtcccccaccatgcagggggcccctcgacccagccccctggatgcttgtgacagcgagcagctctccccacaggcagtgagtgtagaggggtgtaaggacggggtcagggctccttcccagggatggcggctatgggaggcatggtggctggccctctgcccgcggtggactcgggagggagggctgactgtgtgtgtgaatgggcagagttggtgctatggaggttttgggggtctccaggacggagggtggcccaacagagttctgggaggcagtcaccacctcgtggccttgctgagacctggaaccctcagccagggcactccatctttcaaagcttcttggctg

SEQ ID NO: 9462 - DNA, 6000 bp, Homo sapiens
ctgaggagccacgtgatggtgcgagtgggtggtggctgggacacgctggagcattacctggacaagcacgacccgtgccgctgctcctccactggtcagtgccagggtggggctggggctggacgggcaggggacttgcttctgtggctctgtccctcacatgctgcctgtcctctctccccgcagctcatcgcccaccccagccgagggtctgcaccttttctccacagagggtgtcgcccaccaccagtccccgccctgctagcccagtccctgggagtgagcgccggggctcccggcctgagatgactcccgttagcttacgaagcacaaaggaggggcccgagaccccacccaggtgagatgcaggaggacgaggagtgaggggtccagagggtgggggggcgtcagccctggcctgcatgatgggttgcctgtgcgccagagtgactcacaccctgggaaaagttcccgtgggtgggggcgggcctggcttcccatctccatggcaacccaaccaaaccaacaacacagctggggcgggccctgtggctgggcggcagccagtccagctcttgcttcctctggcccgtcctgggaaggggggtgtctagagcccaggaaacttcttcttccgtggcttttggggccctgggccgctggaggaagctgctcacttctccctggaagtccccaggacagaccgatgcccctgacagccccgtccaccagccacataccctgctgttcctctccctgcctgttctgcatgccagtccttccgtggtaccccatctgtctctattgtccccctgccccaggccccgggatcagctgcccccccatccccgctcccgccgctactccggggacagtgactcctcagcctcctccgcccagagcggcccccttggtacccgcagtgatgacacaggcactggcccccggagggagcgacccagccggcggctgaccacaggcaccccggcctctccgagacggcctcctgcctgcgcagccagtcccgagaccggctggatcgcggccggccccggggggccccaggaggcaggggagcccagctgtcggtccccagccctgcccggcgggcccggagccagagccgcgaggagcaggctgtgctgcttgtgcgcagggatcgagacgggcagcactcatgggtgccaaggggcaggggcagtgggggctcgggcaggagcaccccccagactccccgtgcccgcagccctgcagcaccccggctttcccgggtctccagccccagtccagagttgggcaccacaccggccagcatcttccgcacacccctgcagctcgacccgcagcaggagcagcagctgttccggcgcctggaagaggagttcctggccaatgcccgggcccttgaggctgttgctagcgtgacccccactggaccagcccctgacccagctcgggcccccgaccctccagctcctgactctgcctattgttcctccagttcctcctcttcgtccctcagcgtcctgggtggcaaatgtggccaacctggggactctggccggacggccaatgggctgcctgggccccgaagccaagccctttccagctcctccgatgaaggcagcccctgccctggcatgggggggccactagatgcacctgggagccccctggcttgcactgaaccctcgaggacctgggcacggggtcggatggacacacagccagaccgtaaaccctcacgtatccccacgcctcggggcccccgccgcccctccggacccgcagagctggggacatggcatgccctgcactcagtcaccccgagggctgagccagattcctggatgtgatggaccagctcagctgtccccagaccccatcccttctccttttcctttgtggccttaacccttctgcatcagggagccccctctgcctcttgagtaccagacctcatgggaccagaccccttgggaccacatggcacaatgggacctctgttgtacattccggttgggggatgagcgttgctatttaattactaatattattgaatgccttagaggaggccgggcgagcccggtgttctgaagacctgtggcccagcagagcctctgacagtaaagttttgctccagccacctgtctgtttcttggggactccaccttggggccattcagaccctttcgaggaccctggagttaactgcctggaggccaagcctggcaactctgacctctaggcttaaggcgttatcccgcccagcccagaaatcccaggcgcactcaaattattttcccttttattatcccgtggtaggtgtggcataaagaatatgtccagtgaagctccaggagcaggctgcgtgtttccagtcaagttcatagccaagtcctttccatccaatgggattgtgacccattgaggtcccagaaaggactggtcatctccaatggagcttgggacctggttgggtccaatgaggttcaaaagggggccagtcgcttaggagactgggttggagctttcctcatccaatcagggcggagacttccctgtccagtcccagtgaagttgggcgatcccgtccaatccaggtccctgattgtcccagtcacaaggtggggcccatggatggcactgtccgatcgggtcacatgaggctgcagcgcgcgggatgcagcgccccctgcaggcgcagggccgggtgtgcagggcgcgcgcgcaccagagcgcagcgcagcagctcgcggaagagacgcagcacgtgccagttgtacttggcggagcactcgaggtagccgcagcgccagcccctgcgcactagggcggccagcgcgcgccgcggtccgaagcgcagccgctgcctgtcccgcttgttgcctaccacgaggatgggcgcttcgggcgcgcccgccggcctgggggccgaatggagatgagagacgcggggaccccacggccggagaattcccccagtgggtatacacacgcaggcgcattcccttcctacggccagagacaccgccccccccgccgccccaacgaaaccccaggcccatgtgggccaaagagcacatacagcttaagaccttcccacgggcgaaggcctaagacccggcccacgacgttgggagaccctacacactctcctcaggcaaaggccctgccagacctgtcctagctccccaccgccagaactgccgggcccctacctggtctccgcgatgcgctgccgcagggccttcacgtagtcgaaactgtccgggctgcagatgtcgtagacgagcacgaaggcgtccgtgtcctgcaagctccagtccttagcgtctggccactcctggggacaggaggccagggtttgcggaagcctcctttccactcttccgctctcgaaccctctgcaggggcctggacgctaatcctcaggccaacatcacccccatacagacctctgtgcccctcccccaagctttccgggccgtctcctcatgaccaccagggtaaaattttccaaatcgtgcctggagcctgtcagccagcctccttcatccttggtctcccctctgtttaccccgaatcttcctcttttcagctttccccaactcggctcaggccgctctcctccctagatgctctcggtgcttaccacggcctctaagactaattccaaagcccttggcccgagtcccgtggtccaccacgcccccagattgtcagctgtaaccgtttatgaccgtagcgtaagcacctgctggtctttccacctggtatgtttttgccacttcctttactcagaacttcactcggtcttccaggttcagctcaaatgccactccctccaggaagccctgcttaatcctgcctgctctttcctcttcactgctctagggtcggaggtctgtcctttactttgcacaaattactaaacgagtcttcgctccaggggacaaaaatgatagggcagagaatgaacccctccaccagcccccgtagaaagtacacccctgctcctgaccccagtctctcccattgtagctctgctcaaggccccaaacacaaaacgccacactctcgggaaggcaccgttatgcaccaccaagagctgctccacacccccagccgaggcaggcaaaggtggaggcgctcacaggagcaagggaacgcccctgggcaaaatcgcccggcctccagcctgggcttgggcgtctccaggtcggcgggaagggctgaaacgcaagtatcccaggacgcacacacatccctccatcccggagcacagccaggcgcccgaggcctccacgcggacacgcacgtgtgcaccgagcacgcacacccctcacactgtcacacgcccctgcccgctcctcgagccgctacctccggacccccggggctcgagccggggccagcgacgtcgccgtcgcggatgctcaagtcgtagacggcgccgtcgagcagcaccgcgggtcggtagaggcgcggcccgtccgtgggccggtggcgctcggggtagtcaccgaacaggaactggcggatgatggccgtcttgcccacgcccggggcgcctagaacggccacccgcaggctaccccccatggccggccggcgctgtcgctccccgcgctggaaagcctcatgggccggcgccgcaccgtgcgcccccaggccgtgcgccccgcgcgccctgcccggtgcgccacggccccgtcgcgcttctcgtcgcccctcggagcaccgagaccggagagggcaggcccgaggcaggagctggcggcgggagggcagacagacagccgagtgggcagacaggtggcgggcgcgcgagcggctcgggcgggtgccgaagctcgagagagagcagagccggagcggcgctcagacaccgcctccgccccgcagcgccaacccaggcgccggcggacgcgcgaggcgccgaagtccgcccctctcgcggcgcgggtcccgcagcggtgcggggcgcggggggcagcgctgcctcccggagcctctgtgcctctatccttctctcgcttccgcgcctggagtcgccgccccagccgccggcgcgagcgagcggggcctcccggaggcggcgatgaggtaaccgcccgcccctcccaccttcccccaccgcccaggacgcccctcccaggaagggtcgcaggaaggtgactgggggacagagatcccggagagggcctaccccttccttacctcctccgcgtgtcccgctcctctcacccgctccaaaatagaagccccttcccacccactgccgcggccgctcttccaaacactgctcgcccccacgctggctcccgacaagccccggcccccggagtcaggccgcccggggtccgaattggggggggcggctgtgtgaccttgggcgaatcgccgcactgcgctgggtctgcgctccgcatccatcacaggcagactcctcaagaggctccaaccttttcttgagagcctactatgtgccaggcccattacctacgtgattctcgaacctacagcctcagcctggcatcgctggttgagagaagaggaaacaggcccgagaggggaatctgcaaggttagaagggcagtgggggggcccttgaagtctcctttgaagtccctcctaccttcctcctgcccacgggggtaaatggcccacactagacaatattcaaacagccgtcctcgaggggaagtggggacagagggtgccgagaccacagcagcttagccccagatccctgtcccagcaaggctggaggtgactaaataaagatccagaaattggcccactccacctccatcactactaaggtcacctttcctgcgtgagttgcaacccgtagcgcccctcaaagggatgcaacctccaaaacaggcgcccagagcccaagttccccctccctcgagctagtggagaagctcctgccccatcacagcttggaaagcctgggttagcccagcccccccatcctccgcctctgct

SEQ ID NO: 9463 - DNA, 6000 bp, Homo sapiens; identical to SEQ ID NO: 2193

SEQ ID NO: 9464 - DNA, 6000 bp, Homo sapiens
gaaaggccctggcgcctccagcagctcccttgaggttcaggtgactggagcatccactgggtgccagcagtgctgctgggaggagcagggcacagacaggggccaaagctttctgaggattctccatctatagctggaaaagtcattcctctcactgcctcccctcctcgtagcgagaaccctctgcccacagtggagattgccatccggaacacgggcgatgcggaccagtggtgcccactgctggagactctgacagacgctgagatggagaagaagatccgcgaccaggacaggaacacgaggtacccctggccctgtggtcctgggctctgcccacaggcacctggctttccaggcagaggcagggccattgcctttcccagtctcccatggtctctgagacagagtacctctagtgctgctagaggcaggcaggcttctgggtgataaggccccatccaaacgccagggtatgtttccctgcatggaacaaacataattcctcaggctgagggtctgaccacagcccagatccaggttttggggtccctggagtgatgagcagggcctgagtggcagacaggcgaggctgagagaaggctgggtctgaccctgctgggggcccacatcctgcctctgttcccacccctacacttggctgccctgtagagccttgggaagggcagcgcccaggctgggagctggccccgactcattgccctccccactcctcttccaggcggatgaggcgtcttgccaacacggccccggcctggtaaccagcccatcagcacacggctcccacggagcatctcagaagattgggccgcctctcctccatcttctggcaaggacagaggcgaggggacagcccagcgccatcctgaggatcgggtgggggtggagtgggggcttccaggtggcccttcccggcacacattccatttgttgagccccagtcctgccccccaccccaccctccctacccctccccagtctctggggtcaggaagaaaccttattttaggttgtgttttgtttttgtataggagccccaggcagggctagtaacagtttttaaataaaaggcaacaggtcatgttcaatttcttcaacaggtcatgttcaatttcttcaaagttttaacataaaaataatgagagccaggagtggggccggggcctggggggacgaaggtggtatgtgaacaaggttggcacacaggcctcaccctcctctgcctcagattcccaagtgggcaggtgggggtgaatggggctccgggtagcacctcagctcctctcagctcccctcagcctgttctccttccagacccagagagctgagaagagtagctgtgaggctcagggcaagaggctctctgcctttcaggaacagccctaaccctgctccccttgcttggcctcaggaaggtgccgcgagctctcctgccgtccctgggccgccctggctctgctgtgtccagatggtcaggctactgccagctggggccttgctgctctgaagtcccctgcggagggcccagtcctgtgtgggcactgctgggctgtcgccagcctgggtgcaggagggctgttctagctccagtggcacccatagccaggtcagctggggccctttcccaccccagcaggtgctgtggcctgggccagctcctgccttacaagccagctgtgaggaatatgggaatagccctcccggcctggtgccagctcttggagttgacacggtacagggaggagacacagcccagggtcccttcccagccctgcctccaaggagttcatgtcccctctgttctcatctgtaatagggaggtgtccccattcttcagaatggacacaggatctgggagggcagcaaactggctcgcagctccagccttactgaagagaatgggcacagatccgggcacagatcccagcacagactgctgccaccctcagctgttggcaggtcccatgctgccagggcagggctagggtcagaggctgctgtgctccctggaagtggggtagggccccatgtggggcagaggcagagctctgattagggattggggttcttggtcgctgagatgtgagaggagggctcctttgagcacatgttagcatgggactcttcccagggagtttgcactcagggcctctgccctccatcaaagagtggaactccccagagccccatgcacagcaaggggacagctgggccttactggaaggccttgaacaaaggggaagattcccagcccagctgctcttagacatgaacaggtttcattgctgaggtgtttgttctgtccatgaggtaggaacctcggcaatgaaagggtgaggcagccctgtgtctccacaactggggggatggaaggaaccttggctgcctcaccccacaggtcgggcagggccacctggctgggaggtgccgggaaggctgggccctcactcctgaccgccagctcacaccgccgcaaagccatctccacaaggtctggctacaacacggagggcagactcaacagagaacagtgttgttaccatgaaaatgacaacctgtctttggaggaggccccgtgccactgagcatccagaaataaaccacaacatggacaggcttagaacaacaaggaaagctgccaggtcagaagagaaaaatgagccacaggggtcggataaggctcacacacgtcctcagctaaaaagggcaggaacagaaccttccagaagtccctgcctcacccagtctcagaactctgctaaggtgaaaacttaggctctgaggtcatagaaagggcagaagacctagtcctggccctcttctgcacctgaatccatggggctttggcatcaccagatgaaaaatgaggcatacgcccacctgtcagggtggctgatgagagacaggagaggctagattggcatcagcctgaaggcaccactggcaggaacatctgtaggctggtttggcacaacctaggagacgcctgtcctggccccagcagccgaaatctggtgaacttccccgctgactggcaggtagcagaggcctatggtgggcaggacttgcccaaggccctggtggggccaggatgagaaccctgagcctgtcacctgtgagctcaaaagctctgcctggcaacctgtgagctcaaagctctgccaggcaaccatgggcagtttctttgccctctgtgggcacccctatcctaccacctgcagttgggctgagaggccacactgagtgaggacggggcaggcatagaaggatgtggccaggtgagatggggaagccagtgctgtgggccaagagactgcagctcattctgtttattcaggtgggcccttgcatgggcccagcctttaggatgggttttttctgccccaagtaggggtcatgggtaggatggaagctgccagaagcctcttaggcctggccctgggtgggggtcactgctgcgggggtggcagatggggtcctggctgttcctcagggaggggcaggtaattggggtcttctgcaggggcatccaggagcagctttctgtggggaggggcccgtgttgagcacaggccagcacaggtccccatcggtggggatccttctgagggtggggagagggagggagggctctcaacactcacaggaagccaggggtctgcaggagcctcttgcctccaggctggttggggaagacgtcctccaggaagtagtagatatggcccaccgcaatccctgtgagacagccacggactgtggggtcaccctccacagcccagagtcctagaccagcagagcctgccccaggcccccatccacagcctggtggccctgcaggccccacagcatgagtgccccaaagccttgcacagagtgccagccccgggttggccgtgaaggacaagcttaaaaggcccagaagcaggcaggacccagggaggggagggcctgagaatagtggaggagtgggagccatggggcaggaaccctgaccctcccatcctcactcccatcaggaccgtgcaagcatcagtagatccgtcctgacgatgcaaattatgtgggccggctggcttgaggggctgtaagagcacagcagctgggagggcaggaagatggggatggagccaggtgtgaggagaactccagcaaggatgggagaggggccccagggcataagcagcgtgtcctgaggggagtggccagcctggggcggactagatgtaccgggaggctcacccagcaggtccacgaggatggagttgcccagcagcagcgagaagcccatgagcgcccaaggcaggaacggtgcctggaaagtgagcaggccgaagaagttgaccctcacccgagggctgcggcggctccacacgtacaccagcatggccatgagggcctggcccaggaagaacaggctgcccaggagtcccagcagctgggccagagtcaaggtgctccggtgcaggcctcagcccaagcccagggcccctctgacttcccaagaccctggaattcttcccctcatctcccctatgtgctattccctcatcaagatgagccagtccaataaaggcgacacactccacgggcttcaggtcccacgaaatctgccctgcacacctacagcctcatcccagggcccaaccactgcctgtccctgccccagtttctcccggctactcgcattcagggctcagctagtggccctgacaacccacctggctcttttgtgcatggctttgtattttgcatacagcactgaagatctagccctgacccctgcagctgagcacagagtgggccctcaacacatactaagctggagacagcgactgtgtccctctctggcatggctgtgttggccccaggaccaacacaggctggacgccgaggcgccctagcccgaggttccagagcctgcgggaaggatacggtcataaggacgcccccgaagagaaacatgaagacgaagtcggccgtgcggccgcggaaggagccctcttccagcatgcggcagtagcggaacctacggcgtcggtataggaagtgccaccaggcggggcctcagtttccccgtcccggcctctctcccagcccggccggcctgccctccacccagcccgtgtccgcagggcgcaggatacacgaagagcatgttgaagaagaagctgaatcccaggggcccgaagaagaggaagttggtgacgagcctccagacctacgggggacgggcggtcaggtgcggggtgggtgggtcgggcccacaggtgcgcggcgcggggcggcctcacctggaacttccggaacacaaggtgcgggttgaagtagagttgaaaggggctgaggagctccagctgctgtggaaccaggggccagtcaagagctgcccgggagccacgccgtaaccatggcgaccctcacccctcccgccagaggctgtaaccaaggcgacgtccggtccgcccggccgcttaccaccgcggcggtggtgaggacacaggctgcggtgtaagcccgcgtcaccgccggcacctgcaggaactcggccgctagtccctgccacgccattgaaccttctcaagcacgcgtggcccagccagcaacgcgctctttaacccgcctcccagccccgccttcggccaatccgcatccgaggcgctgcgcgccccaggctgaaaagagagcccctgagcccgacagccaatggaaggaagaagagggaaattaggggcggaaagggagagtgggcgggtagaggctggtggccaatgggcaggcgccaaggttgagcacgtggcggttgttgtggctgcggtggtggcgcgggagaacgtgtggccaatgaggaactggtcatttcgcggctttctaggagaggaccagtagcgtggacccacgacaccacgggggcggggctaagatcgtatgggttacaggagcgaagacccgagcaggcgaggcaaaactggaaagggcggg

SEQ ID NO: 9465 - DNA, 6000 bp, Homo sapiens
cgaggtacagtgcaagcccgcaagtccactttacagaggtcgcagagggataatgtcctaccttccaggtttggcttctgggcctcctcagagcctgagtgttcctgtttctgctgctgcctcgctgtgtgaatggcctgaagtacatccagtcgccgctcctcaccaaaggctgcagagcccaccactagctcctcagcctccgataagcagcccagaggcagcagcacccgctgcacgtgaaattctgccaaggctccatattctggaaggttttgattggctgggtcttggagccaggcacccaccacatccagcacagctccaggctcttgcattttgctgtataaaagaatgctgcagtccccaaaaaacccaatcccaacaaaagaagagtcagtgctcaatgattggttcatttcccatgaccactatgcttctcctatccagcccctcctcactgtgtcctcgagccctttccgatgaaatgatgatgctcatgggaattccccacgacacacccatcactaacagcataatcaatgggaaaagctgaaagcctttcctctaagatcaggagcaagacaaagatgcctactttgaccgtttttattcaacatagtactggaggtcatagccagagcaatcgggcaacagaaagaaataaaaggtatccaaattggaaaggaggaagtcaagttatccctgtttgcagacagaactaataaacggattcagtaaagttgtgggatacaaaaatcaatgtacaaaaaacagcgtttctatacgtgacagtgaaccattggaaaagagatcaagaaaacaattcgatttacaatagctaccaaaaaaataagatacctaggaataaattaaaccaagctggcaaaagatctctacactgaaaactataaaacattgatgaaagaagttgaaggggacacacaaaaaatggaaagatatcccgtgttcattcacaaattggaagaatattattaaaatacccaaagcaatttacagatttaatgcaatccctatcaaaacaccaatggcattcttcagaaacagaaaaaacaatcctgaaattcgtatggaaccacaaaagaccccaaatggctaaagcagttgtgagcaaaaagaacaaagctggaggtatcatattacctgacttcaaaccatactacacaaagctataacagtaaccataacagcatgttatggcataaaaacagacaaaatagaacagaacagagagcccagaaataaattcatgcacctacagccaactgattttcaacaaaggtgccaagaacacacacaggggaaaagacagtctctttaataaatggtgctgggaaaatcggatatccatatgcaggagaccagacccctacctttccccacatacaaaaattaactcaaaatggattcaagacttaaatgtaaaatccaaaaccatgaaactactagaagaaagcacaggagaaatgcctcacaacactgggctgagcaagtgtttttttcagtaagaccttaaaagcactggtaacaaaagcaaaaatggacaaatgaaatgacatcaaactaaaaacttctgcacagcaaaggaagcaattaagagtgaagaaacaacctacagaatgggagaaaatatttgcaaactatccatctgacaaagcgttaatatccagaatatatcaggaacttaacagcagaaaaaaaaaaaaaaaacctgattcaaaagggaaaaagacctcaacagacatttctcagaagacgacgtaccatggccaacaggtatatgaaaaaatgctcaacactactaatcatcagggaaatgccaatcaaaaccacaatgagacactacctcgctccagttagaacagctcttatcaaaaagacaaaagaaaacgagtgttggtgcgggtgaggatgtggagaaaggcagcacttacacactgttggtgggactgtaaattagtacagccattatggaaaacagaatgcaggttcctttaaaaaattcaaaataggaaagacggcacttcctttttgtaagtggtggcaagtgctgagagaatgccatgaaggcctggggcacactgagagagtatttgctgcctgcccacccccaaatgccacatgctgcccctctactgccagcaaatctctgcacctaagcaagttgtgccaagtcccgcttctggtactgccaccggccgacagtcaagcagttccacaattccaagatcaagttcctgctgccctaccaggtcctgtgtcttcagcacaagccacactccaacatcaagagtcccaacaccttcttctaggtacagggaactgtcaccgggtgtcatcaaaataaacttaagaatggccaggtgaaaaaaataaaaatagaactaccacatgatctagcaatccattatctcccctgtttaatgcagcactattcacaacagccaagatatggaatcaacctaagtgtccaacaacagatgaatggataatgtgtgtgtgtgtgtgtgtgtgtgtgtgtgtgtgtatatgtgtacatatatgtatattatgtgtatatatgtgtttatatatgtgtatatatatacacacacgcatatatatatatatatatatatataatggaatactatatagccataaaaaagaatgaaatcttgtcattcatgacaacacaggtggacctgggggacatcatgttaagtgaaataagccaggcacagaaagataaatactacatgatttcactcatgtgaatctttaaaaaaaaaaaaaagttgatatcatagaagcagacggtagaacggtggttaccagagactgggaaaggaaggaagaaaaggaagacgggaagaggttcgtcaatgggtacaaagttacggtgggataggaggaataagttgtggtgttctattgcacggtagggtggttatggttaacagtaaggtattgtatatataaaatagccggaagagaggcttttgaatgttcctgtcacaaacaaatgataaatgcatgaggtgatggatatgctaactaccctgatttgatcattatacaacatatacacagcatatattgaaatgtctaatttaccccataaatatgtacaagtgtcaattttaaaaactttgttattttttggccaggggcgatggctcacatctgtaatcccagcactttgggatgccgaggcaggtggatcacgaggtcaggagattgagaccatcctggctaacacggtaaaaccctgtctctacttaaaacacaaaaaaattagccgggcgtggtggcaggcgcctgtagtcccagctactcgggaggctgaggcaggagaatggtgtgaacccgggaggtggagcttgcagtgagcagagactgtgccactgcactccaacctgggcgacagggcgagactccgtctcaaaaaacaaaacaaaacaaaacaaaacaaaatttttttttaagaattaggaattcctaggacgtagcaagctgctctttcagctctgtccactctgtcatcccacgtcgctcctattccctgtttcctcccttctttatatctattctactcctaaattcctcccccttattctttattgctatgtatggaagtctggggaaaaaaaagtgaagggaaagaatccgatctggagggcaatagtagggaaggggaaaagagtaggtatttaggagaggagatgaaaatcctctcgtttctgaaccgatctgatgagtcagcaaagaagacttaccacagctccaggactttggggggtagcttttcagggacctggtaatactgaaggacccaggagaggacttcttgccaccgatccatttctgccagggcctggatccccacaacacacagggagcacttcacctccaatgagctgtcagcagaaaaaccaatttcagttagaagtggttcccctccatttccattcccacctccaccttgggactgttcctctccagctcccaactcagcagccatcatctctctcatccctgttagtatttagatgggcttcacaattggtctcatgggctgccctttcccccaggaactaaaagttcctgtaaccctctttcaagaggcaagtcagctgttgctcaacgttcatctttgtatccaggtgaaatcagatttaaatgaagaggaagggtaatcctgagggggaaataacacacagcaccggtgtgtggctgaaaagagagctggaactaagagtttgctctgtgaacaaatgggcttggagcaaggtttctggctgagtggaggtatagactccatagctggctaaaaggcaccacctagtaaggttcctccagacacccagaagcaaagccttctgcattcactgaaatgagctcccacccagtcccctaaaacacagccagggctctccagatcatccttctttgtggtcaactttagctattctacctaccacctccctagcgtggcctaacccaagtttacaatgcaaagaaatgactccctcacctgccagacgaggctggtggcattagaaagagcaatgcaagcccaaggtttttttctccggattcttttctttttcttctttttggtagagaagagggctcattatgttacccaggctggtctcgaactcctgggctcaagcaatcctcctgcctcggcctcccaaagtgctgggattacaggcgtaagccccagctcccggccctgaattaattctttaatccagtcctctaattggaccagaacgctgctcctgccatgacccccattccccatcatcagccaaggtcaggaataaacaaccttgggcggggcggggagggcggaggtacctgggagaggacttttaccacctgcttactgacagaacttagcacttaatacacattcagccttcccatcatgtcattgtaccttggaacaaggagcaaataattggctgtgggatccccactaagtttttgttacacgacttcccttctctgtagaatgggcacacgatgagcgaccaccctctcggagacaaaccactgatgaaagcgaggtgtaaagctccttgtgggcaatctgggaaggacagaactcctgagaccttgagccccaccacaagagcgcccggaaatcggttcatttccgagcccagcacgtacgtgcccgcgggttcctctgccacggcgtggttggccagactctgccaggcccgctcgcaggtctccagcgccgcccggaagtccaggtgcaccaccaggaggtcggccgcctcctccagaaggtccacggccggcgcccgggccgggaccgcgcgcaccggctcgctgctgcgcaggggtcccccgagccccctgaggggggctgcagaggtcgaagaatcgctcttcataacgagtccgggtccaaggcccaggtcctcagacgtcggagtgaccgcctccccagaggctccgggatatcccgagttggcctgggcgaagagggagagtcctcatctctttgcccacaccccttcccgaggtcgattccccgagaaggaaaaggaaggggcctatctgaggcaaaagctgggctcgcctggaggctggggaagcagtttacacgtcagatttgcaggattcttgcatccctggaatacctggccctagcttctccggccccgcgacacgtgcaggaactgcctcagctccgggctcctggttacgatcaaagactcacctcgcctcccggcagcgggcgcggacatctttgcgctcgcccagccccgcagccgcgcggcgtcccggcggcgcggagtactctaggagttgtagttcctcagctctcggcccatcgccttctgtaatggaagtaggaggcagagcgcggactacaacccccagcacgccgcgccccggaagccgcccctgtgccgtgagaaaacaaactggtgctacagcttcggggtgcggaagtcaaaacgaagcaaaacc

SEQ ID NO: 9466 - DNA, 6000 bp, Homo sapiens; identical to SEQ ID NO: 1011

SEQ ID NO: 9467 - DNA, 6000 bp, Homo sapiens; identical to SEQ ID NO: 1010

SEQ ID NO: 9468 - DNA, 6000 bp, Homo sapiens
aagtcagttctctacctgcagagccacccaccccctactcagccccacccagcttctttgatcagacccttggaccctcaaagcccctgccagaaaccacagctgcaatgctgacctggaatgctcatggccaggcctctgctcctgacagaatgggaaacaaagacttgctggtaggcagccactgcaccacctcagccagtaatccaacacgtgtttaatgagcaccaattgtgtaccaggccacagagctgactaagacagagcccctgtgctgagggtcacagtctgccaggagggagatccaagtcatttacacactagggcttaagtgctgaatccgcaatgcatgcgagtgcggagtgagcaggggatggcagcacagcagcagggaagaggagcctgcttcagaacaccaggcacgattagagctacagtgttaacacacaaagggcgaatgcctgcagctgagcctggcaaggggcttgcatcccaccttcctgcatccaaaccttccagctgcccagaactgctggtaatcccacaggaaacatcattctttgccaagatgctatcccactcatcccccagaatcaaagtggccacttcctccaggcagccttcctcacattccagctgggacagaagtcacagggagcagagagggtggggctagggggacagacacagaaaccccatacaggaacgaggtcccaacagggcagacgtggcagacccagttcagtcccagccagtgtggaagacaccaaggggggtgttttatgggggtggaggtgacaaagatgatgcaactatctgctgagagttgatctacaaaacgaccccctcgtgggagcaggcctgggtgagacggcactcccagaagacgggcagggatgcagcagagagccagcagcagggaaagggcacagggcggaggtcaagctctgctggagttgggggagctggttctgctcagcgcagagtccaaaacaagcgcatcttgcccagctatggggtctgaagtcatctggggacaccactctgctctgactggggactatggggcgctcaagccacacaggccacttcatcatgaggggcagcattgttcccacctgggctgtgttcagaacccaggagaaagtggtggctctcctggggtctccggggcctccaccacctcctgtggggtacctaaggacacctcctggtctccctctgtctccaaaacctcctcctctgttttctggggttttggacctcctggatgagctgggtctggtctctgggcaggaggattagctgactccgacagtctagggacaggtgtgggggctgcctcctctggctgggaagaggctggttccacaggaccaggcttggagctacatgtagaactgggcaggactgggggctccttgggcccaggggtgctctccttggtcagctgctgctcgaacagagcacttctagatacagagttggacccagacacagcaggggtggccatggcggctggtaaagacctgggggcagtacccatgtcgagtgccaggccctctaagaacctagctaagtattgcctcaccacaggcagctgaggggccactggcagctggctggaggccaggggcaggggacaggtaaccacagcatggtactcagcaaaactgttcgggtcttgaacaacttccttgagatcctggcagaagagctcgtaatcgtcaggcaggggcaggtccccatcaaggtagggggctgcccaggcctgggctcggcctgttaggcgcctgaggatctcgcagacacggctgatgttgtcctgatagtgctcaaagtggaaggacatgtaatcgcccagctgggccaagaagcggtccagtagccacggggagccatcaaaggtgcctgggtctgagcctggtacccagcagaagtccaccctgtggggtcgggagctgggcatgtgcccagctaggggacccctttctgcaggtttaccgccacaagtgccactagctgtgctcttctgctccatggtcgttcgcacacacacggtgtccccacagcagggccgctcaatccagggatccacaaggggggtgtatgccaccccaggagacgccttgtccatctgctgccatggatgtgcgttggcataattggcggctgcccagatgggaatgcgagggccctgctgacggcaccggccacgaggcatgctgggagcacaggggagaagagaggagagccagcactggtgggtggtgggggtgtggacagatgtggcttgcacgacacaacaggacagggatggctgaacagggcgtggcagacccgcactggtccaggcaagtgctgaggatcagggagctgacagctgcagcctcaggagagctgagaagagctgagagactgtcagtcgcaggccatcatccgaggcaatctgtccaaagacaaggtggggaagagcaggaactaggcctaaccatcacccactggactggtgggaagaggctacaagcgggcaaccctctggtacccaactaggagctttgaatggaaggaggggcccagggggctggcctgggaggtctgaggtgggcaaatgctgcctatgacattgcaagggcaaggcagaatgacagatgctgtcaatttcagaagaaaaggggccagatcagaactgtcaggaatttcaggatagcaatagtagtaacctttcactgagtgccccatttgtgccacctcccccacaggaggttggtactagcattgtctttgaggcacacagtggtgaagtaacttgtctgcagccacacactaacccataagtggtggaagcagcaaaaactggctggagagaccagaggcttaactactatacagcacgcgattataaactacatttgtctgctgagtaggctctagccgccccaaaaactctgaacaacgcacagaccgcgtcgtcattaggctcttttacatcccagcaccaggcacacagcaggtcctacctgcttccccgacagagcagtgagcctgctattctctgctccctcctgaccccacatgctttccaaattcacctctcacaactgagtgccacctgcaggcaatgccacccccacccacaaacaccacctttccacagtccccatcccagccacagcagagcatcccagcccccaccattgtaaaatcctggaaccccacttgctgtctgctcccgccactccagtcacttgtgcccagggtctggggagtcccagtctgatggctggacccgcccctccttctccacgcagcagtcacctaggaggctccagagccagtagccagttctattccagtgcaaggagccctcctgtagggctcttacactctgcagcctaactctatctagccccctccccagtctctctgcaaacggaggcccactcacgacctccaggaaactctctgcttcaccccacacacaaacgccaccggctcactgggagcacaaggcctgcacacaccttcatcccacatctcctatctgctggccatcccccctcagggtgagttcctccaggtacctcccagggtggcctgcagcactagaacctgccagggccactggccctacctccaccacccaaacactctggaatccctcaggtctgacccccctctggggggggggtcttcacctgaaagcccagcccatgaccctggcttcccaccttactgcaggattatactaaggcctggacgtgagtcgagtccagtccagtccctcactgagctctaaaaaagcagtgaccccgatccagggcccagctcccaccaccagccaaggttaggtatccaggttgcccacaatgaccacaccccatgcccgggagccacagtgtgctacccagatctctgccttcccttcttcccagtcccctaccctgcccactcacctgcgcacctgtgtcccctgcagtctgggagaaggcttccctgcaccagccagccaggcctgctttgggcctgagccttcctaaccctgggccgcactctcaccattttgagaaccttagccctcccacgcctatcagtctgttggtccccctacttttctccccacactgcctggcatagaagactttcggcccttctagactggacagcactatcctaaaggggcaggtaccacggcgcatgtgtgtttgcccccacaaggccaaaggcagcacctggaacgctggagccgttctctgctctggggagacccaggagccccaagaacaaaacctgcccaaagccttaaagcaagctgagtgcagacgactgcaccgcccgccccccagcaaccgccatgcaggaaatacgagctcacaaggcccacggcaacaagaagcccacccacctgaggctacgcgaatcgcccgcgaagagggtcctgggatccgtagccacagaccgtgggacgggcctccctctgagggcgagagtccaggcgccacctagaaagtggagaacgagatcggccgccgtgaggccaggcaaggagcgggcgcggcttcccgagactgcgagaacggcccaaatgtctccaggtgcccccacaaacccccggcgcggaccgagaaactgaggcccgcagaccgaaggcactgcgacccaggctggggctccgagtgcccctctgcggatcagaagtcgggaaaagacgcaggggcgcagctccaggcccgcgtgcacggagttcaagccggccgcccgggctcccgcctccacactgaccctcttgccggagtcgggaacgcctgctcctaggagcgccgcgcagcgtccagagaccgattacatcgcgcagccacgcccccagcgtgcgcgcggccgccgtgtacgacccggcgcatgctcccggcacgctccacgcgctcctcccatccaggccgcgcctgcgctgtatgccgtgtggccgctacctcgcaggctctcccggtccctgctggcgcggcagtgccgcgcggtgggtgatgggagagcgcgcccattcccacgccgcgccaagtgccacgggatcaggtggggccgcgtgtacaggcgcgagacggtcgggccaaagctgcccctcatgatccccagcggacggtgcccggcggtccctcagatccgggaaatctgcacccggctgtggcgtagaccgaggggccgatgctgcttcagcccgccgttactgccctggcgtcagccagacactggggtgctgctgggcgtcgagagggctgctgcggggccgggctaagcctggggggctgcaggtgtcggggtggatgtgggcatagcggggctgctgggcctcgtgagcgccctggaacggcgtgcccgcggagtgcctctcatcactcattgccagtgcggggaaccttgttagggcccggttcgacgtagctgcaggctgggcgccagaggcagggggcaggcagtccgagaggaccctctacctgcatacctgggggctgcaggcagggcctctgggcctccttgttgtggatataattgtgtgcttcccgactcaggccgaggctggacccggagacgacagcgagggcaggctaccaagccctccccacagggccgtgcccagcccaagcctgccgagtcagcacccagatcctgggacaagataggtgaggatgaagtggtggtgctcttctcacttgcacaagccgtcccacgccacctctcctcggcttcacggtgcctagagaagaggtgggagagggtgcaggcgccccagctcaggatctgatgcctgtgggccaaggacctggatgcaagccaggagtccttggggccacgggcaggcagccggattcaccggaaagtgacgcttctcaaggggaacacacacgtaacacaccagctccctttctgccctggtccagtgactcctttcatgaaagctctctgaaatgttatctgcatttacacccaaactcactcactttgatc

SEQ ID NO: 9469 - DNA, 6000 bp, Homo sapiens
aaaaaaagtctgcttttgacatcaaattccactaatttggggcagcgttgggtgaggaaagtattgtgaagacaggcttcttggagtaggggcagccacaattcagtagacactctaggctcggaggctgccactgtagttgccaagctcaggttgggtggttctgtgctgtatggatggaataggacctgggctggtcatcttcatgtcgtttcctctctgtatcaatggaagttcaacccgcccctacctcttcagatagttgtaggccacttttctcttgtaactttggaaaacaaaagaggagaaataagtatcataccatatgcgtgtctccaaagtggatgtggttgcctcaaggcaggtggcaggcaggggtgacctgctggccctcagatcaatggtcgtggcaggtctgagagctgtcccactggccagacttctctccagcagcaaagccagcctggggcttgcatgttgatcctgagcaagcttaacggggtgaagctgggctttctcccccctgtgactggagtgcatgttgacaccagcactttttctgcacatgtatcttcaatccaacaaggccgtttttttaatgctgagtaacaggccaccaagcggctactgcgttatatcttctcagcaactggccgcagtctcttctgcaccattttctacaccagacctgcttggcaccacagggagctcttttcctgccctgcacaatgacattccaaccaccaccagccagacattacagccaaccttgctgattgtcacaagcaggaccttggggccactggcactgtcagatagtaagccatttcttgggtagaggaggaaactcctctccacaaatccacttgggcctgtgcaaatggcacttgaaagagtccccatgcacttggagtccatgagccaatgggatatgcaaagacgcttaaacatttcagggctggtttctctgttcatatccaattctggtgcttaggaacagggacccatgctgatgcccaagggcaaaaagccccacttcctttaaggaagtgaacaggcctgaccctgatgcccaataacgggcaaccctaggctttttgtttttcttgcttttattcctttttgttgttggccttgtgctgcgtttgtttacaaaagatgtattttgtttaaccaaatattaaaaatggaaaactccatatatgtctccttgtctgcctgaattctataattgtgtaaagaaaaataaactttagtatgacgctgttttaaaaggagttcattgccagcgtaagtcatcttttagagacatatcattctttgattaactctttcacctgagaaatccagacaaaatagtcactgaaatgggatttggttcaaaagatgtctctaagacatttttcagtctattttaatttataaaaactaatcttgacaatttgaagaatccacctaagtacaagtttgtaccacactggtgactagtgtttttccctagttaacaagtgaaagatcatgtatacccagcgggcctgggcccagccccaccatcccgagcgcacagcagcagtgttctgtagctggactgcctggatttgaatccaggtctagcacttaactctgcagccttgagcaattacctttctgtggctgtttcctcttctgtaaaatgggaacagtaccacctagattgtagtgttggttgatctgataaacacacaaaaggcttactctggctgggcgtggtgggtgacgcctataatcccagcactttgaggggccagaggcgggtggatggctagaactcaggagttcaagactatctggggcaacaaggcgaaaccctgactctaccaaaaataaaagaaactagctgggcacggtggcgtgtacctgtagtcttagctacccaggaggccaagttggaggggaggtaagaggttgcagtgaacccaaacgacaccactgtactccagtgagacctgatctcaggcaaaaaaaaaaaaaaaaaaattctgtccccctcccctattccccagaaatcagtactatgttattccctacaaatactttataattacacagtgtcattatagactaaagaagtacatagacccaatcctttgttttaggctgatggatctcaaagtgactgcctaaattcagggcaaagattgctatgaagtacttggctaaaaatgaattttcacttggaaacaatttgggcctatggctgttaagatggaggtgctgctggtttaggtgagaaaatgtgaggggcagtacatgtctctgacgtggtctcatttcaaggtacttaggatgacactttcagttggaatcatttttaatatttaaatacaaaaagtgagcactgacttctctttttttaaacacacacacaggtctaacagccaaaatgtgcagaggaaatgagctcctgctgtcttccatagtccccattctgtggctgaagctgcagcctgcctccctcctctcatacatagggattcatagtggccactttacactacaggtgtaatgcattttgtctgtttcacattgtgtgcatgtcctgccccaacaactccattctttaaaaaaaaaaaaaaaaaacagtcgttaatggtcaggggcacatccctcccactggcatcggttcctaccccacaaggggaaagtgagatcttccagttaggagcaatttggtgaaaggagtcgggtgaccagagctggaataaccatctgcatggctgcactctggtatcagagtggagacagaagtaaggatagtgtggagggcacagttgcaagttgagtctttccatgagacaatgtggggataattctccccaccaggtttagatagatcaatgtgccaaagttaaaaaaaaaaaaaaatccaaattatcagcagttcaaacacttgaatttcaaacttatcccactgagacagctcaaacagcaataacaatctagatctttccaggaagtgagggtagagcccctggcattcctcctgagagccctgtgttaggtcctagaagtatctggaaaagaaaaggaggggtgtaaggcatcatacaggcctagagagcttattctcaccatacctgatggggccaacgtctacaaaaataatactgaaagcacagtcagacaactaaaagagcatgggcccgatcccaatccccacccacacattaactgttggtcaactcaggtgctacaacaggagccctcaacccctgggctgtggactggcactggcccatggcctgttaggagctgagccacacagcagtagatcagcagcaggcaagtgagagaagcttcatctgtgtttactgctgttcaccatcgctcacattactgcctgagctccacctcctgtcagatcagcagcagtgttagattctcataggaacacaaacccttgtgaacagtgcatgcgagggatctaggttgcaagctccttatgaaaatctaatgcctgatgatctgtcactgtctcccatcacccccagacaggactgtctagttgcaggaaaacaagctcagggctcccactcattctacgttatagaattatttcattatatattacaatgtaataatagaaattcagtgcacaataaatgtaatgcacttgaatcatccagaaccccccccccgacccccggccacccccaacccaccatccatgtaaaaactgtgttccatgaaaccagtccctggtgccaaaaaggttggggaccaatgtgttagtgaaataacttgcgtctccaccactggcaaaaagcccaaggtctgggctcacctgccgctgctgcagttgctgctgttgctccatttgcaacttctccgtctcaaagacaacgggaagaaccaggatcataaaggaagtggtcccaatccacaaggctgccctggaaaacctgcagaggaaaatccccagagggtgagcatgaagacatgcaaacaaaacaggcaagaactacccagtaaccaaacctctcacattacatactccaatgtttttgataaacgtattctacccgctccttacaccatactcctaccagagacaggaggagcagctatggtagctgtatcatctagtgatggcggtttaacattctcctgagttcttacaaagctccttattcattaattatctccaacaatctgaaataacccccacaactcccctgccaggtaagaatccccattttacagaagaggaaactaagaaaggatagggtacaagcccaaggtcacccaacacgggtctgctgcttccaaaccccgtgttctttcacagcaccacgaccatcccatgcacgtacccagtgcctttgccctcgttccttacctgtacattttctgagccacaaagagggaaagatcaaaagtggctccggccgcggaccggaccctctccggaaacatctccgtcaggccccatagtctctccgacagggtctcatctagctgtggtggagtagacgcgggtcttagccgaaaaagcgacatccattcctggccccgctgcggcactgggagccgccgagccccactggagctagggcacccagggcccagcagggcccctaaccccgcctcccaaagcagccgcttcgctccgatcccgtaccacgcggatcccacacccacgagcgggcccgcttcccgctctgcaccccgcgaggccctagtacctcctcatcgtcgtcctcctccagctcctcctcaggcttctccgcgtcgcctttcgggagcaattcgtccggggactggggttcccctgcaccggcagcagcgacggcggcagccatgactgtaggggacaccggaagcggaaaggaggtgagcgcagccgaacggcggacagagctgcttttccgggagccgaggcgcgagccgggcgagagcggcgccctctagccccgggtcctccagtgcccgcagcgggtccggcagccctggccttatccgggcgtcggggcttcggcgggcattagcagcagctgagaggcctgtgagaggttctggggcgccaccgcagtcattctgttcagcgggtatagggtgagctcagaaacttgcttgtttttctttttttcaaatgcgttgttttaattccaggtaatagagttcaggggagaacaaagatcaaagggctgactctggcaagattctgggggcttgttttactttaagttcacagctaaggtaggagtggctgagtgaaaacaactcaagagatgatgagccactgtatttttttttttaacaaaagtttattcttaaatttacaacaggctccaagacaacactttattcgagcataggtggccaaagatgtggccgggaatagagatgtttaaagacgaatggagtcaggcccaccatcaccgcaggcccaagggacagtggaacaggtcgctttttgtaagattttagctttttgttgttgttgttgttgttggttttgttttgagacggagtctcgctctgtcgcccagactggatggagtgcagtggtgtgatcccggctcactgcaagctccgcctcccaggttcaagcgattctcctgcctcagcatgcaccaccaaccacgccccgctaattttttgtatttttagtagagacggggtttcaccatttggctaggctggttttgaactcctgacctcaagtgatctgcccgcctcggcctcccaaagtgctggcattacaggcatcagccaccgcacctggcctatatatagttatatattatatataatatatattttatgtgtgtgtatatatatacgtatatatgtatatatatgtatatatgtgtatatatgtatatatgtgtatataggtatgtgtatatatgtatatatatacatacgtatacatatatacgtattatgtatatatacatacacacatatacacacacacacacacacacacatacatatatatataaagacagggtt

SEQ ID NO: 9470 - DNA, 6000 bp, Homo sapiens
atgttaggcaaagaatggataatttcccatctctatcctttcaattttgttgtgcagtattttcaaaatggaattattatatttctcaaaaatatgaacaaagtaagattatgtgcacatactcatcttaatctgaatgcctagcaaaaatgctttatctaggcaaaggtttatatcccattacgctgaaaaaattccactgcactttctaaaatctccaagcatgaaacaaggttcaccaaagatcttccaggtccatccgtattctttaatctaaaatccagacttcaagagatgacaccattgaagtttcacagttacaacctcttatacctattcatacatcttacatctatttttctattatctctaaaccctaaagtcattataggattaataccctgtaaatatactttaatcaaaatattagtaactgtgttactaatattcattcattcaccaaatattaagatcctactgtgtgacaagcacttataagaacctcaccctcatagaatgtacatcccataaattctatgcctagaataataggcatggggtgagtgtttggtaaaatgcgctaaaatatatatttgggctaggcacagtagctcatgtctgtacctagcactggcactttgagaggccaaggcaggaggatcacttgagcccaggagtttgagaccagcctgggcaacatagtgagaccctgtttctattaaaaagtgtgtgtgtgtgtgtgtgtgtgtgtgtgtgtgtgtaatataaaaaaataaaataaatatttggatgtagcctttaacctttaagcagatcggtctaccagtcagtcaataagtgtgtattgagcaccatgtgcaaggcagcgggtatgggacatgaaatgaatgagttatgaacagcatctttaaagtgagatagactagaatccaagagaaaatataacaacaggctgggcacagtggctcacacctgtaatcccaacacttcaggaggctgaggcaggcagatcacctgagatcaggagttcaggaccagcctggacaacatggtgaaaccccatctcaggtaaaaatacaaaagttagctgggtgtggtggcacctgtctgtaatcccagccactcagggggctgaggtaggagaatcgcttgaacccaggaggcagaagttgcagtgagccaagatcacgccactgcactccagcctgggagacagagcaagactccatctcaaaaaaaaaaaaaaaaaagaaaactgaaaatataccaatacataacacatattaagtattattgcacaaaattttgtttgacataagcatgagtactaggtggtaaatggcaaatgttttcttactgtttgagtcttgatcaaaaagtctgaaagacactggctagtgggatgaaaaagtcaaataaaagaactgaaaacgtttttttctcaaaacactcatcaaagcagcagcaattttaatgtaaaaagagctccacaggctaggcgcaatggctcatgcctgtaatccccgcactttgggaggctgaggcgggtggatcacaaggtcaggagattgagaccatcctggccaacatggcaaaaccctgtctctactaaaaatacaaaaattagccaggtgtgatggcacacgcctgtagtcccagctactcgggaggctgaggcaggagaatcacttgaacccgggaggcagaggttgcagtgagccgagatggcgccactgcactccagcctgggtgacagagaaagactccgcctcaaaaaaaaaaaaaaaaaaaagagctccataaaggcagatacttttttccctgtatccctggcacctatcacagtgctaggcacatagcagaccatcaataaatatgagctgaataaataatgagtgattactttgttcaagatgccacaggggatgcaagccaagaagatgcagttcctaccattacatctagaaatttaggatcaaaggataagacgaaaatgcaaacagacccaaaacaagccaaaatgtaaatggcaccaaaggaaatggcacggaaaggcgaagcccatccaaatgcaggggataaagaactttcagaacggagttctaaaagatgggaatattttgatgctaaagatggatgatgggagggggaatgaagtgcaatagtgcggtccaaataaagccatcctcacagggctaacaagaattctggacaaaggccaggcgtggtgactcatgcctgtaatctcagcactttggaaggccgaggcaggcggatcacaaggtcaggagatcgagaccatcctagctaacagtgaaaccccgtctctactaatacaaaaaattagccgaacatggtggcaggcgcctgtggtcccagctattcaggaggctgaagcaggagaatggtgtgaatctgggaggtggagcttgcagtgagccaagaccgtgccactgcactccagcctgggcacagagcaagactctgtctcaacaacaacaaaaaaaattattctggacatctggacagaaatgtagttataattggctgggcgcagtggctcacacctgtaatctcagcactttgggaggccgaggcgggatgatcacttgaggtcaggagttcaagaccagcctggccaacatgatgaaacccccgtctctactaaaaatacaaaaattggctgggtgtggtggcgtgcgcctataatcccagctacatgggaggctgaggcaggagaatcgcttgaacctgggaggcggaggttgcagtgagtggagattgcaccattgcactccagcctgggcaacacagtgagactccatctcaaaagaaatgtagttacaattaaccattaatcaagttgccttttttttttcaagagcacaaatccacattgatttattgacttttcattagtttaaatccttgaggggtacagcattactcggattctgtgtccaacagccttagcaggaagattgcttcagaatttggcacgaatcatgccattgtttctgtgggcccgagttacctttccccagattactctggctttgtttgatttgccgccaggagtcactatgttgttctttgctttgtatacatgagcccaaatagaattctgtttcatctcgggcataaacaccttcaattttaagaagagctgtgtgctccctttggttccggagactccacttatagccagcaaaaatggccttggaccacagccttccagacatatttcctttcagaagtcctgctcccggcaggccgccacaggagccaagatggcaggaagagctcaggttgcactctgacctacttgctagtaaccaaaagtcacagatactatttgcatccccattgattttacagataggatttctaaaattagaatcataaggcttttgcttaagagttgctttagatgtttttcagatctcgaattccagcaaaactgatgctgccaaccagtttgaagactcctccccgcaacagaggaacggaatcagcatgagaagtttcctcatctccctgtcccataacttcacccttcactcttccaccaatcaaggatctccacacttcagcaaaaacatgaggtccaaactcctgaaggagatggatttgaggtttcctctcttttcccatctcctcgttcagcggccctgcaactgaaactctttctctgctgcaacccactgtctgagtgtattgacttatcgagcacactgagcaacagacctattacagttacacaaagagatgtcagaagagaaacggtgtttgatctgaatgaaagacatataaagggaagttaagtccaattatcgatgtcaggctgcgacttctgtgctaaatttttttggaagttaatggggaactactgaaaacgtctatgcaggtcaagtgaagcaatcaaagttgcagtagaaaagtagtgttggggctgagactcaggaaatctgaggttttaggccatttggaaccagtaactatgtgaccttggagaagtaactcattatctggcccttatttaagattaggataaacgagaggagtttggcaaccagtacagttagtcaggcgccaggcacccaagtattcacatgcattgtcttttaattctcttttaagccaggcgaggtaggtactattactacctccactttaaaacaggaagtaaggcagagagcggttccgtcttttgcacggtagacaggagaaaagaggacccctagataggtttgagttagaagacttcaaaggattcttgttgctctaggagcctacaatggctccagcagcggctgagcggggaaaggctggaagtgaccagtaaagagagaaaacttaaaatcatgcaaagaaagagcacattcactgcggtctaagacatcacagaaagttggcaagtcctttgggccacggactcgccgagtgacctttagccaagtctcgtccctcctatcaggttcctgctcgaaggtctgcaagactcgctggcccgaggcgacctcttttcggcctcctccacccagcccggcacccttggcaccctctctcccggtgaaccctgggcgcagccacgagagcgtctccccgcggcgcccgtctgccctgctggcccagaggcctcgcagcccgcgggtcgctgggcctcttacccgggcgtgcacagtccccatggttccctctccagccgctgcctcgcagagctgcccgggcgggacagagcgtctgctgctgagggcagaaggcgggtccgcggtggcggagctgcaggtcaaggcaactcccacaaacccccggacgcggaacactgggggcggccatgattccccgccttctccgcgccccctggctcgcgatgccttcgctcattggtccttatgcgcctgtgacccggatgttcacacggccgcggaggacgttctgactgcgcaagcgaagagcgttcactgacatccgcgaagctgctggcgcgtggactgtgtggggagggcgcgtggggtgaaggtgggtctgcgagagggtccgctgggaggctggcgtctggcgttggcgcctgaaagagatcagaccagctgttgggtgtcactcaagtcctgctgctcttagccctcctagcacccccgacccgagggtgctgtgcttgtgcccacgcgccggtgaagccccgagactcagcggggagaccccgggtccggccacccccgagctgcagtagtcgggtctcaccggcatctgctacacaaacccggattggtgccctggctcctttcgttcaagtcattggaacccccactcaaaatcgtcaaaatgaagacgatggtcgtgtctccttcttgggggttggattaaaagggcctaatgtgagagacggaaagcaaagctcccggcaccgggccgggcacacggtgggcgctagataatgaccgctattcactcaactgcagccagtaattatgggcgagggccatctaggtgcttgcatgagaaccagtcatatcggtgaagaagacggccatgggcttaggttttggtggcaaaacagctcccctgccccaaaaaagaaaagagaatagaaaagaaaaaggcataataaatatcagccacacattgtgataagtatattgaaagaaacgagacagaataagaaaagaggaagcttcagtatcctgtcacgttgccactcccttctgataacagaagcatcttttcttctgtccccttactccctcccagaaaccctgacaccctttccatttaaatagcagcaccctaggcctccaacatccctgagctaaatattcaagtccacatgtcccttcttgcctggaaagagacagaacccagcaccagccaggcccctgcccttccctcactctcagttccctgagcctcaattccttatctgtaaaatggaaatgatagcctaaggcataaggtctgaggacctcatgagatcaagcatggggcctggcactctgtaaa

SEQ ID NO: 9471 - DNA, 6000 bp, Homo sapiens
aacctcaaagagccactgggggacctttactgttcccccaggcccctcgaagttcttctctctcttctgtgtctcccaattccaacactttctattagtccccctccccagcaccgcagaccagccccggcacacagggtcagaggcatagaggaccggccaaacttctgactgctgagccaaggtttcctctccctcctgttcacctccagccccagagcaggtgagcgaggtgcccacactggctccaccactaactgggcaggcctcttcaacagcacccaaattacaagcccgcatccaggagcagaagccaagatcaaatgaggctatgcttttcaaagagcttgcacaaagccctacacacctaagcccgactgttattatctgcaggagacagaaaagccagaccaagggaacaccggctgcattatagggtgactcagggacccatctgacaattccaacggtcccaccctggaattaattggcactgggaaggggcagtgacctctgatcttcccagagagccctgtggctggctgacgaaagagcatctccaagcaaatcctgtgacccagatcacctggaggccactttttaatagctgtactcaggagccactagcctgctgaggaaggcgctgatccccggtcttgaacttgggagaaccgcaggcctgctcccaggaaaatgctgacggaagcggcgcggtgcctctccccctcgctgggcctaggccgggcgcccacccccagcatccaaccggcggcaacaaatccttgcagagttgcccgggcccggcccaattgcgccccggcatgccaggcggagcccttggcgggttcctgaggctctccaggaggcccatcaggagctactcctcccaccccgacggccactcaccagacacagacacctccatgagcgcctccagcggccggttgttgtccaggtcgcggctgagctgcagttcgcccgtggcggggtccagcagcaacaggcgcagctcgttgccctgcacgaaggtgtagttgaggctgtctgacacgtcggggtcatgggccgggatgcagccgatcacgccggtggggaaactgttggacttgttggtgacatagttgttgaagaggatctggaagtcgggcagcacaggcgggttgtcattctggtccacgagaaggatgtgcaccgtggctcggctcaccagcggagccgacgtggcctgcaccaccagcacatactcccgccggacctcaaagtccagctccaccatggcacgcaggtccccgttgagcaggtccagctggaagaaatgccgcatgtccccttccacaatctgatacatgatctgggcattagggccttcatcagggtcgttagcacgaatctttgccaccaccgaccccactgggttgttctcctcaacaaacagctccagttcgtccttctcaaacatgggggcattgtcattaatgtccaagatggtcacctggatttctaccgaggcgctaaggggagtgggactgccccgatccacagccagagcccaaaggttgtacacggccacattctcccggtccagccggcgctgggtgcgaatcacaccggacgtgggctcgatgtagaagtccccatcgccgtcgtccccaccctggaaggtgtacagcagacgcccattgggacctgagtcccggtccgtggcagagacctggaggatgctggtcgagggtggagcatcctcaaagatggaaccctggtagaaatcccacaggaactggggtgcattgtcattggcatcgaggatgaggatctctagggtggtggtgtctgatttctgcgggatgccgttgtcctgggccatgatggtcagcgtgtaggcgacctggttctcatagtccagctccatcatggtgtacatggtgccactgtcggggtcaatgcggaactgcggcacggggtcctgaatcacgtaggtgatgcgggcattctctcctgtgtcctcatcgttggcactgagggtagcaatggaggtgcccacaggcctgtcctcactgacactcactgtgtaatgggagctctgaaagacaggcctgtgggtgttggcatcagtgacgttgattaggacatgcgcagtgtgcgaccgtgtgccgtcggatgctgtcaccgccagcacgtactgctgctcctgcttgtagtccagaggtagcgccagggtgatgaggccgccccctctctggctgctgagtgcaaagcggttccgggtgttgccgcctgtgagctggtaggtaatcacactgttggcgtcacggtcgcgggcctgcagggtcagcacgctgctccccacggccgcatcctcattcagacgaagctcgtaggtgggctgcgtgaacaccgggtcgttgtcattcacgtccagcaccgtgatggacacgctggtggaggagctcatggggggcgagccgtggtccaccgcctccaccccgaagctgtagtgctccacctcctcgcggtccagctcggcacacactgtgatccaaccggagctgttgtggatctggaaggggaagtcaggggtgggggcaggattcttaggcccagcgctgccgccccccagaaaggtggaggccgtgtccaccaggcgatagtgcagccgggcgttctctccagagtccgcgtccaccgcctgaatgtgcaccacggggtagcccaggggcacattctccagcaccgtggcctggaaggggctgctcacaaagataggctcgttgtcgttgacatccagcacctgcacagacaccacccctgaagaattgatgagcgggggccggcccccatcctgggccttaatgctcagcgagtatttctggacatcctcgaaatccaaggggttgatcacatccaggatcccgctcagcgagtgcaggtagaactggccggccacgttcccgctgaggatgctgtagtgaatggccgcgttctggccctggtcccggtccgtggcctgcactcgcagcacagccgtgttgagccccacgtcctcgggcacctggaccacgtagttctgctcgctgaactgggggtagttgtcgttctcgtcctccacctcgatgtacacggtggccgtggcactgagcgggcccggattgcgcccctggtcgttggcctccaccaggagctggtactcggccgcctcctcccggtccagcaccgcccgtgtgctcaccacgccagagctctcgttgagctggaagacgtcccacgcgccccccaacacgcggtaacgcaagttggcgttgatgggcgagtcgcggtcgctggcgcggatggtcagcacctcgtagcccacctccaggttctcccgcacgcgctcgcggtactccgactgctcgaagaccgggctgtggtcgttggtgtctttgaccaagacagtgatgtaggtggtggccgagcgcggcggcgtactgtagtccacggctttcaccctgaggacgtgcgtctccttggtctcgcggtccagtacgctgtccgtgctcacggcgcccgtggcagagtcgattcggaagtagccccgggagcgctcgtcgaacagcccctccatgtaatagctcacgcgctcctcctcgccctcgatggtgtagtgcgcgtgcagctggaggatgagggtgcccgccggttcgttctcaaacaacgccacctggtagttgggcatcggaaacttcaggctccctctgccgctcgtgccccgccgggcccgtcgcgccggccccgcccgggcttcgggcaagttcggcggcaggggcggcgatggggatggcgacgcggagggcgtccccgcggtggcggcctccagcgccagtcccacccggacggcgccagccgcgcgccgcagggcgcacagcagacgcaggcggaccgagccgcccggcggcaggcagatgggacggccgggacagcggggcctggggcgcggcgggcagcggcaggcgggtaaggtggtcggagctgcgagcgccgaatgctgcgcggccgcgcagccgccggggacggggaagcagagcgccccgcagagccgggcaccggttccgcagagccgggcacgggctccgcagccgggaaggtgcgtgcgcgcccgcaggcggcggctcagcgccgtcggggcactgcgggccaccaagcggacttgcagcggcagcgggcgccccgcgcccgagacgcgccgacgtcctgccagccgcccatcgcggcccacgtccagcagctcccgcggcgcccggggcgtgcaagcggcgcccaccgcgtaggtacagccgggccggagggcgaaggcgcgggtcccgccgggtacgcgcggctcccaggcggccgctcgcagccccatcgccggcagggcggcggcggcggccaggagcagcagcacgggcagcacgggcggcggcggcggcgccatggcccggagcccgagcccgagccgggcgcccgaacacaatccatgcacccggcgcgcctccgcatccacccggcgaggccggggagcggctcccgggcgcccggccctcggggcggtccgcgtcccgcctccccgggggccctggcggggactgtggggaccacgcgcccggcctcccccgcagcttccacttcgagagcactttgcgaaagtttgcgaagttggtttcaagatggctcctccgcgcgtcccgggagggcgccgcgcatcaacctgcggcggcggcggcggctccaggcggctccaggtggctccggcgcgggctcggccggacgggcgtgggaagcggggcgggcccggcgcggggcgggggctgagttcccggagcgggctgggcagctccgcgccgcgcagaccccggcggccggctgctgcctgggcggtgcgcttggcccgcgcccactccgcccgcgctctccccgcccccggcccggccccgccccgcccccggcccagcggcgtattgttcggccccggggggagccggctcggaggtgcgcgccgagaggatcgctatggagacgcgagggcgcggccgggacggggactggggccctactccccggaggcctccccacccagcctcccggtggggcggggccgaggcaacagggccgggaaaggtggggctggggcccccggtggccgctacccgtggggcggtggctccgcacctcgggctcggggccgcggctcagagcctggctccccaccccggcagaacagatccacggagaccgccgccaggagtgccgcgcgggtaggacccgggggcggaggactggggccgagaggccggggagcccccccccacccattaaggactgcggaggctgtcgaggagggttacccattttacagcaagacgcacggaggctaaaatgcttcaccccgactaaaactccctggactttgaagcccaataggcagctaccggatctgcgtcccacttggtttaaagcgcaacttttaaatgaaagaagaaaaccccggttgacataagggatttggagaggacggcggaggcgcgctcatctcccgcgtgcggcccgacccgagcgttcgcggacgcatcgcggaatccccgagcgtccggctcctcccgaagcgggttgcggggaaggcggggggctgcgggtcctggaagctgcctggggcaagcaagcacccgcagggatttagagctgtgccacagcccctgcccagcctcctacggaggacagcggggggcggggggcagagaccttagagctttcagaaaagtgacacacacccccgcctcctgcggggaaccacggggggccgggggcagctttaggtttgcgtgacgggtacacctgcctccggatggggcacagggataaagggggtggaggcttaggacttggcgaccccccgcatgggcggggctttgggactgtgccaccagcggctgggaagggcgcgcactcccttggtggcgctcggggcgccggagtccagtgcagccc

SEQ ID NO: 9472 - DNA, 6000 bp, Homo sapiens
gcaaaaagaggctgcagaaaattggttcatcaatggaattctatcacaaagtgaccattgtatagtgagtttatttgtgctctaaaatagtatcaacgtgcatctttccactgaatgacttcatggatcgtggccaacatagaacttggataggaaatcctttggccttggcgcttctgtttcatggaagaaccgcataacatgtgtccgctgcttccatactttaattgtttcttccagttcgatctttccctgaacagtgaggagagaggtcatcagtcaaagttgtcaagttgaaggcatatgacactgaaggccaggattctattctctgctcagcatggacttgttgaatgaccttgggcaagtaactactctgtctgggcaaagtttctatgtctggacaatgaggtggtcagggtaaatcatttctgacacttttcagattctttaactctgtggttaactggtaccaagaggagaaacatacaggttaacaggctcctatcccatgactacctaacctgactggcttaacttatgtttctgcttatcatttcttctgttactgactggtctatgctgaagctcccattgatgctaacgtgactggccagggggacagaatcagccccaggatttgagtccatttatacaggactcataaccaccctaactgcctcttccagctgtaaactggcattcagatgaagtggtaacttctagggatgaggttcaagaagagttcaaactttcctccctatatctttttttatggttataaaatgcaagtcccagtggatgttcccttgatgaatcttatctatttaaccagatgataacctccaagttcaagtatttctctgaaacacagcaataatcactgccgaaccagtagctgctttctaaacttggagacaaaatgttcatttggaaagactaagaagtagtggacaagttggctgatcttttaaattggtcagggagggtcagttaccttaatgaccagaagatcaaccaccctggggtctgtgacatgggcattcttcataaacatttctcggactttatcccgtcccattttcacagtgatgtccagctggaattggtgcactagagagaaaaacatgactcagggtagaaattgtatggttaaataaaacctagagtcaaatgatactcattgaacacatacaggtcgcccattcatttcttcaccaaaaaattagcctgaccctaggctaggtgcttgaggatgagacatgtgattcatggtatttgctctcaaggaacttattatttgtttggggaaaaagaccactgaatttgaagaggcagtaaagcattgttcaagagtttgaacaacctgggttcaaatcccagcttttgttagctatatgatcccgtgtaagttaactttcttgtgcctgagtgtattttttaaaaaattattttatgggctgggcgcggtggctcacgcctgtaatcccagcactttgggaggccgaggtgggcggatcatgaggtcaggagatcgagactaccctggctaacacagtgaaaccccgtctctactaaaaatacaaaaaattagccgggtgtggtggtgggtgcctgtaattccagctactcgggaggctgaggcaggagaatggtgtgaacccgggaggtggaccttgcagtgagccgaggtcgcaccactgcactccagcctgggtgacagagcgagactccgtctcaaaaaaaataataattattttattagctgggcgcggtggctcacgcctgtaatcccagcactttgggaggccaaggcaggtggatcacctgaggtcaggagttcaagaccagcctggccaacatggtgaaaccccgtctccactaaaaatacaaacatgagccgggcatggtggtgggtgcctgtaatcccagctactcgggagactgaggcaggagaatcacttgaacccgggaggtggagggtgcagtgagctgagatgggccactgcattccagcctgggtgacagagtgagactgtgtctcaaaaaaaaaaaaaaaaaaaggctgggcgcggtggctcacgcctgtaatcccagcactttgggaggccgaggcgggtggatcatgaggtcaggagatcgagaccatcctggctaacaaggtgaaaccccgtctctactaaaaatacaaaaaattagccgggcgcggtggcgggcgcctgtagtcccagctactcaggaggctgaggcaggagaatggcgtgaacccgggaagcggagcttgcagtgagccgagattgcgccactgcagtccgcagtccggcctgggcgacagagcgagactccgtctcaaaaaaaataattattattttattagctgggcgcggtggctcacgcctgtaatcccagcactttgggaggccaaggcaggtggatcacctgaggtcaggagttcaagacagcctggccaacatggtgaaaccccgtttctactaaaaatacaaaagttagccaggtgtggtggcacgcaactataatcccagctactcgggaggctgaggcatggggaaatcacttgaacccgggaggtggaggttgcagtgagccaagatcgcgccattgccctccagcctgggagacaagagcgagactctgtctcaaaaaaaaaaaaaaaaaaaaaagtgagttatcattactgtttttttcattaaatacttaaaattttacttttgttttttattaatgctcaggctgttctaagttctcaacactattacttattccccttccttgatttgattcctcagctggagtcctgatgatggataccataaaacccgtgtggcacaggtttgagtaactggccagctacagatcactgatcttccccatagggatgcatactccttgaccccttcttttctctcctcttcccttgctttctaggctcctgtagccctctgccttcttttcctcctctcaagacccttctgactttgggactttcttcccaaaacagaatttgagggaaggtcttgggaggggtcggtttagaaagagctggatcctcagagtcaggatacctgggttctgtcttctacttggccactgatttacccttcacaagccaccctttttgaatgtggtcctccttcccccagcaccttcctcctgcaaccagagagggttctgggtactcctagaagtattctgccaggcaaacattatgttttcaaactgctgaatttgaatgcaccaccccgaaacacacacacacacacacacacacacactgctacagtcactccccacacacatcttttatctgcctgcccctgaaggcatctgaatttgcagtccctgaaccagcagatcactcaagtttctccttctctagtatcgcgtgggtttaagttctggtcagtagcaatttttccaaaagtcagcttgaagacagggactctgtggagcagacacagttctcatatgtcaaagaaccgggttctgcttggaagctgctgctaaggaaagccctataaataacaaaaataacaacaaaaacaacggcagcagctaatatttaatgagttaaatatgcatcaagtcctgttctaagcactctagatattttaacttaatacagtaaccttctgaagaaggaattattattcccattttaaagatgaagaaactgaggaatagatgaaataactggcccaaggtcacacagctagttgagggcagcgcctgaagaaaagtccgtgctcctaaccaccacattctaccgccttttcacacacacaagcagggactcgacagccctgaggagtggcaccgtgctccagctcactcaaaaacacctctttctcgcactttgggaggccgagacgggcggatcacgaggtcaggagatcgagaccattctggctaacacggtgaaatcccgtctctactaaaaatacaaaaaaaaatggccggcgtggtggcgggcgcctgtaatcccagctattcgggaggctgaggctgaggcaggagaatgacgtgaatccgggaggcggagcttgcagtgagccgagatcgcaccactgcactccagcctgagcgacacagcgagactctgtcacaaacaaaaaaatccaacgggcatctataattacactctgcaactctagactttgggttctgggtacaacagtggctcggcctgggccctgggcacatcacttcacctctcggtgcctccgctgcctcacccacaaagtgagtgtgtcactgacagtcatcgtcctcccgccaattgcgaaggacaaaagagaccaaagctccgatagcacgtacgaatgctaggcacggccggtctgaccaccgcgccgccgccaggtccggcccatggtaggctcgggtgaccctcttcccctgaagcacccgcagtcgcctctgcccaagttggtgacctcagctgggcccatgagaaaccccggccgggccggctacgaccttgagcggcggcctccgggtccccacgtaagccgctacctctcaccagtgttcggcacctcccgataccaggcgcggtagagctcgcgcaccctccgcttggcctcgttcatgtcccgactgaaaatgggcttcacgaaggtgctggcggtagaagtagcttggcggacgccgctccccgccatcttgccaaagcatccactccacaaccccacccctttgcaagcagcgcgtgcggaccgcgggcgaatgtcttttcccattggctaaggaggaacgccccgcctgtatgctgggtgggcgggaggatgactctgaggctctcggattggctgggaagcctctctctggctgagcgaacggtgggtgctgcgcatgctcatctacagaaacgccgcttggcctttggactacaccatctgtcgctcgctctaacgagccggcgttgccgccaggggacgctcgggccgcaggaggtcgctgggtcgtgagctggcgccggggacgccgagcgactgcggggtttccctcagcgtcctgctatccggctgcccgccgcgctccttggtagtgtccgtgggcgcgcaggccttgaagaacctcctcgtggcgggaccccgaggtaactgctgaggcagataatggcgcctgggctgcggtggggcttgtcctgccgcctggcggctttctgcagggccaggatatacttacttttctgtaaaccaactcttccttagcgcaggagaggtgtcaaagagctggcgcgtctccagagccccgggaggaaggctgtaacggcagccccatcgtagacagggacattcgcatcccgagccctggatctctgaaaaccagcccagaatttggaagctggaaggaactttagatcgtccattctgagtgtctctcttcgctggcgttttcccactgaggttatgtaaacatgaagaggagcctacaagtgtcaaggaaaaaacgacagctaaccacagggcaggccatgggcaagatatctcagtgttctccgctctcataggtcaggtaggtacctcagcatccccattttacaggtgaggaaactgagatggcccagagtctaggtcacctgacagatcgcccccacctgcctgactgctgcctaagaggctccgtctttttctgaaggtgtagttgacaggagcctgtgagtattggggaagggccaggggccggggctgagcatctactccaaactttcccatttcgaagggttaaaaaaccagatatactttttttcttccttattatcttctaaaatgtatatatatattcaagtgagctatacaaaagaaagcacgtaacatatataaattataaagcataataataaaatggaagcttttgaacctcagtactgacttaagaagttgtaacacagttaaggtttgtataaagtgtccttagatgtccttagtagccactgttctctagttctctaggtacattaacttggctaggcttcac

SEQ ID NO: 9473 - DNA, 6000 bp, Homo sapiens
gcaggcctccaagaagcattagggaaacggagtaccacagaccaagatggtgatggtgtaccactttcacatctgggcagtgtgctaagttcatgactacatcacttaactcagccttcagtcatgactaaaatggcttactgcaaacatgggttcagaatgcttcaagtatacgaaactcaggaggaaaagtgcttctactaaggagaatatttaaggagcaggcactagtggaaaagcacatctaaatgtaattaatacatttctacactaactagaggtcacagaaatgtaattaataaatatctacactaagtacaggtcatataatttcttgtcatctcccattcatgatgttcttagaaaggtcttttagttctgtcacaagtcttcatgaggaaccccaaaatgaatgtaaaaggcaaaagaaacaggaaatcattcttagggaagctgctttttacctcttcagcttcatcttcttgatcccaattcctatctgtcagttccttctcggcatttcttttggccatgttttcgaacctaagttatagaaaacagaagagtttatttttctagaagaataaattcttataaagaattttaaaaattcactctagcatgaagtgagataaaaacatctctggtttttttatcagggaaaaaaagcatctggaaactgctttaatgagaactttacattggtgctgttaggctcccagtgttacaaatcaataaaggctttttccaggaggcagaagaagattcctagggaacaccagcagtcctgaacaacactaaaccgactccatttggaaaaattaaaatgaaatatcaattgattttttaaaaatctggaatctgaagtactgtatatataatcaaaaagtccttaacttattctacgcatatacatactgaaagtcttgtcataaagaaaataattttaatatttaaaattctcttaaagatgacccattaaagaagtgtatctttcagtaagaatacgaataacgggctggaaacgcctccacaacacgaatactgttctttaagctacagccgacagagatacatggttcccaagactgaacattttgttgcttcaaattgtatattgccaagacaattagaagtccaaaatgattaacatgggtgtgttagtattctgggaacttataacctttcaaaaacaaatcattggcttaactcttcaatacgatggcattagtggaaggggcaggagttggggaacggcgtgaactctgcagtggattccggcacctaaccaaagagggtgctcctgtccatcccttaaaatttacgatttgttttctgatcttaatatcataacaacaaaacaaagaaaacccacaacccagagctccgctatgagtgttgtgctgccttcttcactaactctccagctggacaaaaaacctttccatttcccctgctacccacctcgcccaaaaacttactgattagttttggggacctgccaggtcttgttaaacctgcctgaactccttcgtgatactctccccactcttgtttgctctcaacaccacaatacaccagagtaagcttccttattctggtgtattgtgtaatacagagtgtattacaaccccacaaagtggtcgctaagatatgaggtgacatatcactctttagtatctaaaagtaaaatgcaaatgctggtattccaaaggcctctacaatttgatggccagtggagtaattacatacgggctgtcagcttttaatacattttagtgatttttaaattttgtaagtttatgctatttttctgattacaaatgatattaaagtccaagattctaaaatataaaggatgagaaataaatacactttccattcgctgggaaccctctctttttaatgtccacccaaaaacacttggttaagttttgccattaatctttgtcatacaaacaaaaacaaatacaggaatagacataattctttactgtgcagaaaccaggtctctgtacggattctttttggcaattttcctactcattaactaatgtctccaccagagggttggagaagtaagaagtcaccaacggtcacgtttgctatttaagattaactgtggggccagcgaagtgcctcacgcctgtaatcccagcactttgggaggccaaggtgggcagatcacttgaggtcaggagtttgagaccagcctggccaacatggtgaaaccccgtctctactaaaaataaaaaaattagctgggcgtggtggtggcacctgtaatcccagctactccggaggctgaggcaggagaatctcttgaacccaggaggtggaggttgcagtgagctgagatcgcgccaatgcactccagcctatgtgacagagcaagactccatctcaaaaaaaaaaaaaaaaaaaaaagaaaaagaaaaaaaaattagctgtggagaaaaaagggatggagctgaatacacaaaaactgtaatagtaaaattgtaacttctaactcatacccacaatgaagagacaggtgacgcagtaaaatagtctaaataaatgtaggggcttccacgtcctaacatactcaccaaatcagtatataaccaaaacgcagggatctttgttttgtttacagatatactccaaatgccccaacagtgcccagctcaaacagcaggtgtcctgtctgtcattagatcagtgagctggggaagtatttccccagtgagcataaagtatttcaaaaaatactaaaagatgctggcatcccagttttgccattttctagctgtgagaacttgggcaagttatatttaatttttgtgcctcagtttcttcatctgtggaacaggaagtattaagaaagttaagataaacaaagactggcttagaacagtgcctggagcagaggaagggcttaataaattattaaagaaacaagttttattagaagcaaaggctataaactatcattttccctccaaaacgtaaaagttgtagcatggaagaagaataacttggattacaaaccagatttttacaaatattttaccaaatccctattttatttcaaagcatgacacttcagacaatacattttacttttatgctagaagtgggggggagaaaaaaccctctgtaaaatattcagaacaaggcctggcacctggagtcttatgtctagctactgttatgaagaacttaagggaggcggaaggatctcttgaagccaggagttggaaaccaacttggtctctacgaaaataaagatggacatagattagatgaatagaaataaaaaattagccgagcgtagtggcgcacgcctgtggtcccagctacttggaaagctgaggcaggagaatcacttgagcccaggagcttcaggctacacagtgagctaccactacactgaggcctggtgacaaagcaagacccagtctcaatcaaacaatcaataaaagggaatttaaaaaacgtttgcgtttgtgggtaaaaaaccaaattagacatgatttctaggtatgaagcaacgtggtgggagactgaaagtctaggtaaactggaaaaaaacattatttgtgcctgatatagttatgtggtctctggcatctggtgtagctctgcccttggaaagctcaacttgtcaacatcaccttaaaacgaaaacacagatttggctacacttaatagtgaagtgccttgttggaggaaaacaacaagggggccaagtaaggagacagaaatacctaatctccaagctggttcttaatggaaccgagcaaatgggtgatgaataacccgggaacgcagtaagacaggccagagaggtaatgcgcccaagagaagagagacgaggggcggccagggggagaggaagctcgagaggaatcgctaggaaggaaacggagaagaccacgccaggacagccctgccagccccctacctccggcggggccgcaggggagagtctcactcgagtcggacgccgcagcccggtggggcccgggccccgcttcaaaaacagccggggctgcgtcgccgctgtcatcccaccccaccctccacccgtcgctcccccaccgcgcgccccgcccggcccgtgcgcccgacccaggctccctccctagagtcccgacctctagccctgtaccccacttcccagggtcccgtcctccagccccttaagcccctccccagggtctggtcccccggccccgcacccctccccaggggcccgtcccccggcgctgaacccgcacctccctccccagggtccagtccccagccctgcactcgcactcccctcccaggcccgagcccgctcccgccctcccggccctgggctctcagcaccaggctcccgccctcagcctcttctcctcccgcgcccgccgccgctcctcacctcctcggcggccgccgctgcactcgctgggtcttggttgcggcgaaacccggggcgcagcggcgcaggggtctggagcccgcaggggtcgccgggctgagcgcgctcggccgcttccggtgctgcgctgcggaactcagaggacttagtgctcggcaagcccagagactcaaacaccatatccctgggggggctcctcacgctgtgttcggcagggaggcgagagcgccggttcagccagagacagctgggggaaccgcgccgaacacgctccgggcggccattttgtaactcgaatctacccccaaaaccaattcgaaaaaaagggaggaaagaaacgcccgcgttcagctactgcgcaagcgcgccggcgcttccggcagtagcacctccttccgccggccgggccccttacgcggcgcatgcgcccagctccctggaaaccggcgcggggctgagaatgccggtctcgcgcaagcgcgcacgcgccgaccttgatctcgtagccggcgccagcagccgcgctttggggcgtcggctcacgtggggccggcaacgcgtcttccaggatgttcgcgcgctagtcgccgctgaggggccggcgatgcgcgaggagttccggcgaggaaggtcggtcagtggacatggccgaggcccgcggtgtccgcgtgtgggagctgcagggctgaggagaggccgcccgcaaccctcgggaatcgtgtgaggtgccactggggtcgcttcacatcaggaggccccgtctcgggggacgcgcgcaggtgaccctgctggtcgtacctggccggggtggcccggaggggctgggtctcggcgccaggaggggccgtgtgggccgcctgttaaaggacccctcgttcgctgacatttgattttgcattgggtgccttctcttctgtttttttcagccagtgagatccgtcctgggcactcagctgtagagcaggggaacgagtcctgcgctttttgcgctgaggtctcctggcccgtaggccaggcagcctctgagctcctttctcaccagcagcttgcgatccctcatccctggccctgtcactcccagctgtttccagtgccgccctttttttttttttttttttgagatggagagtttaacttgttcgcccaggctggagtgaagtggcacgatcttggcctactgcaacctctgcctcccggattcaagcgattctcctgcctcagcctcccgagtagttgggattacagtcgtgcgccaccacgcccggctaatgtttatatttttagtagagacgggttttcaccatattggtcaggctggtctcgaactcgtgacctcaggtgattccctccccccgccccaccacctcagcctcccaaagtgctgggattacaggcctgagccaccgttcccggcctcgagcgccttcttataaactggatggtggtttttgttttcaccttcaaagtcgaatctccctagtccgtttattaccagaaagaggtctccactcagacccagcgagaggcttcttggatgtcgcgtaggaaagaattcggggcgagtccacggactaaagtgaaagcaa

SEQ ID NO: 9474 - DNA, 6000 bp, Homo sapiens
gttcctgggcacaccaggccctgaggtacatcgcataggggtgcctctcagagaaggtgctgcccacccctctccaaaacagggcccaagacgccctgcgggaaaggagcaccatcagcaccatttattccagcaggtcccacatttgaccacaaagcccttatgtgatacccccaacattccaaagaatttcaactccatggaccgtgacccgtgacagccagctaagaatgccagggtgctgactggagagccaagaggcacccgggggcccagggcaggctgctctgagtgaggctgggtcagcacccgacacctcactcccagatcagcccagctccatgtgccagggccctgaatggggctttccacctgccaggcctgtgtagacctacatggggaccctggcctgtgcccactcagcccctcctaaggccactctcgaggtgtgccaactgccctgcctttcttctccacctcctggtctggctgctgtgggttgcctccatcggacaggacacagctgcggaacagtgtcagcatcaccccatgccccgctgccctgctgccccgcagaagaggccccgcaggccatagcaggcaagaccagaggctgtatgaaagaggcaggggagaggtggccccaaggcacccactgcacaaatggctgcccagactctactcactcaccatcacctacccggccagcccacggttgtcaaagcctcagtgggctaggaggggcaggatctggccctgctgccgagtcccctgaaatcagcccaagcatcgggggagaggcacgtgaccagaccccagacctggtgggtgccagctgaggacatggtggggtgggtgtgcagagctgcatctcccagtgtccagctccacggctgcaggcagtgcaggaggccggtgcaggtttggataaataaatgatggtgcattctcaggaagggattccacacacaccagaaaacccatgatgcacaagaatagttcccgatgtgcaaaatgtttaaaatacagcgataaaagaagaaacggcagcacagaacacctggtgtgggggagcccagctgggccccagggacagtgcagggagatttgtggggtggggcagcatgcccgccgctccgatcgggcttccctgggccactctgtgacctcctatcctttaaagcatttaatcctagagatgcccgatgccaaggatcacaccccttgatttgcctggctcagaagagaatctgacaggctaggaacgaacgagtgaatgaatgaacaaatgagaaagtgaatggatggttggggcaaatgcagcatctgggatctggctttgaggagggtgcctgtgaccttggcctgggtgcagccagaccgcagagcagggacactgaggggtgcagagagggacccgagagggcatctgcacagctgcagaggcagcaggcggccaagccagctcccgcagaccctgaggcccaggccctgggtggctgcagagggtcaggcagaccagcctgggggtcagaggtcaggctcaccagaatgggggcgggacggcatgaacctcattgatcagatagtagccaagtgtcaggagccctcactaaccctgtgccagggccgggcggggcgcctggctcacacacgcatttgttcatttccaggtcatcctgaaactccccgtgtgcttcctgctcttgacccctttcccaggtgcacagaccaaggctcccggtgagaggttccgggccacaggcccaggacagcaggagggctcctctgcctcccgcccgtcctgtcctcaccagctggaccctcctggtgttgcaccggctgcacagggccgtccgtgccacaaagcatgaattcaaggctggggcagggacgaggagagggcaatgctacaaggctgcactgttcctgggcagagggagggggagagcacggtcccacacaccctggccctcacagcctgcctgtcactcacagcaacagcaaacaaaccctggcccctccacaggctgtgggccagttcccagcctcccaggacagcaggaccttcccccaccttccagggccccagcccctgtaggggtgtcctccatggaccctccacaagccctctggctttcagagacgtgctgggccaggccctccctcagcctctcccctgcttctcactccatgcaaacctacgtttctgccagtcccagcagaaggaccctggcacggggaaactgaggctcaggggttccacagacccccaggtgaggaacagggggagggcagggagggagtgaaggtactatgggagggtctcccaagctgggcagcatccctgccctgtcccctctccactcacctgtggcccgagttgcctgactaggggcttttattgtcccttctgcacatggatggggtgaggggccagctggcagtgcaaaggtcccaggaggactctgctgagtgggggtgtggggaggtgttgtgggcattctgaggcagaagcaccagagtcagaactccacagggaaagccgggccaattccgcccagcctcagcctggaagtgccccgataatccctgaccactggcccatggtgcaggtgaggaagactgaggcagagaggcgacctgtcacacccaaggtcacaccgccagcaggtggctgagccaggacccaaatccaggtcacggttctgccacggcaggccctgcacgtgcccctctgccaggtggcgtctaggtgctgatggccacccattcccacccccggcatgggagctcacttcctcctcacctcagtagagaagaacagggaacagtaccccctttatagatgggaagactgaggcttagaaaaagagactggccagccccactgcttcagctgcccctctgctagtatgtttcaccctcacacaacctacaaggataacctgctggtccccactctatagatgagcctctggtggtggccaggggagcaggaggtgtggcctgccaatccaagccccagcccagggcccttgccacagtgctagtgggccacccttgcccatcatgcagcatggcatccatctgctcagcaccctacacaacaccggaggtaggggagcccaccacagaacccctcaccaagaaggtcctcaccatggagaaactgaggcactggaggcggggcctctgcagtcacgctgggtcacgtgctccagtcagccaagctgcagcggccaccaagggtgcccagggtctggcctgttggtcacagtgttgacctcatggcctgaaatgggtcttccctgcccagacaggttccagcccaccatcatctatctgcctcagccctggtgggtagggagtggctgggagaccctgcccctcacaccctgggctttgcggtattcaacgagcccccaacacacattccagggcctctgctccagattaggccacagcctgtctaggcacacaaggggcacccacaccctggaggcaaagagacatgcctatgtgcccgcaggcacacatgatcacgcgcacagacacacgtgcagatgcataccaagttacacacacgcacacaagcccgaggcggggacccccaggacacggaggcaggcaggcagaggtggggcccaggatgtcttgcccctgtctgtgggcctggcctccccactcaacagacgagcatgtgggtgcgggagtggttattgcgaaaggggccccagcatgtgccacccgtggagaccacagcaggcatgccgcgtgcatgcatgtgtggccgtgggtgtgcaggcgggggcgaggacacagatatgcaccctcagagtccgtgtgtgcacccagtgtttgtgcatgtgcacactggggcggcgttggcttgcatgtgcaccagaggtgtgcaagtgtgcagtccgtgtagacaagtgcacgtgcaaggaaacgtgtgtgcagcctgcggcaccatggacatcagcagggcagcctgggtgggcacctggggagcaccctccaggcggggcatgcccaactcacatggagcccaccctcccttgcccgcaccgcgggacctcacagccggtggggcgggggagtcccacgagggctgctagggaggggttgctgattgccccaccgcccctgattcccccagccaagcctctcaatgtccctcgggctgcagatggtgggcgttgctgcctcctctcaccgcccgccctggaggcagcgctgggacaaccctgtcccccacgccctctactgccgccaacgcccccattcatcccactgtggactgacctcggagaaacgggaggttctgagcccagaccgtgaggctggggtggaggcggcccgacacccccacccaccctcggtacccacgtttctgcaaaaacccgctcgttaaccccttggtggccggggcgctccgaggccgggccccgcccttccagcccacggcccccgccctcgacttggcccagcatcggggaccctcggaccgccaccctcggccctgccgaagccgtcaactttcccgggaagcggcaacttttcctgccgcctccggctccgccctcccggggccggggcgccagcggccccagcctggcgcggcactgcggtggctttccctgccgcccggctacgcttccctcgcctcggcagcccgggacgggccctgcggctccggggagggggcgagccgcccccctccgcgccccgccgccggccgggctcgggtgcagcgcggacactcacctccagcggacgccctcttcatcgtaggggttgggcggggcgcgtcggggactgaaagtcgtttcggggcgggcgcccgtctccccgcggccgggtccgcatccaggcgccgccgctacggcccggccccggcccggccgcgggacgaggctcggcgcgctccgctccgcccggctctggctgggctcgggccgcgggtgcgcagggcgcgcagggcgcacagggcgagggcggcggcggcgcgggggttggggcgtgggcggcgcggcgggccggggcgcgcaggccgggccgcaggaggcgctcagcccgcccggtgcaccggcgccgcgcggtcccagacaaaggcggcgcattcctgaagaggcggcggcccctgcaggcggcggaggggatggcggcccgggccggagccggccggggacgcgggcccgagggtgtggcggcctaggctggcccggtccccaagcgggcaagggctttgtcccgaggcctaggaatggcctctgcctgacccactcccttcctggcctcacgaaacccatgaatcccccgccccctgcacagaagccccttgctgcagcacgatcgcccccatttttcagtaagaaacaggctcagggcttaagagagttctgggggccctcctgggcctttgtggccctctctgcaccatcctagagaagggacctaggcctgatgttacccgtaaccctgcaggggtcccccacctcttcccttctgcggaatgggggctccaaacccagaagacgctctccgaggtcacctgcttagtatccccccactctaccaagccagccccccacgggcggtgtgaggcatggggccagagaatccagtgacgcccctgcacacaccacacaggggtgcaggtgtcccttctcaatcttctgctcggggcacctaccgggcctcaccgatgagctcctaagtgcatcccggggtcttcagacaactgccaggctgcccctgcacctggagaagtgctgggagtcagctcagccgggctgggtcctccccaggcccaccctgcatgagaggaccatgcagatgagggtcttgcaggcccacctggtgtcagtctgtaggaccctgactcaaggacggagtgggccagcctgatgccttgatggcccccctcagagcccaggtccactgatatgaagcagagagacctggtgactgggcacccctgtgccctctgcc

SEQ ID NO: 9475 - DNA, 6000 bp, Homo sapiens
gtatgttttgaaattttgaaccatgtgattggaatctctcttcataaaaattaaaccttaggaaaaaaaaaagaagaaatcatgcttactaaacagggaaagagacgagtggcttacaagtctccctgtagttctacaaagcgcctaccaggtcggcctggggaaaccgccctgctcccactacttctcctctgttcttttgtggtcatagcctgtggcctgagcctttgtgagaaacaatccttgccaggtttcacagtaggagaagggcagctctctttgctagaggtgacttaactaagccattttcctgccaagctgggactgaattataatcttcccaacctaatataatttgtaaagtcctcatctttgacataaatctgtcatgtgttggcatgtttcacagtgctggggtaaccaggcacctaagttgggtgattagcagggtatgctggaatttgctggaagccacactgtgcactgagggttggaagagctcatactcctctgttcccatcccaacaccaaagggaatgaaagagtgattagagtgattcaaagacagcttggagcctgtaatccagcactgggaggccaaggtgtgcagatcatctgagctcaggaattcgagactagcctgggtaacatggcgaaagcccatctccaccaaaaataccaaaaattagtcgagtgtggtggcgtgcacctgtagtcttggctacttgggaggctgtggcaggaggatcacttgcacctggaggcagaggctgcagtgagccaagattgcaccacggcactctagcctggttgacagagtgagacccccatctcaaaaaacctcccccaaaacaaaacacaaaaacaaagacagcttggagaacactgggtgtggtggagatgtaggtcatccctgactcccagggcttctcataattgagaactgacccaatcctggaaaattccaacatgttgtctcactgacaagagcacctgtcacctgcccagtcatgaccacactgtacttctcacagcaatgcctggcctggccaagcctgatatgcctgaagtgccactctgcctcagctctcactgtccccactgcatagaaagacctttgggggcagcacggggcatgtcatcacaatctatatcaaactcaccactattacatttttgcctctcctgcgctatgagaccagaactttccctatgacctccaagggctcctaagctacctcctccatcccctgtcctctaacacacccagtctatcatgtccctcctctggacccaggagctctgttgctgggccagtgcatttgcatattttcctgtcttccctaagaacatccctcattctcactcctcttgtgtaaacctcagccttaaaagctagattcaagtttatcctctgccacaatgccctactttgaatcattgattccctacttcatttgttctcagtttacaaagatgtctccttaaatagttgttagttgaattccttgggcttgagatcctcaatcatgtgacccattcaccagggccctaaaacctcaggcaatcctctcaaatctaagccaagacttcccatttagaatggaacataggaatccagtaggtatgagatgtaagaactacaggcaaaacctccctaacaaggttaggaccgggcgcagtggctcacatctgtaatcccagcactttgggaggctgaggtgggcagatcacctaaggtcaggcgtttgagaccagcctgcccaacatggcgaaacctgtctctactaaaaatacaaaaatcagaggccaggtgtggtcgctcacgcctgtaatcccaacactttgggaggccaaggcaggtggatcatgaggtcaggagttcaagaccagccggaccaacacagtgaaaccccgtctctactaaaaatacaaaaattagctgggcatggcggcgggtgcctgtaagcccagctactcaggaggttgaggcaggagaatcgcttgacctgggaggcagaggtagcagtgagctgagatcgcgccactgaactctagcctgggagacagagcaagactccgtctcaaaaacaaaaaacaccaaaaaaacaaaaacaaaaacaaaaacaaaaaaattagccaggtgttgtagcaggtgcctctaatcccagctacttgggaggttgaggcaggagaatcatttgaactggggaggtggaggttgcagtgagccgagatcacaccatcgcactccagcctgggtgacagagtaagactttgtctcaaacaaaacaaaaataaaaaaccaacagttaaacacagggaggtgggctaggtgcagtggctcacgcctataatcccaggactttgggaggccgaggtggtggatcacgaggtcaagagatcgagaccatcctggccaacatggcaaaaccccaactctattaataccaaaattagctgggtgtggtagtgcacgccttagtcccagctactcaggaggctgaggcaggagaatcacttgaacccaggaggcggaggctgtagtgagccaagttggtgccactgcactccagtctggtgacagagcgagaatctgtctcaaaaaaaaaaaaaaaaaaccacagggaggtggatcaatgagggatacatgaacagagagaggtggggaagggaattaacccaagaaaacagcaaggggaaatgatagcgtgttgctctgtcgcccaagctggagtgcagtggtatgaacatggctcactgcaaccttgacatcctgggctcaagcggtcctcctgcctcagcctcctcagtagctgcactcacatgtgtgtgccaccatgcctggctaatttttcaaattttgtagagacgcagttacccctgctggtctcaaactcctgggctaaaatgatctgcctacctcagccttacaaattgttgggattacagaagtacaaccgcgcctggcttatacatttttttaaacctttttttttctctgtccaaacaaaactgtttcattagcaggctgaagagagactgtggtgtacaataaagaatcattctcgaccggtatggtggctcacgcctgtaatcccagccctttgggaggccaaagcgggcggactgcctgaggtcaggagttccagaccagcctggccaacggggcaaaaccctgtctccactacaaatacaaaaaaaattagccgggtgtggcggcgcacctgtagtcccagctactcgggaggctgaggcaggagaatcgtctgaatcccggaggcggaagttgcagtgagcccagatcatgccactgtacccaagcaagggcgacagagcgagattccatctcaaaaaaaaaaaaaaaagaaaaagaaaaagaccctccaggatctcggtctgttgcccatgctggagtgcagcagcacgatctcagctaactgcaacctctgcctcccgggtacaagcgattctcctacctcagcctcctgagtagctgcgactacaggcgcaccgccacacccggctagtttttttttttttttaattttagtggagacagggtttcaccatgttgcccaggcgggtctcgaactcctgagctcaggcgatccgacgcctaggcctcccaaagtgctgggattacaggcgtgagtcactgcgctcggccagaataattgttattgaaggtactactctctgaaatctaaggatgggaagaactgatgaagatgagttggagcaacaaactcttaacccgcacactatttgtctaggatttgggaagtaaaggtaagaccctggactcaatcaaacccaggctttggtcaactaggcagctgtctgggctgaagggacttcaatacctctattggttggttaggtggagatgtcaatgatgcgggaagaactcgtggaccacctgccctgatgcttcagggtatcacctgacactcgcaggcacatagtcctctctttctggctcactccggaaggaatggccaaaaccctgtgccagattttgcacaggaaataatgtcgaagaaacggactctccatttcccaaacctaggacctgctgttcagaatttttactcacctggacagaaaataatctggcgtttccccgtgagctaggcgtaagaaaaaaaaaatcaacgaagcagactaatagctaaggaagatttctggggtaaactgccctcttcaagtactccagatgcacatacctttacatagttaacagattgttaccaccatcgagtcactaaggtgcaagaatctatgctaggcaacttgagaattctcaaaagattgtgagcaaaacatttctcgtctccgtttgacagcacagagaccggcgagtccacaccagccctgccccaggctcacctcggaagaggcgaccccaaccttctcggactcgtacatgagggccagggacctgctggtgctggcggccgtggcctcagccctgcggaggacctcctgccgcaagtactgctgcctgtccgcgggcgcgtcgggcccgtcggggaggtctcgggcgtccctccaaggggccggccgggcgccttcgtcctccccgtcgtcgtcgaacggattgtagcttttagggtaagctgacatggtgccggcgcggctctcggtctgggaaacagaaggaggagccccactgccgccgccgtccagggcctcgccccgcccgccgaccccgcggtcgtcgcgcgaactccttccgcgcgtcgcgcgcaggtggccccgccctcggagccgaccatcgcgcaggtcggctggggggggcccacatccggcgcgcgcaaccgcagcctactgtccatcccctctctcccctgcagcggtgggcccgccccgcagccacgccctatctagtgtcagcaactgagaggtcacgtggcgggaaagccggatgcacctacgcctgcgccctgaggtcgggcgctcgcgggccaggagcggggagccggcgggcagcgccgcggctcgtgaggtgatggcggcggccccggcccggggaggcggaggcggaggcggaggcggcggcggctgctccggctccggctccagcgcctcgcggggcttctatttcaacacggtcctgtcactggcccgctccctggcggtgcagagaccagcatccttggagaaggtaacgtcggcgggctgggccgcgggctgacaggaggaggggctggggtgacgaagcgtggaggcgggacgagggtctgtgggaggccgaggctgggctcgccggcagcctgtgcgggagggggcgcctgagcggagggatctagcgggggaaggaggccctagtgggaggggctggtgaagagagagggaccgtgggggaagggtcggcggggcctgcagggccgctgcaggtgggtggttgtgggatgggggtgggggatgtgagctgctggcccagggagcatcttgtgacatcgcggaggtggaggctggatcgtgggcggctgtgcggagcagtgggatgagccgaggaccaggggtcaagacctggggttctgcttccgatttcacctgctttttattccgcgaccttgggaagatggctttcttgtaaaatggggatgcttttatctgctttgccggcttcaccggactgtggtgaccaggagacgaaacactgtcttgaaagtgctttgtgactgtaaaccaactgcgcagtgttattctacgaggctgggggcgttaggttgggtaaaagattgtgcgtttgcagaagggacagtggcagggaaaggagagtgaactgtcagtgggcagagaagtgaacttggaattgcttcagaagagaaaggtgaagtcatgccagagcaatcctcatcttgggagaaaggtgaaaggcaactcagtggtgtgccttgagatctggaaagagacagattttagagtgggacctgaatttgttccctgcactggcacttacttaccatgtcctcttgggtaaatttaact

SEQ ID NO: 9476 - DNA, 6000 bp, Homo sapiens
cacctgtaatcccaactgcctgggaggctgaggcacaagaaacgcttgaacctgggaggcggaggttgcggtgagccgagaacacaccactgcgctccagcctgggtgacagaacgagactctgtctcaaaaataaaataaactaaaataaaatcataaaaataaaaagaatcatagaccagcaacttaggggatggcatttgggcctgggcacagcactttagaacttggacaaaccagagtgcttccagcttggtagtggaggggacggggtggggaccaagatgcagaggggggttgatgctatgtcaccatccaaaacacattgtaaggccctggcactgtttctgctggagaagagaaagaggttagaagagggaaaagcattaatcttatgtctgtaatcttatgtaaaggacagaacaaaaataaaataggaatatccatgaataaagttctggagactgaggcaggagaatcgcttgaacccaggaggtggaggctgcggtgagggagatcgtgtcattgcgctccagcctgggcaacaagagtgaaactccgtctcaaaaataaataaataaataaagatgaaaatgctagggtttggggtagtttcccaattttcccaaggtgcatagccatgatcagttggctgaaggtgtatatgcgtctgcgtgtgtgtgtgtgtgtgtgtgtatgtacctgtacacacacatatatggtatacgtgtatatacatatggtgtgtgtgtgtctatatacacatgtatatacttatccttgtattagtaacatgtgaggcacatcattaaaagatgcattttcggcctggtgtggtggctcatgcctgtaatcccagcactttgggaggccgaggcaggtggatcacttgaggtcaggagttcaggaccagcctggccaacacagtgaaaccccgtctctactaaaaacacaaaaattagccaggcgcggtggcatgagcctgtaatcccagctactcggggggctgagacaggagaatcacttgaacctgggaggcagaggttgcagtgagccaagatcacgccactgcactccagcctgggtgacagagcaacactccatctcaaaaaaaaaaagttaaaaaaatgcattttcactcatcatattggcaaaaattaaaaagatgaataatacccatggttgatgaggatgtgaagaaaaagacactgttattactggtggaatcagaagatgctataattctttcaagggcactcaaaacttggcaaaattgtcaatgtgtacactttttggacagcaactctacttctaaaattttacactccagaaagacttggacatgctcacacccaatgttctctattgttgataacagtaaaaaataagaaacaatccaaacaatttgggtgtagccaaataatttgtggcacattctttttttttttttttttttttgagacagagtctcactctgtcgcccgggctggagtgcagtggtgcgatgtcggctcactgcaagctccgcctcccaggttcacaccattctcccgcctcagcctcccgagtagctgggactacaggcgcctgccaccacacctgggcaattttttgtatttttagtagagatggggtttcaccgtgttagccaggatggtctcgatctcctgaccttgtgatctgcccgccttggcctcccaaagtgctgggacgacaggtgtgagccaccgtgcccggccagcacattcttataataaaattgtgggcctaagccgggcacggtggctcatgcctataatctcagcactttcggaggctgaggcaggtggatcacttgaggtcaggagtttgagaccagcctggccaacatgatgaaaccctgtcactactaaaaaatacaaaaattagccaggtgtggtggcacacgcctgtaatcccagctactcagaaggctgaggcttgaacccagcaggcagaggttgcagtgagctgagattgtgccactgtattctagcctgggcgacggagcaagactctgtctcaaaaaaaaacaaaaaacaaacaaacaaaaaaaaccaattgtaggccaggtacagtggctcacacctgtaatcccagcactttgggaggccaaggcaggcagatcacttgacgccaggagttcgagaccagcctggccaacatggcaaaaccgcatttctactaaaaatacaaaaattagcccagtatgttggcgtgcgcctgtaatctcagctactcaggaggctgaggcatgcgaattgcttgaacccaggaggcagaggttgcagtgagcagaaattgcgccactgcactccagcctggacaacaaagtgagactatatctcaaaaaataaaaataaaaataaaaataaaattgtaaatagcaattaaagacagtgagatagctgtatatgaactaacctgaaagacttctgacatgctttaacactgcgaaagcaggttgcagaatgatgtgtatggtatttcccccatatgataagacaaagtgaaaataaaagaataggccgggcgtggtggctcacgcctgtcatcccagcactttgggaggccgaggcgggcggatcacgaggtcaggagatggagaccactctggctaacacagtgaaaccccgtctctactaaaaatacaaaaaattagcctggcatggtggcaggagcctgtagtcccatctattcgtagtcccagctactcagaaggctgaggcaggacaatggtgtgaacccaggaggcagagcttgcagtgagccgagatcgcaccactgcactccagcctgggcaacagagtcagactccatctcaaaaaaaaataaaataaaataaagtaatatatgtgtgtattaaaaaaaagaaagaggccaggtacggtggcttatgcctgtaatcccagcactttgggaggccgagttgggcagatcacgaggtcaagagatcgagactatcctggccaacatggtgaaaccctgtttctactaaaaatacaaaaattagtcgggtgtggtggtgtgcgccagttgtcccagatactcaggaggctgaggcaggataattgcttgaacccaggaggcagaggttgcagtgagctgaaattgcaccactgctttctagcctgggtgacagaacaagaccccatctcaaagaaaaaaaaaatagaaaagaaagaaagagatctggaaggatacaccaaactgttcatagtggttaaacctgaaaaagggaataggatgactgacttgaatgaacttgtcattttataggttaaaaaaaggtcaaattgtgacaatttcatatggtacaatataaaattatattaaatatactcgagatttaatgaattattacaatgagaatatattcatgtattacttatgaacaaaataaacaaaacacagttaagaagcagcccccagcatgcctaaaatctagagacatttgaagaaggagaaataagtcaagtccccactgatgctaactgcactgggcctgagcacatgggctggacacaacaagtttaggggcctggctctccccttcagttgcctgctagaccttggcccagctgctttacttctcgggctttaactgggcaccttactcatgaccgcactaattctcataacactacagctgggagctgtcatccatgtattacagatgaggaagggtctggattagctaccttttaagtcagatctaataatccacaaacagctcagctgagatcctgggattctggggcatccgcgtgcacttgagatacaagctgtcccactggcccatggcaaccttctttctagtgaaactcccagggcgagcgtgctccgcacacaggaagtgaagggggagcacctggcttccaatgatcactctgcggctcacccacagtgggaccccagcatttatcccccttggacttcggcttctttctttgcactgaggaataataatagtacctggctcacaagatgttatagtgttttagtgtttataggaagctgtgcacttgatcctcacaacgaccctgggaagaggatcgagtaagtagagccttcccagtccacagatactgatactaatcactaatcattgtgtaaaggttttccgtttgcaacaggccataaaatatattatcttactttaattctaagaaaacaagggcggaatctctggttttcatcggattctcaaagatatacgtgtcccccaaggagttcagaggtagccatgttacgcagatgcacggcccccagggctgtcggactcaagtaacagctgtcaacaaacgttcacacgcacgatctcatgcaatcatcttcacggcgacctacggggaggaattaccgccccaattcacaaccgcggagacacacagaggagggcggccaccgcccggggtcgcccggcctccgtccccttccccaggccctcctgaagcctctctccaggcgaggcccggacgtcctactcagctcgggcccccgagtgaacccaggcagcgctggccggcgacgccggactcggagacgtacctgacgcgtcccagaagccggggtccaagcgctccccgaacccccagcaaggactctgtagcccagagttaccttgacccacccgcctcctgccgcctgcccgccacgcgcatgcgctgccccgcccggcctctaccaccgaggaaaggggtaaccggcgcgggggttcccagcgccagcctgcgccaatccccagaaactccgtgaatcacctcgggatagcaaacggattatacaaaggcagtgtcttctggggtccttttcatgcctctaggaccaggacctgcattcaccctctccactgacacattggtctgggcccccggcccggctgtcaccatagaaacggcatctcgcggacaacgcggcggctcacgaaggttccattgttatgctaaacgggaaagtggagaccgcgccggcgttgcctagagaacgcctggactcagagtagcaaaatgggcctctccccaactcccctcctcatcccccagcacaaggcaaagggcaccccttgctgtgagtttgggggcaccggctgtcgggggccgacccagaactttgcggggtcccctgagggacccgtggcgggaccggccccgggttcgtcaaattccgccgatgctttcaggtaagacggacggacagacgcaccatgacccacctctggcagcctgccccctccccgtgccgttatggcggcttctacaagcaagggaagctgaggcccagggactacttaaaggttgcattgtgaggaagggacagagaactactggagaatcaactccagatctcctagagtcctaaaagcgtgtgttattggttccgtctgataagtgcagaaacttaggccgttcaaggagtttaccggctgcctagtgggtgtatcagggcatccagtgaggggcaggacccaggggtctttgactccaagcgcagttctcttccaactacaccaccctgcattaaaagaggggagacttccatgtcctagaactaaaatcttcacaatctggcttagcattgtgcaatagaaacataaagcaggccacatatgtgatttggaattttctagtagccacattttttaaaaagtaaaaaagaaagccaagtgaaattaatttgagtaatgttttaaactccatatgtccaaaacattactatttcaagatataatcagtatttctaaatttgcactgcttccatttaaaaatttaattttttttttttttaagacagagtctcactctgttgcccaggctgggattgcagtggcatgatctcggcctcccgggttcaagcgattctgctgtgttcacctcccaagtagctggaattacaggcacccaccaccatgcccggctaattttttgtatttttagtagagatggcgtttcaccatgttggccaggctggtctcgaactcct

SEQ ID NO: 9477 - DNA, 6000 bp, Homo sapiens
ggagccccaaggacggcgaagggcagcctggagttggggggcgtcagcgagggcgcgggcaggggagagaggcgcccctggaagtggagccggcctggacagaggcagggttcgggagcccgcccttccccacccgagcgcgcgggccccagcgccgtcctcgcccctgtgcagggctgagggcccagacccccgcgggccgccctgtgccggcccctactcacagctcgggttcactcctgtccgtgcgtggggccagccactctggcccgtgtccccacgtccttcaggcctagccacccccgccccgccctcaccaggaacctgacacctactcccaaatcggggtcggggaaaaacgtggggcgagaaccagaacccacccaccttccgcggtgggaattgcagggcgcggctgggtttctgtgcggtgaaggttgctcaaaggtctgggagcctggggggccccagagtctcgtgaggatggtggctttagagctaaaaatagccaaatgtagggaaaaggtcaccgatgtgtcagctgctgcctgttctgggatcgctggtgctccgggcggcatccccacctcagggtcgtcttcatacccccatcactctcctcctccccaagtcctagtatttattattctaagctgcagccaggggactggggagggatgggggaccccaactggcagcatgaacgctaaccactttcaatcccagagcactgaagagtccctttgtgtgtactgctcggtttggtactttctgctgctgctcagcagggccaggacagggtgggaagaagaagcttgtttattgtgttacatacacagcacggggctctggcctgccagccatggggacctactcaaactcaggaacaggccggtctcctgaacctcagtttcacttgggggctcagcccagtcgccagggccttctgctcgttgttcctccctccaaggtcctgccctggaggctccaggagaaatccaaggagtgggagggtggagtcaggatgaggagtggacactggtcagctgccccttctgctggaagtagaactggaaccgagactgggcatagtcctagggaaggaaacccaccccacacagtggtgagaagacgtgggaccagcattctacatccacctcaggctgcccacagccacccgggactccccaggcctcctggaagagtgtggctgctgctgctccccagccccccagctagcattcccatccccagggtcacttaccaagtaaccaaattctatggtggacatggatgcctggaggatggaccacagaccccagaagaaatgggatgccagagcatacctggggggagggcaggaaaaggaggggcattcaagagcatgtctagcactgcttggatcccctcacccaggttggccaatccctacagttttaacttctcccccactgtcctaactccactctccacagccaccttccctgcagcttgataaatctgcctcttccccaatccctctttcctctgctctgccctaccccaccctgcccctccttcctcaccgactgacttctaccagcaaatcttcttccagttttctctgctcctcttgggagagggtctcacctttctttgcctctgccaggtaatgacgaataaaatgcaactacgatcaatggccaagagtcaggaattggggagactgtggagtatttcccaggtaacatcctttccggccattccttccagactccacctccctccttcctcacaggatgggtcctgctccccagcctctggcccacatacctgctgttcttgagtggggtagtctgtgggccttgctttgtagaaaggccattcctcgtgagtataatcataaacccactcacaaaaatggttcccaatgtcaaagcccctgggagaataaggtggacattcagtccccaaatgccctgggcagctggcctgttttcaagagccctatgggaacagatctatgggaagccatctttccagcctcacctatagttataactgctgtactcgaagtccaccagcatgaggctgtcagcattttctggctctgagagcagcaagatgttccctgggggaatggggtgaggttctgctcactccagagccctctggctcttccatcttgggttaggagactcagatgccttctcctaccttcctggatgtcattgtggcagaagacgactggcgatggggtagactctagtaacttcctacaggggtatgggagcatgggtcctgagcaggagtgactagaggaggatcagagccaccctaacaggccaggccctgacaccagccctcagcaactactggaagggcggacaccattaccattagccttgtcctgcctgccctcacctgaggttgcccatctcatccttcaggctgtacatctccagcaggttcatctcagggaggccagttgggggcaggtcctggatctgttttaggtacctgaagcccaaagaataggatacactggctctgctattctttcccacccctcgcctatctacccctcaggccagactactgcacccctgctcctatcactgtgtgacttgtccggcaatcatttctttttttcttttgaaatggagtcttgctctgtcacccaggctggagtgcagtggcgcgatcttggctcactgcaacctctgcctcccgggttcaagcaattctcctgcctcagcctcccgagtagctgggactacaggtgcatgctgccatgcctggctaatttttttgtattttaatagagacagggtttcactgtgttgtccaggctggttttgaactcctgagctcaggcaatctgctcacctcagcctcccgaagtgctaggattacaggcatgagccaccgtgcctggccttggcaatcatttcttttttctttttttgtttggtgttttgagacagagtcttgctctcacccaggctgaagtgcaatggcatgagctcagctcactgcaacctccgcctcctgggctcaagtgatcctcccacctcacccacctcggctcccaaagttctgggattacaggcatgaggcactgcatgtggcctctggcaagcatttaaaagcctgttctgtgacagcccatgacatcagatccactcaagtggagggctggatagagcccccgacacatccgctggcatggaggttcagctcaggagtacaggagccctgaggaggctcctgactcaccgctccatggtcccaaacagccagtggggctccttggtgaaaggcatctccatgccatgaaattgcgccatcttcgtggcaatggctgctgacaacactggctctcgaagctcttgagttttcaatggccgactctgcacccaggaagctatcagggtggtgatggggctggggcaggagtgggaagggctggggcaatgaggggaagtcagggttttgggggaaattccctacttggggtgagggatgtggaggcagacattgggcactggggtagggttagggggtggaggtgccttggggaggagagggtaggactgggcccgtactgggatgtactgttccagccggccctctgggaagactccgtacagctggggccccagcgaccgctccgcaagtatggcgaacatcacgctttctagcaccagggagtccacgccctgaaaaaggatggacagcaaaggggccaaggcaaagtggcacagggacacacatgagggctcgccttcctcccaccagagctgcgacttctgatccaattgcctggaggctctggagcacaggctttagcgttggtctatttttatttagagatgggggtctcactatgttgtccaggctggtctcgaactcctgtgctcaagtgatcctctcgcctcagcctcccaaagctctgggaatacaggcccaggcttcggtgtaatgaggtgttactcagaccgtgaacctcggtgtcctcaactgcgcaacgggaacaatactacccgcatcgcgtaagcgacaggccctaaagccactggtgctgcggcgctcacacccccctcacctgcaagatggctccgtacagccgcagaagcacctcccggggctcctcgccaacgctgggcaggtggtccgggagcgagcagcggaagagcaggttgctgaggcctccgctgcagacccacaccaggcgcgctcagcccgcggccggccctacctgccgcggccccggccccctcccggccaggccggccccgccccgccccaggcgcgggcgcaagaggggggcgaaaacatggagcatcctgagggccccgcggctgacccctgaccccgatccgcgcaccggagaggctgacccctgacctcccacctcacggggtaaaccctcagctcctcgggctgcactcggcgccaggccccgcccaagtactcccggcaccattggtaggctcggcgctcggcgtcacgcgacagcgacgaggcgcgccgccgttttggggtagtgtccgggcacttagactgctgcaagccgtctttggccaggcagccgccaacagccccgcttccggccacagctgtcgcctcggccgccatggcgcgggctcgaccgggccccaggccaggctgcgctccgctcccttcggacgggctcggttccttccggccgcgctcggctcctcttccggccggcctgggcttctccggtcatactcgggtctctccggctctattcggctcacggctgcggcgctcggctctctccgtgccccggcccgggggctctttccgaaggccgaattccgcagatctctgccgggccccgcccctatgggcaaggaccaatggtctctctctgggcggggctgctgttggacggcctgggccaatccgaggcgccggaggccaatcagttggcggagcggcgcgtgcgcgggcgaggaactgcccgggcgcggtagcgtacgggaagaccggagaggagctgcgtctctgccccgtgggagccggcggggcggcggggcggcggctgcagctgcagctccggcgcgagggctcccttgccgggccctcttccccgacccctggggcgctccgacaaggaagagccgtccagcgcgcgtccgtcctgagcgtgggtgaggcctggaggaggcgcgcgcgctaggcagggccgcacagcgcgggcagagtgcgggatgcgggcacccggtgggtacgcagtaaacatttgctgaaggaatgtgacccttgggacagttccgatgactccagttgcataaatgcccagtctacacggggactccctggccggtagagccgcacctctgaatgaggagtcttttgctgccccgcttgagatgcgcgtcttcattcattcccctctccccctatcctcctcgtctcctccaggcctagaaccaattacagagtcaaacccaagagccgaagaaagtgaagactcgcagcttgccgcagccccctcctcggcctgcgcacctcccattgagggcgtcctgatttaaacgcgtgcctcctgcatttctgcttctgccccaggctagagcggcgaccaggaacgctggacccacagagatctgtggcaatgtctgtcgaaccatggtgttctttggggcatctgactagagtattgtttgataaccagaaagaaatcaaaaattggtgatcacaaggctaatgtcacttttgctgcagtggaaaatcatgatcattctgtttaaatctgagtcagttttgagacctagagcccattaattgacaaggaggcttggttcctctcaggaaggatcttacaataccagcatctgagcatataccaagaaatattcctccaatccttccctaaagggacctagagccactttaaaaagtaactggtccgggcgtggtggctcacgcctgtactcccagcattttgggaggccgaggcgggcagatcacttgaggtcaggagtt

SEQ ID NO: 9478 - DNA, 6000 bp, Homo sapiens
ccagccattccaggctttcagcttcacgtaccttcacaggccaacagtgcgagacaccagccgttagcactgccactccacgcatgctggaaaagtggaaacagattcctgaggttcgaaagtcacgcttgcgctcacgtttgggagatccgggtaaagggttagcagaattctctgaactactgtcttagtcgcactactacaaatctgaaaacgcatcaagatggaaagtttggagaaaaaatcacacttgagaatctttcatactgtaaccagtgatctgacacttccagctctgtgaatgtttttctaggcagaaggatctcagtcgcagaaccctgagtctgaccaggcctgggccacgagggcaatggagggtggtaaatggcccctgccccccagtctaaatctggcaggagagtcagcaaaacccaggcttggccccgagggaaccggctgaagaagacggaatgggaggctgaggggtgccagttagctgggtgggaggcaccaagctggagagtggtggacaggggccccgggagggcaagaaactgaacgtagtacagctgctgggacacagggctcgagtggccagcaaagcccccgctcccaggaatggtgggatggggctgtggacgcctgcgccgaaccccaccctgggggctgggagaagccatggccggctttcccaaaggtggcaccacactggccatgagcctgcatgtgagcctgggaagactggcaatgggtcccccaaacactaacaggacaacctcaggggcccgtggcacggagcttcctgagaggccagcaacatgtccagctgctacacgtgagagaccaagggaggggagggggcaaactcttcacgtttctggcttcttttaaaacagatttgattttattcaatccaaaccagaagggccagaagcaaagggagagagaaccccagggcttaccatttattaaaactactttaaaaattttttttaagagacagcgtcttactctgtcacccaagctggagtgcagtggagtgatcatggctcactgcagcctcaaactcctgggatccttttgcctgagcctcctgagtagccgcagctacaggtgtgggtcaccacactcagctaagttttcttattttttgtaaagacagggtcttgctttgtagcccaggctggtatggaattcctggcttcaagccatcttcctaccttggcctcctgaagtattgggattacaggcgtgggccaccatgcccagccaaaactatcttttgatcaaacggagagttaagaagtatacaaagatggcaaccaaaggaaaatctgtagattagaaggaaggagaaccctatttgatatggtgggcagggggtggagagaaagaaaaaagaaagctttaataattttacgactgaaatggtatgcagttctctcctttgccaaatataaaaacctggggccgggcgcggtcgctcattcccgtaatcccagctctttgggaggctgagggccaggtgcggtggctcattcccataatcccagctcttcgggaggctgaggtgggtggatcacgaggtcagcagatcaagaccatcctggccaacatggtgaaaccctgtctctactaaaaatacaaaaattagctgggcatggtagtgcacgcctataatcccagctactcgggaggctaaggcaggagaatcgcttgagcccaggaggcagaggccgcagtgagccgagatcacaccactgaaatccagtctgggccacagagcgtgactccgtctcagaaataaataaatagataataaaaaaatttaaaaaaataaacttggtatcaaacaaagagaaaggtcgaaggactaggttaggaatcactaactgagggagggcccactcagctgtctcccacttgctaagacacaagctttttgacggtggggggtttttgatgctggatgatttttcccaccagcgcagcctcagcaccaaggacagaggccagccgctgtggcctgaaggctgcctcgctgccacctcccctgctggactcatcctgcgggcagggcttgcttggtggactcactgctgaatcagcaaagcctgccgcacagtaggcactcaacaaggctgccgaagaagaaatcggtaaaaactcctacatggggttctcatcacaccagctcacgtgcttattaaaaattccagcagccgggagcggtggctcattcctgtaatcccagcactttgggaggctgaggcgggtggatcacaaggtcaagagatcgagaccagcttggccaacatggtaaaaccccgtctctactaaaaatacaaaaaaattagctggagtggtggcgagtagtcccagctacttgggaggctgaggcaggagaatggtgtgaacccaggaggtggagcttgcagtgagccgagatcgcgccactgcactcctgcctgggcgacagagcaagactccatctcaaaaataaataaataaattaattaaattaaataaaaatatgttccaacggccgggcgtggtggctcatgcctgtaatcccagcactttgggaggctgaggtgggtggatcacaaggtcaggaattcaagaccagcctagccagcatggtgaaacctcatctctactaaaaatacaaaaattagctgggcatggtggtgtgcgcctgtaatcccaactacttggaaggcagaggaggagaattgcttgaactcgggaggcagaggttgcagcaagccaagatcgcaccactgtactccagcctggacaacagagccagactccgtctcaaaaaaaaagaaataggaagcaagccggatgtgttggctcacgcctgtaattccagctactcaggagttcaagaccaacctgggctacagagccagaccccatctccacaaaaataatcccagctactcaggaagctgacatggggggtactgcttgaggcccggagttcaagaccaacttgggctacatcatgagaccccatttctacaaaaataaaaaataaaacggaacggggagcatctacgtgccaagatgtgggaggtgcacacagcaagtgctgcttggcagtcccccacaaccccactccacacctctccacccaggggagttccccagcaaggaagagttcagctgtggggtgaaaacattacgtgctgactctgacactcctggcgggcccccagcacctcctcggacccaacaaggtgtgccttctgctgatgaccagcacagctcactttcgagggcatgagaagaccaagggtgagtctggattctctgccaggagcacgggaagaccaagtcaacaccagcaagcacgaaaaccacgacgaaccccccaccaggcgagggtgaacggacactgtcctgcactagcccactctgctgggcagctgggcagcagctgtggctaatctaagtgacgggtgcttcgagagcacccacaggttaaaacgggcccaggccatgacactttaaaatggtggtttacagaacaatggcatctcagattagggaatgacctgcaaagaccctcttgtccccatcaatccagattttaaggcctctaccgaaattgatcaaatcaggctaagcatggtggctcacgcctgtaaccctagcactttgggaggctgaggcaggcagatcgcttgaggtcaggacttcgagaccagcctggccaacatggtgaaaccccgtctctactaaaaatacaaaaattagccggacctggtggtgggtgcctgtaatcccaacttaggaggctgaggcagcagaatcacaggaacctggaaggcggagcttgcagtgagctgagatcgcgccactgcactccagcctgggcgacaaagtgagactccgtctcaaaaaaacagaaaagaaactggtcaaatcagatgttactttttttttttttaaatgtgcagtgttatctgcactccttccttccacaggcaggagttctctgaaatccagacgctgcacgttttatttcccctaatttaaaccaggggttcctgaacatgagcgagtgttcatcacctcaagcgcctgtagaaatgcagatccccagcccccagagaccctaagtggaccccagatccccagcccccaggtgaaaaacccatcccccaggtgggaggtccggccccaggtgaggagcccggccccaggtgagaggtccagccccaggtgagaggtcgggcccccggatgagaggtccggcccccgggtgagaggtctggcccccaggtgacaggtccagccccaggtgaggagcccggccccaagtgaggggtgcagccccaggtaaggagcacggggctgtgacgcgtggacatgcgcggtgaggcctcaggaatccagcgccagcgccagctcgggtcgcgccctcgcccgcctcctccctggtctcgccgcgcgcccgcctgaaggccccggtcgcggcagcgcgcactgacctccgcagctcccggcggcgtccttcgaagcgcggctgcctgggccagcctcggcaggaagcaggacggcggaaacagaacagagcccgaatctaaagtccttgcccaaatctaaagtggctaccgcagccccggccgctacggccgcagagaccctctgtgccctgagtaaagatggccgccgcgggctgcgcgcgaggggcggggagcgggaggcggggtcggacctgcacgccccgcccccggactcctggcggccgctgatccggggccttcccattggtcacctctcgtggcgaactcggattgggccatatcaggccggggcgggtcccatcaaccaatagcggcgcggggctggcgggtggggcggggcctcgccggcgccgtcaagtagcctgggggacaggccggcgcggctgggagcgggtgggcggccgggaggccggagcagcacggccgcaggacctggagctccggctgcgtcttcccgcagcgctacccgccatgcgcctgccgcgccgggccgcgctggggctcctgccgcttctgctgctgctgccgcccgcgccggaggccgccaagaagccgacgccctgccaccggtgccgggggctggtggacaagtttaaccaggtgggaaggggccgggcggggtcgtcaaccttgggcccggggtccccctcaccctgcatccggggtcgccccaccttgggcccagggtcgccctcaccctggatccggggtccccctcaccctggattcgggatccccctcaccgtcgatccagagtccctccaccgtggtcctggagtccccctcacccttgacccggatccacccccaccgtggaaccagggtcgacgccaccgtgggcctggagtcccctcaccctcgacctgggctcgcccccaccctggacccgggtcaggtggtaccaagcactatgggcactgtctcctcgcaggggatggtggacaccgcaaagaagaactttggcggcgggaacacggcttgggaggaaaagacgctgtccaagtacgagtccaggtgggtgccctggagcacccctgtgggtcttggcctggcgctgtcctgggaagtcgtgtcctgcctttggtgcctgtgttaatgacagggagacagaacagcccccgaggcaccagtcacccgtccgagtcacctcggcttctccctgaggactaatggctggcccctctctggccttccagcttctgctctggtccctaccccctcaacagacagtggcttttcaaaatgtaaactggaacaccagccccacttgtgggaaccgctcctggcttcccctgacagtggggtccccttattctctgtgcccggagtcctggctccccggcccctgcacccaggttggcgtattggttcggatttttcttcactgccttggaggcgctgacggtgggccggtgtgggcctgtgtttcagcgagattcgcctgctggagatcctggag

SEQ ID NO: 9479 - DNA, 6000 bp, Homo sapiens; identical to SEQ ID NO: 2981

SEQ ID NO: 9480 - DNA, 6000 bp, Homo sapiens
ctggcctaatttttttatttttagtacagatggggtttcaccatgttggccaggctggtcttgaactccagacctcaagtgatctgcccgcctggcctcccaaagtgctggggttacaggcgtgagccactgcgcccggtcaggcttttaatttttttaatttttaatttttgctcagggtggtttggctattctgggccttttgtggttccatataaattttagggttattgtttctatttctgcgaagaatggcattgatattacagggagcccacgtagccctttacattgtaattggcacctccaccaggccataagaccccaggtcccagcccagagcatgtcccagaggaagactcagagaagctcctggaatgtgtgtgcacggctccttggtattgcttgggccttcacccctttgtgccacttccttcccaggcacccacccacagaacccacacatccccacgggccctgggctcaggcaaaggatacaggccaggccggcaaggaggccgcaaaggagctgcaggaagggtggctcagagctgagcagtggggtcagggcaagcagcagccacggcgacagccacggtggcagtgccccacggggccgtctagggcggtgtccctccccagccagcatggccaggtggacaggcatgtatccacagctgccggctgcactggacagcccaaggcctgccagcagcactgccagcagcccagaagccagggcgagcagggctgaggcatgcaggaatctcagcgtgcccaggtggcactcctgctgccagcccacagtgggcaggagcagcaggctcaggagcaggcctggcagggccgtgtggcccagggcatgggtcagcagccggtgcactgggagagagaaggggcttatgtgccaggttagtggccccaacatccaaggctgtcccaggtgtgccaggttgaaggttacgctacaccagggccacctgctgagcccacctcccctccccaggagccagtcttcccacagccagcacttaatcattggtggaagggaccaaggacttccaaacactgtggctacgcctctgtggtattaaacagaatacactggacgtgccactcagtcttttcactgacaacccgctacagagcactcactatgtcccagacaccatgaaggtactctgcttctgtatttactaaatcatacctggctgagagcatgaaatggcctgcttcaatcctggagctaccccattccctcaagctgtgtgaccctggtcaaatcacttaacctctctgagcatcattgggggtcctcaaatacaaattggaggagttattattgggaaacaggtgctcagctgaggtcactcctcaaaaccccaacacctcctcctcccatcctgatgcttagttgaaagtcttagctgtttttttgttttgttttgttttgttttttgagatggagtctcactctgtcacccaggctggagtgcagtggcgcgatcttggctcactgcaagctccgcctcccaggttcgcgccattctcctgcctcagcctctcgagtagctgggactacaggcacccgccactacgcccagctaatctttttgtatttttagtagagacggggtttcaccgtgttagccaggatggtctcaatctcctgacctcgtgatccgcccgcctcggcctcccaaagtgctgggattacaggagtgagccactgcgcccggccaatttttgtatttttagtagagacagggtttaaccatgttggccaggctggtctcgaactcctgacctcaagtgatccacctgcctcagcttcccaaagtgctgggattacaggcgtcagccacctggccttagttcttatttcaaggaaaagctgctagaaagggaaaccatgagaaaagcactcctacccataggttccagcccaccctagggagtcctctgcctcccttcttggctgtggatgtgctgggcatgctcctgtctaaggccatgctttcccgggacactgggccccatccctgtttgacccctggaggccttgtgctgctcctgccaagtgggcccaggccctacagcaagtctcctgcttcctccaaggtccacgtggctggccctcaccctgccaggggtccagcaacagctccggggccaggaccaggccggggccggcccccaccagccacagggtgctcatcagcagcatcaggactgaggaggccagaggcagtgctggggacagttggccatgggggcccctggcatgcatcgcttggttgaggacggtcaagggtggtcctggggctgtgtgctggggataaaagaaaacaataacaagttattactggagcttttatctcaccaataccctctcaagcaccttatcaacagccctattttacagaggtggaaacaggctggagacgcaggcccagcagcttggccttagtggagctcagaccctaacccatgcgctcataagccatcttaccattccactcacctctgtttaaggactggcaggggacaggcatagagacttctgagtcctgataggccctgaactcccaaaaagaggggttcaggccctcaccccccagggcgaattcagggccatctctagccctcttctgtcctcccccttccctcagactactacctccctccttcctcccctcccctgttcccagccttaatgctccagatggtttcagttgcccttgaccctggggtggggccagacaatgggcaagccgacagggtaaggggtagggcagatgggcagaagtcccacatcttgagccatactcagagacctgcgactgagacatcccctttgagggtgaacccatccactgtaagcctcctcctgcttccttactggcacagcccctctggccctggctcccctttccacaggaagggtacagtatgcgctccacctctttctgctctgtgtcctgaggcaagtttccaacctcatctttttacagatgagcctcattttacagatgagcctctcctttctcatctgtaaaatggaaattcataaattcttttcctcagagtatgatgaaataaaaaggaataggctaaggcaggccctggcccacaactcttcctccataaaccatagcaatccgcactaatcatggcaggcgtctgtagccaccaactggcccatcgagaaggcctcaatatggaggtggctgctccagcctagctggtcccagctttggccctcaaacatggcctttccctgcccaccaaagcaaggccttctcccccgtgctgttctcttgcatccagcctgtcctccagggcctgtaggtcttcacccctggtcaggcctctcggtcccaggactcccactgagctgattcagggcaggaagcaggatcccagagagacaagaaggctgcctaatttgctcccctgccaagcgccttctccacatctaccagtttcctgcaggaaaaatgtggaaagctcctctgcctgcattgtccttccctccattttgccagcaggcaaactcctatttcacccttggaagcccagctcaaatatcccttcccctcctctggccccctaacatcatggatcttatccttaggagcacagcttggccagtctgtctccctaggcaggtggtctgagctcatggctcctctgatccaaccccacattccccagggtattcacagcacacagccagtgctttatatatgttcactgaaaaaaggacactagcttggctcctggtcctgccgagggatttgaaggtgaaccctgcccttcgcggacccgggcatccacctagggggctggggctagaggtccaggaaggtgggcagggtcagccttgcctggaggcagggtttggggccaaggcacccaccgtaaacctcctcctgcatcgacacctcacaaccattccccagctctgggcaccttagcaagggtgaagggcttacccgtggacactcggaactgggacttgagccccctggacctcactttcttcaatctatgaaacggggcagtgcaccaccaggccctgcctaccttactgggaagccgggagggcagaatggaaagacaaggacggagattcttccggtggcggatagagtagggggtcccaggatctgtctggttcgaactcagctggtgactttgcagagatactcaatttccttgggcctcagtttccccttctgtagaaacaaggatatcggatgagggatgattaaagggcctgctccacctcgaccgttaccggggatagggtctcggggccaggcacggcgttcgaggcctcccacccagccgaccggccttggggacccttccccgctggcccgggccacgcgtcccgggtactcactgcagagcgcgcccggcaaccccgaaaggccggtcggggaccccggctgggagtcaggactctagctcccgggcgcgacccgagaaccctgaatccattccgcgcacacccggccgcgtgacccctgccgaccggctggcgcgccacccattccccgcggcccgcggattagtcagcagttgttctagtccgggtcccttcccccagccctcccgccgatctccgtctccctgcagggccgactcttcagcgaccgtccctagagccagcggacggaaccattccaaacagcctagtctcgtgctgagagcctctccggtttcacgctgagacccgctcacccccgctctggccccttagatgctattttggcccgagtgtcacgtcgggcgctctttagagaggactgggacaagagttgcggacgcgaagaacgagtaagcggtggttcatccctcctgaccccacccccgtggcctggcccgatggtcgcgcccggggttgcgagatttgcgcctgcgcagtgcggcgcctagagggaaagcgagagggagacggacgttgagagaacgaggaggaaggagagaaaatggcgtccacgggtgagtatggtggaactgcggtcgcgccggcggtagccggaacgcccaaactgggggtcgttcgtctctgggcttggctgggaagactgagtggagttgccgagagggggttgaggcacccgccgcggcccgacgagctcggggatccgcattcctctcccctcccccaaccgggcgggccggttctggaatcttccggcgcccgtggcgcgcggggggcttgctgcggcgggggcgcgcggggcccgccttggcctccattgtgtggcggtcctcgcgccctgagctccgggcctcccgccacgtgggcggggcctgcggccttcgaggccctgcgtgaaggggaggatttggccaggcctcaagccggtcactatgaaaccgccggggggcccgcaggctgctgtccctgtgaggcctccctccccgttttcagggtttcctgagaaaccaggggaaaaagcaaataaagataccgtggatttgtgggccgaggggtgccggcctatgagcgggagccccgtcatccttaagacccagtcggctggggcgtctggcgctgccgagctgccccctctgtggcttccagccccaagccgaacttctgctcgcctgggctttagacagaatgtgcttccctcctccagggcccccagtttgccgctttcttgggcttctccatttttatcgttattaatccacgtcctcccctcccccaaaaccaattaagtggcttcccagggccctttttctgcaaacgccgagggacatccgttgtataataaggccagcctgggtcgagagacgagaaacgctaccagaaagatatttctggtctctctgacctaggaggaacaaaaggccgagccttcatttgaattatgtttcagcagtggcctcgcacgtttattcgcctgcgttaggccggcaggcctgttgatttcgtaggtcgacagaggagaggggaaaaaaggccagtagaagcaa

SEQ ID NO: 9481 - DNA, 6000 bp, Homo sapiens
tatttttaaaaatttaatttaaaaacatttttggctgggcatggtggctcacgcctgtaatcccaacactttgggaagccaaggcaggaggatgtcttgagtccaggagttcgagaccagcctgggcaacatggcaaaaccctacctctacaaaaaatacaaaaaaactagtggggagtggtggcgcacacctgtagtcccagctacctgggaggctgaggtgggaggattgtttgcacccaggtcgaggctgcattgagctgagatcaggccatagcattccattctggatgacagagcaagacagtcttgctgtctcccaggctggagtgtagtggcgcaatctcggctcactgtaacctccacttcccgagttcaagcaattctcctgcctcagcctcccgagtagctgggattacaagcatatgccaccacactcggctaatttttgtatttttagtagagatggggtttcaccatgttggccaggctggtcttgagctcctgaccttaagtgatccgcctgccttggcctcccaaagtgctgggattacaggtgtgagacactatgcccagccaaaaatttttagagacagggtctcactctcccccaggcaggagtgcagtggcacaatcataactcactgtaaccttaacttcttggctcaagtaatcctcccacctcagcctcccaagtagctgggattataggctggtgccaccatgctcaggtaattttaaatttttttgtagaggcagggtatctcactatgttgcttagactggtcttaaactgttggcctcaagcaatcctcccacctcagcctcctaaagtgctgggattacaggcctgcaactcctttaatactcccaaaaatcccacacagtatgttctactaccccattttacagataaggaaaccggagttcagcaagttcaagtgccttgcccttgtgtattagtccattttcacgctgctgataaagacatacccgagactgggtaatttataaaaagaggtttaatgcattcgcatttccacatggctgaggaggcctcacaatcatggtggaaggcgaaaggcccgtcttacatggcagcaggcaagagaatcagagccaagcaaaaggggaaaccccttataaaatcatcagatctcgtgagacttattcactatcacgagaacagtgtgggggaaccgctcccatgattcaattatctcccaccgagtccctcccacaacacatgggcactatgggagctacaattcaaaacgagatttgggtggggacacagccaaaccatatcaccttggttcccatagctagaatcagtggagtaaggattcaaacccaccaactaagcacttttatgaactgaactcatcagagtggaactgtggcaggaggctgtgacccagagaggtatgactgcttaccaaaagatactcagtaataggcagaatacaccaagcttgtccaacccgtggcctgcaggctgcacgcagcccaggatggctttgaatgaggcccaaacacaaattcttcaactttattaaaacattatgagatttttgcacaaaccattgttttttgttttagctcatcagctatggttactgtattttatgtgtggcccaagacaattcttccaacatggcccagggaagccaaaggattggatacccctgaactataccctagggtggggagtggctaagacccctaggccagggtctttcccccagctgaggccatagtgcttccccatggccaagacagtgaggtatttaagaatggaattactggcttagaagccaaagttgactgtaatatctccaactctggctcctgttttgaaaaccagaattctttggaagttaatggaaaactcaaaatagcagattctgcctttggggtgtttgcagagggctttgaagtggtctcaaattactgacaagtgaagatcaggtagagttaacaaagcaaccaatgtagaagcaggtctcaagggcaattcacatttatttcctgagcatgctgactaaacatacttcaaacacagcagaaggtaaagagtctgttttgtaagtaaagccgtttcttgccaacagcgaatggtggtccatgaagagtaccttgagcatcatcttcaagctgaggctccagctctgggcaaacagctgctgggtggacctggtccttctggcctggatgggggcctccaaggaactacttgttctcatacttgtgcttgatgtgtttccacagcttctgcattttaaagacaagagccacaaactttgacctttgcctctcacattttacaactactcccactgccctggtctctaaaatgagcttgggggaaacacatgccatgtcctgattaaaaagatacacttgtggtgggcaaactcgaagcaatcctatgcttgatgcacattttttttttgagacggagactcgctctatcgcccaggctggagtgtagtggcgcaatctcggctcactgcaacctcagcctcttgggttcgagcgattctcctgcctcagcttcaagagcagctgggaatacaggtatgcgctacccggctaatttttgtatttttagtagagatggggtttcgccatgttggccaagctggtctcaaactcctgacctcaagtgatctgcctgccttggcctcccaaagcgctgggatgacaggtgtgagccaccgcgccgagccttcatgcataattcttggcatttataaaatactatgatgctttcaatcaccaggtgaagtaagtggaaaggggtgatcttaatttcacaggaaattcagtttgagattgagggaagtgccccaaaacacacaattattaaggaaaacagcctggaagatgtctcagttcttcaactcccaggtattactgaagagattataagtgcgtagtcccaaaatatttcaccatgagccatttaagacatttcctgggacctaaattggctgaaattctcattcccagaagcacaagaggttgagcacagtggctcacgcctgtaatcccagtactttagaaggctaaggcaggaggactgcctgagctcaggaattcaagaccagcctgggcaacatggtgaaaccccatctctacaaaaaatacaaaaattagctgggcgtggtggcgcatgcctgtggtcccagctactcaggaggctgaggtgggaagatcacttgaacccaggaggtcaaggctgcagtgagctgtgatcatgccactgcactccaacctgggcgacagagtgagatcctgtctcaaaaaaacaaaacaaaacaaaaaaaagcacaaggaaaatgggtgagttataacaacatacttggatgtctctccagatcaatgggagtggttaacagaaccacttgcaagagatgggacagtagcaatgctttcatatggggcaggaagttgcactggtcacaggcagcatagcactagtggacagtgccttcccgggctgcagagtcagacagtctcaaattaaaaacacaagtgagtggtggaacagggctatatgtataaggcctactccagcacagtcataatttagcgatataaagcatgcactgcacctagcacagtgcatgatacataaaagtcaaaaatgtgttgcgattcctacctcatgcttccactttctcctgaggaatgtaagcaatgattatttttcagtggtaccacctaccaggcatgtggcaccctgcctgcatctcatgtaatcctcacaatcgtgctcaggttactattaatatctccatctcacagttaaaacggagttcagagaagaaacttgctcaacttaatgccacagttaagtgacaaggaccagtgttcctatccaaggctttctgatttcatagcccccactctcaaccattaataccaactgtctacgtgggaagccttggggaccagaagcgccgtctgaaacttcagccacggcgtctaaggtgtctaacgtccttttcacgaccgtcgcctgctcaaatctgcccttgaaactctgagagacaggggtcccgtttctggccctgacttgcccctggcttcctgtgcagctagtaagtcctttgctctcactagcctttagtttttgcttctgataatgggcaagtgggtatgtagggtggcacacagcaatacttacaacccctgcaaaatgaaatatattaacctcgcttaacgttttagaattcacatcaagccaaggggacagacggcggactcgagacagaagacgccgacggtttaccccttacccccttcctggtaaaagtatactgagtcccatcccacctctactccactgtcacccctcaggcgggtccaaggtcagggatggcacaggccctcaccccctcgttgatgtggtcgtagatagcgtccgcgccttgatcgaaggcgcgctcgaagaacatgacgcccacgatgatggtgagggcgaaggtggaggtcctgcggaacagcagggagtacaatttcgaagtcaacgtcgcggccgccatgtttcttcacagtccaactcgcgccaccgcgcctgcgctggggccgacctcgttccccaaaggccctagacgtgcaacactttatgggatttgtagttcctctgaatctcagccttcgtgttttgaaccacagaggtattcctatcctgggaatgaggaaaaaaactcaaaaggttcatatcaggacagcccagataatctgataagatttattacccaatttttcttctccagaattcctggctgttagaatatgtcaaactacaactcccagaagccctcgcgcgccatcaccttctccccgccctccgcccagtcccggcttagattcccaaagctctctgggaagggcgaactgatggccaaggcgagactacgaatcccagcaagcagtacgcgacgcgaggacgcaggaggaggagcccggagctgcagccaccggggagccaggtaccttccgcgagacgtcgaggggcgagtcctagtctcttttctccgcactggaagacttgaacacttccttctctgtgcgtacgccctgcggcgggacgcaccatttcttgggatagggtgtggatagaggggcgagggcagctgggttcccgagaccctggctcaactcttcgccttgtcccctgcaccagccccaagtctaggccaggagctggagcctgcggcaaaagtcttgtcctggaggttaaacccttcaccctggattaagggcagggacggatctgccctgcttcctgttcctctcacccctgggcttcgcaccgggcaaccctggtttggaaggctggagacttggaacctgcttgggattgaaaagagcaagggctttggagtacctggggcattcaacagatgttttcccagcgcctgttctggtccctgctctggggacccagcagtgaacaaagtccttgctctcacagagcgctcaatctacggagtgggcgggtggggagatgcagtacagcaaacagatagtgctttggttgactggagaggcagtggtggtgacattgcaccctgggtagctgctctggggggtgacacttgactagagacctgaatgaatagtagagttgaacaggaaaacgttggtgcaaaggccttgaggcagctacagtcctgggatgtttgagggaaagaagtagagtggactgtgaagaggttgactccggtcagctcatgtctggccttggaacccaccttacggagtcttgttttctttggtttttgtttttagagacagggtctcactgtgttgcccaggctggtctccaactcctgggctcaagcaatcttcctgcctcgccccccaaggtgcgtgagccaccgcgtctggccaaggagtcttgtctttttctagttgcactaggaggccattgaagggttttcaggagaaatgcgacaagatttaatgtgcactttaatgtcatca

SEQ ID NO: 9482 - DNA, 6000 bp, Homo sapiens
tgccaaagagctgggactgcaggcataaactaccgtgcccagcagaataataacttttaaaaaccaagctgatcaaaaaattgggggtagagggaggcagacaaaaatcatgatggaaatagaaagctaaagacgatgaaagtgccgagctgcctggaaattttaagaccagaacaacaagaaatagtacaactaagaataagacagtagaaatgtcattgtctggattagccaaactgtcctaatgtaaaccccatacttttgaaaagtcaccacttggaggcactgggatcctcactgaacaataaaatgctgtgtggcttacctgggaaggataaaagtaacaaatgccagctcttgttggatcgccttcttcctttaccttggaaccatcataaagaaaaaaataattccacctggcaagagaacagagtggagccatgtttcctttaatccagtgatcacggcatttaaaacacagcttcctgtttcccagcccgaggagggcttattactgtgtttgaaagccttcaggtggccccagagaataaagaaccccagtagctacaaattagataaaaccattctgtaagcgcaggaaattcaaactaaaaatatgcctctatccagccgttagaccatctgccggagaagacacgagtagctagaaaaaaaaacgaggcgcccacaatgactgctcttatttgaaacactgaaccttaactatacaaccacatggtctgatacgctgtcttttaaggctctgataacaaaataagttagggatgtattagatgcactcctcataagtgctgagcacaaagatttccagaaacagcccttctaccaggaattcatgcattcacttaaacatttactgagggcccacagtgtgctccgcggttgctgagcaaacacgcagtttcaatgcaggatagtgagtccaaaagttcgtaacagggaaaaaacaggggcctatgagaatttacagagaaactctgaactcctctctaccatgccaaacctcaccaagtatcattcaagcacacttcctcattaaccgtctcctgattccctcggcccagagatatctctttgttctgaatttccatgaccctctgttcttcctcaaagactcttacagactacactgcagtataactatattacgtaatgttattatctgattacctctttaagaccataaaacaaacacctcaaaggccaggcctcaattttgttttgtttttacagggtctcactttgtagccctgtaggctggagtgcagtggtgcgattgcggttcagtgcaaactcaatctcccaggctcaagccatcctcccgcctcagcctcccaagtagatgggactacaggagtgtgccatcatgctcggctatttttttttaaattttttatagaaacgagtctcactatattgcccaggctggtctcaaattcctggactcaaataatcctgccctggcctcccaaagtgctggaattacaggtgtgagctactgagcctggctggacctgttttacttctaagtctctgagaacacatttatgaggctatagcataaacaagcaatgggaccaatgtgtcatctgctctcttccctggatctatgccctctctgaagcctccctccatggctcccaccctgccttcctgatgaaaaagcaccaacttggctgggcacagtggctcacacctataatcccagcactttgagaggcctaggtaggaggactgcttgagcttaggagttcgagattagcctgggcaacaccgtgaaaccccatctccacaaaaaacagacaaaattagccaggcatggtggggtgtgcctctggttccagttacttgggatgctgaggtaggaggatcacttgagcctgggggattgaggctacagtgacctgagatcatgccactgcactctggcctggaggatagagcaagaccctgtctcaaaaacaaacaaacaaataaataaagcaccaacttggtctcttggcactgtcctctttcccaatacctaaggctggatgtacaactggctgcagggtaagctcagatcaaaaagcctcaaaaaagtttcaaagccaactcagaaactccatgtgcaccccatcctcccctgtccccacgttctcttgatgaaagcatccctgcttgtgcgggcacacgaaagaaaacttgggtgtcattttgaactgctccatctttttgacttccacataaataatcagtcactaaatcctgctaattctagctaaacctgcttttcaccttcatctcctctatgactgatgtttgctaaacctaattatgggaaaggattaacgcatttagggttgagaagggaactgggtttcagacagacattgagtaataccccttgatacccagtctggccagacctctcctcatgctgtaattctcaaatgcaaccatacctcatctctgcaaattgaagactacaatattcacattatcatcaaagctcgctgcatgatcaggctgtggctatcttttctacaatctcccagcaatgccagactcattcaaacattgggagaggcttgcaaggttaaaacatgttagctttggagagcgatggctcacgtgcttgattcagctgctctgaggaaaatggcatttttattgttatgttaataaaattaacacaatctggctggggattttcaattaaccccaaaactctaaccaacagcccagcaaaagctatgccatggcaggccttgttactcaccacgaggctgactttgcctctgtggaggtagaggtggccatctactgtgcagtcatcctcattctcttcatttaggttttcttttccggtatcacttctttctccctagctgtgaccgttcctctatcccccaatccagtgaatctggacgtggtaggtttcagtgttttcagtcacaactgccacttggttagttttcactcagcatggaaagttccacttcccttccttgcaggttcttcagtttcatgtatatttccatgcctcttacaactcagggagaaactataacagagaatcctagcagaaaagtcaaatccattcctctggtttcctaagtatcactgtggctgtctgcagaaccacctcttcaagctcctctccaggaaagccaaaagtgggagatgcatgctagagctggtgttctaaagaaatttctagcttgtctagttcaaacccatcctgaagactcttattaaacgttttgaagtttccagttcaaacatcagtgccttggctctgaaataaacacaaggaatagatatttcagcaactcgtgagagagcatgtgacccagcaggattaaacgaatggtatatttcaaaagagctttctgtgagggtgacaatcatgcttcaaaatcaaagagggaggcttgcagagacttcagagtaagggctttagtttctcgaacagttaagggaaacacaccacaagcttcacggaagataaaatcaaatgacagggtgaaaatgctctaggtgtggacagctatacaaataaaccagttgctgtggtaataatggaacccaaattaaggaactgtcatcttgacagtccaaaagtaacctgaacatgcagaattccagagcagggcaaatttctaaaaaatgaagagaactttatcaaatggctttcaaacttccacaagagaaagacagctcagtgtatcacggaatttcagagtcggaaggaaccctggcatcgtttactctactctcctgcactcttttccaaaaattaccttggctgtctctgctttacaccctccagagatgcgtggttcactatgttacatttctccttccaacaaactaaaatctgcgttccagattttacatctgcctcccactcgctagtctggataacgctctgcaggaaaacacaaaacaaggtctaattcttccatgtgacaacctcttggtcacttcaaaactattgtctaattcttactgtcactttctccaagcttaatgctttagcaacatggtctcaaatgtttgctcaccattctgcaatctgtgggtacacaatacagtttgttaaaagtctctagagacgacccccattgaatatttgacggcctgtaaaatctctatctcttctcagctctagatattttggattgggcctccacaggaccacactcattgtattctatggagcatatttgggtgcctgtggagggggtatctctgttactggaaccaaggacagcagcctaaaactccccatcccttgttcccagaggactgggccctacactaccgaggtcctctcttatctctgaaaggtccagaagagaccaataatggccctggagtaggaagagacgtcggaacatgagcagaaaaggatctggtagcctgggaagtaatagtaacaacgcggggctggggctggtgatactgctgtgggaaggggcctcagtggggcagcagggctggaaaacggacgctaatggctggaaaagggccaggaagctgctgggcgcagcccccggggcgcaggcagcgactggtaacagcactagggctgtgcggtgtctggccccagctctacgggactgggaaatggtgggcgaacgcctaaggattaggcggggtcgggtcacgctctaagctgggggcccgcccctcggtatccccgcgctccgagcgccgcccacccaccggagtagccaggcatcccagtgctcggggttcgggactctggaccagaaatgtgggcagcagctgggtacctgcgacttctgccccgtacctgcgcgcgcggcagagaggccttaggtcacgcgccgccccgcctacctccccctccagctcctggcaagccggcgcgcggcgatgacgtgccgagtgcgccgcacgccgctgacgtcagagaccaatggctgcggccgcagctgcggcgctggaatcctggcaggcggcggctccgcggaagaggcgctccgcggctcgacggccgcggcggagggaggcggcgccccgggggagagaggcggcgccccgggggagagaggcggcgccccggggccccgaggcggagttcgagtctgacagcggagtcgtgcttcgtcgcatctgggaggctgagtgagtgcaggctcggccctgatggaatctttgcgcccatgggcaattctgagccacagtctccccatctgtagagtggagatataatgcacaccctttaaggagttattgtgaagagttaacgtaggtaacgagctcattaaagatgtggattatagtaagcgctcagttaaaggtcgtctttccttttattacggttacagctgcgtgaccttggacaatttataatctctgtgcctcagttttctcatctgtgagatggggatgaaaatagtacatacgtaggtttgttttgaggattcaatgaattagtaaacggaaaccattttctggcacgtggtaagcactgtgccagtgtttgctattaatattatgccgatgttgatattattggtggtggtgacacgagggaagcaacatgaacacgtgactgctatcatcaggcagctgctatgtgcctgacattagcttaatcattctacacactttatgttaaacattgcaggcatactaggaccctggtagctcactgattctcaaagagacaaagaaaatgtgtggaaccagatttcaaacccaggtctttgtgacaaaaaccagtgcttccagctttccattatgcttgttgcttatcccagcccagattctcacataccttgctctgtaccttagaaagtacatagagagtgcctaatacagaggaaacactcaataaatgttacttattattgttatttagtattattatctttattcgcagttttgtttaggctcaataaataacagctttagttagcacttaagatcagcatccgaagggccgtcacaaggggagaaatt

SEQ ID NO: 9483 - DNA, 6000 bp, Homo sapiens
tggatcacaatgtcagaagtttaagaccaacctggccaagatggtgaaaccccatctctactaaaaacacaaaaattggccgggcgcagtggctcatgcctgtaatcccagcactttgggaggccgaggcgggcggatcacgaggtcaggagattgagaccatcctggctaacacggtgaaatcccgcctctactaaaaatacaaaaaattagccaggcgtggtggcgggcacctgtagacccagctactggggaggctgaggcaggagaatggtgtgaacccgggaggcggagctagcagtgagccgagatagcgccactgcactccagcctgggcgacagagcgagactccgtctcaaaaaaaaaaaaaaattagctgggcgtgttggcaggcgtctgtaatcccagctactcgggaggctgaggcagagaactgcttgaacccaggaggtggaggttgagtgagactccgtctcaaaaaaaaaaaagagacggagttttgctctgccgcccaggctggagtgcaatggcgcaatcttggctcactgcaatctccgcctcccagttcaagcgattctcctgcctcagcctcccgagtagctgggattgcaggcatgcaccaccacacccagctaatttttgtatttttagtagagactcctgacctcaagtgatctgcccacctcagcctccaaattgctgagattacagacgtgagccaccgcacccgacctgtagttgaggtcgtcttagggattcacagaagtatttatctttctcctttggtgattttctgttttgttttttgagacaaggtctcattttgtcacccaggctggagtgcagtgtcgcaatcttgattcactgcagcctcaacctcctgggctcaagcgatcctcccacctcagccccccaagtagctgggactacaggcacacaccatcatgctgggctaatttttttgtagagatgggatttcaccatattgcccaggctggtttcaaactcctgagctcaagcgatacactcgccttggcctcccaaagtggtaggattacaggcgtgagccaccatacccagcccactcttttgtgatttttaattacaaaatgacacgtttgttaagatttttgaaaattcagtatatactgaaagttctccactcctccaaaggcacaacaattaactccttccctcaggtattttcctagatatttgcaaagtagttgactttacaaaaattgaatcgttgatatcttcccccaaaaaatactgcctttcttgttctggcaaattgttctgtagaattaaatgtattatttttgaaaactttgatacaattttcatgacagaaggatgtttggctaaggttttctgaagtttccagaacctacggactatttattcatttattagtcaaatactgagtgttggccggatgtcgtggcccacacctgcaatccctgcactttgggaggccgaggtgggcagaccacttgaggtcaggagttcgagaccagcctggccaacatggtaaaaccctgtctctactaaaaatacaaaaattagccgggcttggtggtgggcacctgtaatcccagctactcagaaggctgaggcagaattgcttgaatccgggagggaggcggaggttgcagtaagcccagatcgcgccactgccctcctgcctgggcaacagagtgagactccatctcaaaaaaaaaaaaatgctgaatgtttatctcagccaggaagtgtgctggggggcaagatacagctgggaaagagacagctgtgctttcaccattcagtgagatactgcactggaggctgggggagcagaggaagtggctctggagggcagaatcctgctgaaggccttgccataggtctggagacaggttggtgacaggggccctggctgcccatagttccaataaggcctaagtaactttctctaaggctggaagccttaggaagaagccaggtgagaaacctggcatctggtcccattgaggccaaattacagctccacgggggccgcatggaagtgagagctcccttaagacagcagatgtgaaggaagcagcgaacacagtgcttgatggcagctgagctcatgtagcaggagatattgacaggtctctaagactacaggaaatcgttgaattcaatgagatcatgcatggagattgcctataccgtgcctggtcatggtaagcattcagacattagctacgatagggaccattaattcagcaaacaaagatttattgcctccctattatggtcaataatcctactgttctaggtgttgggatacagcagtgaacaacagacaaaatccatgagctgtcagagctttccttccagcagagaaagacaagcaatcgcaaaatgaacaagcaaaatatatagtacatcagctggtgctacagagacttaaagcagtgaaggggcgtaggaagtgtttggaccaggtggtgctattttattttattttattttatttttattttttagagacaaggtctcgctacgtcgcccacgctggagtgcagtggtgagatcctattagatccctgcagcttcgaactcctgggcgatcctcccaccttagttggtgctattttaaataaggctgtcaaggaatacaagtgcaaatcaagacaaaggaggtgagggaatgtgccatgcaaatacctaaagaaatcagtccagattgggaaggaacccctagaagcggtgggcagtgcagtgcgggcgctctcctctggctgcgccctttccctctgtgaggcaggacgtcaggtcagagctgagggagcatgaggaggaaagaggcgggggtgggaaacagtctcgggagggggcgagcagtcaggattgcagcgctcggagggcttactgcctctgaggtcagggctgatcggcagaggatttagcatctctgggggctgggatgccagggtccagcaaccttgctctggcccacaggccgaccctgggcgtaaacacctgcctatgcacatctgagcctagcacctaacgccactgtacatacaagcacgatatttttgaacatttgacgacttagttaagcctcccaggtggctgcacctgcgcagttcactcaggtccgcaatccctcatctgaaacgcctggtctgggcaagtatgagaattcataccattctagatcgcaggagggcgtggagcattcgaaagaggggcctgagcggaggtcttgctgtcccagggagaccccggctgccattagcaagcggtgagccggcagcctgtgcgcggagggaagggcagcgcgcagcgcccagtggtgaaagaggcgctagcgcacgcgcagtgagcgtttgagaggagcaaacccgtcgagacgaagctgtagcgcaagcgcagtgggtattgagagcggccgcaccagctgagggttcgcgcaacgctaaacgatggccgggactaaggcctgagactcaagctcaggcgcagtgaagcgcagagccgctagagtgtcgcggagggcgcctgaggcgcatgcgcggactcagcgtttttaagaagggctgggggtgctggggagttcgccccagcgtgttgggggggagtcgccgccgcggggggggggtttggggtcaccgccgcggggtttgtcgccgccgctgggagctcacctgcgtccgaggccgtaaggacggctccagttcatcctccatccgcctctgccgcagcactgaggctgaaaagccgctcactccttactcggctaagccccaagctcatctctgcaggccggaagggagctctggtccaaggtcatctcggccaagcccctgcattcgccctcgcaagtgccagcaagcgactctggtcgccgcgctcccaagtcctcccccgaaattccggctctggcccctcgtccccctcctttgctacagtctctggactaaatgtctgcgggtctctgtctctcgctggtctgacctcagccgcaaccctgcgcgattccctgcgccggtcgccactgccggccgccagaacctcggaggccactgcccctgggcgttctccggagggccaagcccttggttgtgcacatctatgcacgccccacctacacccccccccccccacacacacacactttggttcaggtatccccgacctttccccagaggacgggaaaattaggaaagaccgaaagatagacccaccagtcttcggagcgctctcatctgtgcgtcctgggcagagcgagagacttggcggaatgcgggtaggagaaccggtctcgggttgccgccaggggatccattgcgtgagaggcaggtccgacttatgctgggggcacttggagttgaggaaccacagagtccactgaaccggattaatcttttatccctcagggcttctcaggccctgcatggaggaatccaggagctggacaaagaccaactgaaactagacttgccaaagatgctatttgtggtcacagaaacatagagctggacatgaccttaagaagtcacctgagcagacactgtgatgggcactgtagtagctctattgctcagacttggtttttgtttgacttttgctgctctgaactttaattcctaaaaacactgcatttttaaggaaaaacacaaaatattagcagttataataaataggtattttattgcatgcttttcgtgcatctattaagatgatcatatgggtattctcctttaatctgttaatgagatcagttacatcaataaactttctaatggtaaaccattcttgaattcttggggtagacgcaacttggtcataatattattgttattaatacattgttagtttcaactgctgatattttattttgataggttaatttttttcttttttttttttaatttatttattttttttttattgatcattcttgggtgtttctcgcagagggggatttggcagggtcataggacaatagtggagggaaggtcagcagataaacaagtgaacaaaggtctctggttttcctaggcagaggaccctgcggccttggccttccgcagtgtttgtgtccctgggtacttaagattagggagtggtgatgactcttaacgagcatgctgccttcaagcatctgtttaacaaagcacatcttgcaccgcccttaatccatttaaccctgagtggacacagcacatgtttcagagagcacagggttggggataaggtcacagatcaacaggatcccaaggcagaagaatttttcttagtacagaacaaaatgaaaagtctcccatgtctacttctatccacagagacccggcaaccatccgatttctcaattttttccccacccttcccgcctttctattccacaaaaccgccattgtcatcatggcccatccccaatgagccgctgggcacacctcccagacggggtcgtggccgggcagaggggctcctcacttcccagtaggggcggccgggcagaagcgcccctcacctcccggatggggcggctggccgggcggggggctgacccccccaccaccctcccggacggggcggctggccaggcagaggggctcctcacttcccagtagggacggccgggcagaggcgcccctcacctcctggatagggcggctggctgggcggggggctgtcccccccacctccctcccggacggggcggctggccgggcagaggggtcctcacttcccagtaggggcggccgggcagaggcgcccctcacctcccggacggggcggccggccggaaggggggctgaccccccccacctccctcccggacggggcggctggccgacccccccccccccaccccgcctccctcccggacggggcggctggccgggcagaggggctcctcactttccagtaggggcggccgggcagaggcgcccctcacctcccggacggggcgactggccaggcggggggctgatccccccacctccctc

SEQ ID NO: 9484 - DNA, 6000 bp, Homo sapiens; identical to SEQ ID NO: 1034

SEQ ID NO: 9485 - DNA, 6000 bp, Homo sapiens
aaactttcaggactatgtcctgagtcccaatagttcaaacaaaattcacagctggagagaatgagcatgctctgtgacagatgcaggatcccagggacatccccaggcaaggggaaaaggtgaaatgtcagggggagaatcagcatttctggatcagaaatgaagaagaacaaggtgggggactctggcttgaccacggttgatgtaaaaactatccagaaatcaggccgggcgtggtggctcacgcctgtaatcccagcactttgggaggccgaggcaggtggatcatgaggtcaggagatggagaccatcctggctaacaccgtgaaaccccgtctccactaaaaatacaaaaaaaaaaaaaaattagctgggcgtggtggcaggcgcctgtagtaccagctactccggaggctgaggcaggagaatggcgtgaacctgagaggcagagcttgcagtgagctgatatctgccactgcactccagcgtgggtgacagagtgaaactccgtctcaaaaataaaacaaaaaaaactatccagaaatcataagcaatcctgaattcaccatgagcaagagtgtgctgtgttggcccacaaagatgaaagctgcctcaggacatattaatagaggctgggcacagacaaggggaggtgatattccagcttggctcttgctattagaacctccctgagcatgtgcgcagctctgggtgtcacactaccaacctggagagtacccagaggcaggaccaggatgggagggcctggacacctcatgggaactgctgctgcccagagctcggggtcctgtcacccacaggcctggaggccttaagaaagtgactcaacctcactgagcctcagtcttctcctctgaaatggggatcacaggacttcctaccaggcaggggatatgtgaagactgaacataatgattcaggaaaagatgtagcccagtgcctgggggacaccgagcacaggctgagccttcagccacctgggaaggggaaagggaaacacgggtggccccctggggctgatggaggaacaagggacccgctgggaggatcctgggtaaactcacctctgggcatctgccctgaacttgggctggcgtcacaaggaagttggtcaccaagaagaacacgttctctccctaggaggcaagtctcaaggttggcctggctgggctcgtgttgactggaaaggccggaagccggcagcctggtttatgagggaagggatgttggccccatcaagtcattaaccctgtccccctgtaaggcagactgaagcagagatgggaggctggcagtggttctggccatttttgagaccaggaagccttgtgcccatgtccatctcttgagacaagtctcttgtctcaaccaaaatttgtgtgtgtgtgtgcatgtgtatgtgtgtatttagagacaggattacacttcgtcacccaggctggagtgtagtgttgtgatcagtgctcactgcaacctctaactcctggactcaagaggtcctcctgcctcagcctcccaagtagctgggactacaggctccagctaccatgcctggctccaaccagaatattccaacagcctgctgcttctagtactgaagatccaagggagagctgggcccagcacctgctcaggatggagacgaggtgagtctcccatctcacacacagcagcactggcatggcaggggccaagggagaagagggaaagctgtgtctgtggtcaacgggtggccgaggacattggaaagaaaggctgaccctccagtgctgctcgtgagagcactgtgaatttggggaatgtatgcccaggaagggaaggtgagggctggccagatggtgctgggagtggcagccattaggattgggaggaaagtgtggacaccgtcatgggcagggttgggggaattcctgagggtagaagcaggcgctgcaggctctcatgatgcctggtgtgaaagttcagcttggctgctgcgtggtgtgcaccgagcagtaagggaggaggcgagaggggcatctagggaccctctaggaggccatagtctcatgcatggcatggcatgggtagtggtgaaaaatcttggaagggacaggaaggggtccagggtgagtcacgggtctggctgaggcactagtggatgtcacagccaccatgactagtgggcgtcacagaggccatgccaggagaggaaaataattgatctttggacatgtgggtgtgcacctagaagacagctgtgctctgggcaggtgatcactgggaatacaccctgggcatcagaggagcagaagtggcagttgaggctggggatgagctgggtggagggaggaggaaaacgcagccgagaagaggggaggagcagcacctgaccgtagtgccccaggtcagggagcagggctacagggaagttccatgccccagcacctcacaccactctcaagctcaagccattagtcctggacactcccttcttttctgttggcagtctttggaaatgcagtttctctggcctggcttttttttttttttttttgagacagagtctcgctttgccacccaggctggagtgcagtggtgcaatctcggctcactgcaagctccacctcccgggttcatgccattctcctgccccagcctcccgagtagctgcgactacaggcgcccaccaccatgcccggctaattttttgtatttttaatagagatggggtttcaccgtgttagccaggatactctcaatctcgtgatccacctgccttggcctcccaaagtgctgggattacaggcgtgagccagcacgtccaaccctggcctggcttcttgagtggcccctttttccaccccaaaacctcctacacatccctgaaagtcctgtccaggtgccactcctctgtgaagcccttcctgagaacccgcagccgtctctggcatcacatgcttctctctcgcacacactggctgcatggcgggtgttcaggctgtcagtggggaaaggacttgcgcccccgtcagcaacatcagggcccccacctgaggtggcttcacgaagtcggccacatcccacagccggtttccaagctccttgatctgagtgacggaaacccctttgagtttggtgatgatggaaaactggggttccaggtcccgctcctggtagccttttttggcgaggagagcccacctggggaggagaagtcgggcagtgtggtgtgtccccagcgtgtagtgacaggggcggagctgagccctacatgctcagttctccccccacaccctacaggctcccggcccaacatcgaaggccccacctcctctctggccccacttcccactccagaccccctgaatgagacagaagctccagccatgcatcagagagccaatgccctcagacaatcaccttcactagccagcacccacccccagcctgactagatccagcttcccccttacagactctcctgacccgagatacagctggtggtctctctgggggcctagtgctccagctctcacagatgttaaggactatgtcatgtgccccctgggtggggcctgggtgggggcctgggaaggaggcaagtggacacacaggacaaacacacagcttgttcttgctctcctgtcttgtatcgcctagctctccccaaccccgtcccaatctgcccccttccactccagcccctaaacagcccaaccctcaacttcaacccagcaggaccaagccccaccccccacctcttcccttgcccctccagcctggccaaaagctcttctctcttaccctaccacatagaccacgatcccaaactgcagcagcctctgcagggcgcccacccgccagttcctggtcatcacatacttctccgtcttataatccagaagcccccagcctgtcgtagcccctggggagcccatgctgccagctcctgctagctgcgggcacatgagtcagcatggcagctgcagccgcagctgaacaggaggcaaagcagggcccgagccaggccaggccagttgctgttaaagggacacttccactaaagcaggatccagatccagcctccaacacccagccctcaacccctaatcccagctgccctgcacctcccaccctccctacattccctttgctgggccctggcacacagagaacagcagcagctctgtccctgccctctggcctcacttcctggggtgggagtggaggtggtgggagggtggagacggacagctgttatcagtgctgtgagaggagggcctgagggcagcagcagcagggcggggagggtgttgaggaaagcttccggaagaagtgacctctaagctgacccttgcagatttctgaagttcgacaagcagacaaagatggggatggaggttcctggtgcagggagcagcgtatgcaaagaccagagcatgcaagataactaagaggcacagagtgagagggtgacctggctctgcgaagttccccaggccctcctgaaaagctgcccccgccaccttccccagtgcagtgaggacaacacaagtcctggagtcaggcgtgtttcccagtccacgaaaggggggcgatgctggaaccccctaggaaggcagggaggatgcccacaaggcgcccagcccagtgcatagcccgtggcgcgtgcagtttatcctctcaggcgaggagcctcagcgcaggagagccacggtttctacggcaacctacagcactgggttgccggggcgaccgccgcgggggagcgcgtcgctaattgccgtggcagacgccagtcgatggacgccacactcgattggtcagcgcagccgcagactccgcccacatccccgggtcgcgctctaagtgaggcgccaagcggtctccgcctcagggtctgaggctgcgaaaggggcgtaacgatgagcggttcctgccagaggtctggggaggataaaaagcaggaggaagaggcgacggcggcctgtggacgtcttgcaggggtccccgaagccaagcagggtcccaaggccgattcagactccgacctagagacggaaggtgctcggggcaggggccaggcccgtctcctccccttgggggcttctcccgcaggggttgtgggaggtgggctggcgccgccgaggaggcaggagacctctgtccagcagggcacgtagccctctgcggggcgtctccagccccctgccctctcctcggcgctcctggcggcatcaggaactttaccatgagaaggcgcttctagaaggaggttaaaatggaaaatcccgccagacagtgcaccaaaggctgtcccgccctgaaatgcaatcagagctgggttttcccaatccacaggtaaaactaatataatggatgtatagaatttagaactacttccggttttttccctggggaaaatattcacaaaacatttgtggtctgcaatcaggttaaaagacatagtgtgccatttgtcatcagacaggtagaggcctgactctggcaggattagctaccactagctgtgagactttatgtattcatttattagagccagggtcttgctctgtcacccagctttcagtgcagtggcaggatcatagctcactgcatccttgaactctgcactctggtgagcctcctgcctcagcctcctgagtcgctgagactacagggggctaccacatctggctaatttaaataattttttatctcgctatgttgcccaggttgtccagctttcttttgacagctgtatgactttaaggaaaagatttgcgttgccttagcctcgatgttcttatctgtcatatgcgggcagtggtcctaaggagcataggaagcagtgcttctagaggcaaaaaataggccaggtagtgatgcagggcaggggaggaggcaggtggctatagccatgcaggggttcacattcatccccctgtctcctaccaggcacccatggacttggagaactggtcggggacaccctgt

SEQ ID NO: 9486 - DNA, 6000 bp, Homo sapiens
attgctgatagacatattgctcagtgggagcaaaactatttccatgccactgaccactcttccctatttgttctgactcaaaaagttactggtcatctccctatctttgcaaaagcaaagtcaattgaatgcagtgctttcactttgaactgatgatgtgcagactcccttcgctctaagacctataggtatttataggaccaagccaaagcaaatgaaaccttaagctcaaccactgtgtaaaatgtaagtgccacttcctgtagaacctagtatttccttcatttaaaactttccccttaccatctcactgggccctaagcagatcacacagtcctacagaccagtagcctcccctggctttgctgcttctccttcaacccatgaaccgtcatatacactggctaatctacagacaccacctggaagggtggaactccttcaaagactaaatatacctcccttagttccaggagctgcagcttccagcactggtgctatcattacaggacagcatcctttctccagacccctagaacccagtagtatcacaaatgactgtgaaaaggtacttaaaatccaaccagtgaccttcttccccttccctaaaataaataaataaataaataaacaaatagctatcttctccaaaaatgtttggcaaattcatccccaaagacctcttcccttattaagtggcatttgcactattattttttaaataaatgacacattgtggccctaaaacattaagatgaatatatataaagtttccattacacatcacataactacttacctggaactgaaatatttgtaatctgcagtatttgcttaacagagaagagagtgtatctcaaattccaccaaagaagccagttataactggaattcctcataagactgttggaggcagggggtggggggaactaaggtcattaaaaactggagtttacaaccacgatgcaataacttctgaagtaccaaagggtggtctgataagacaacaggtaaaaccaagtaaggtgtgcgtattttagcaagtctgtatctacatcaactccctctccccaagaggtgtcctgctcttctgccaaccaatattctcatgagttctgtgtttctagtctctccccaagactttgtggcattaatgagccccccttcttcacacactgggtctctcgctcccactggcatctcctcttctgccaggcaacaggctccaaagcatccatctttccagcctgacgctacaccatctccacttgctctgtgccagtccctccgcaggcccccccagtttgctatccagctaaatctcctccactaacacagcctctgagggctcaccaagcacctgctgcaccccaggaccccgttcctgtccctgcccttatcttacttggcctctctggtacatgccatatagctgagtgcctctcctcacagtttctggtttctctctccttctcttctttggcctgcccttcacataggactgctcctcttatctcctttcagagtaacctcacccatatccaggcttcacacacatgctggtaatgcccacatctccagcccaggctggcctctccccagactctgctaatgtctccttgtcttccctcaaatggcccacaggcatctcaaattcaacatgtccaaaatggaaacttggtcaacagttctccacacacttgcctcttctccaatccacactgggatactccaggaatccaggttggaaacctcagagacacataaaactcaccatgcctgctgctacatgaccaagtcccactgaccaagccctcaatcttcccagtctggcctccactgatccatcctaatgacctctgcagcagtctccagcctcaactatgccaacccaccctccactctgctcccagagtagcactgggcgaggcatctatagacaccacctcaaaatctcatagcatcttatgagctaggtattttaaacccgttttacagattaaactggagctcacagaggttacaaatgtgtcctatgtcacaggggttgaagccactggccaggacttaaagttcatactcttttcaccataccacccagtctaaagtgaaaatccaggatacttaggccactcagtgcattccactattcaccaccactccctccttgaaatgctctcttcctttggcttcagagattaatactgtcctgggtttcctcccacttctctggcctctcccttaaatgaaccatactcccatggctcttcatccacttccaagggttccatttccaccctcccctccacactctcagcctctcgctggagctcagtctcacacagccacgtactcagatggccacctcagatgatgtttccaaacctgaacttacctttctcccacacctccgaccagctcctcctccaaggtgccccatcccagtgaatgccatgccatttctctagcaccccagccagaaacctgagcaccatccttggacttggcctctccacacttgttcactctatctccaaaacagctctcaaatccaccaatccattccagctgagaaccctgttatctcttgccttggtgacggccaccaattttttacccatttgtcatctatatgacccctctaatccactctttaccctgaagccatagtcatcttctgttttattatttatttagagacaaggtcttgctctgatgcctaggctggagtgtagtggcacaatcatggctcactgccaaccatgacctctcaggctcaggtgatcctcccacctcagcctcacgagtagctgggaccacaggtgtgtgtcaccgtgcccagctaatttttttgtagagacggggtttcgctatgttgcacaggctggtctcaaactcctggactcaagcaatctgctcacctctgcctcccaaagtgttagcattataggtgtgggccaccatgccccgcctgagtcatcttttaaaactgcaaatttgatcatgctgctttcagaaataaaacccttcaatgaaagataatgttttgtgaaatttgaagttactagcttaaaaacaagaccaaaaaaaaagatggaataaaaatacaagtaatgacaaatgtattaggagctacagagtatcccacaaatttgtcattaatactaattgaattataattttaaaaaacccaaccaaaccaataccctttaattggttcatattcctctcaggataaagtccaaactgctggttgcagggcctttcatgtatcacagggctcctgctaaccgttttggcctatgttctcaccctcccactaacacactctgcagccatactggaggactccgccttactttcacctctgaaaactctgacatgttgttatgccctagcaccggtcttgctccctaactcccccatgtccaagttcagtgcctctccttccggcttctacagcaacacctgtccccatctcccttatgactgcgtgtcaaagacagaatagtcacaactcctgcctgtcttgttcatggtgatatctcaagaactgacctcggagcctggtgcacagtaggtgttcagcagtgacagcggaatgaatcttaccacctaacaggaaaccttatgctctccctttgagcacaatcccacatgatagggctcggtgggccctgcatgactcatcccaggatgggttaatctcccccacctctctccaggccccttgctccagcaaggctataggaatgacctgcagttagtttctgggcagttatgttaggcgctgcttccccagtgctcacacaggtgctgtgtggaatttgttttaaaacaaatttgctgctgtccttgaccttcccacccttgattgcaggaaatatcttcttaacgtcttttatttcacagcacagtgattagacatgttattggctcaagttattgagccaataacttttttagctttgtacttttcccagtccattagcacagagcagatgttatttatactagcagtatagatcaacttctaataggcaaaaacaagacaacaacaacaacaaaaaccatcccaacaggtaatactgaatggtcttaagatttttgtcaatggtgaatggcacacatcctttgcgagtgaacttaacttttaaaaagtagctcaaggccaagcgcggtggctcacacttgtaatcctagcactttaggaggccgaggcagacggatcacttgaggtcaggagttcaagaccagcctggccaacatggtgaaaccctctctctactaaaaatacaaaaactagccgggcgtggtggcgcacgcctgtaatcccagcaacgtgggagactgagacaggaaaaatacttgaacccgggagtcagaggttgcagttgagccgagatcacgccactgcactccagcgcgggcgacagggcgagactctgtctcaaaaaaaaaaaaaaagaaaaaagaaaagaaagctcaaaaatatattcaaggtaaataaaaaagtagtttctttttaaggggagaaagaagagggcataaacaataatacgcacacgaaataagtagcacataagagtacaaactggatccacaagcaattcctactgccctgaaaaaactatcctaagtccaattcacatctggaggcgagggctggagagccctgaaaaaggtaagcaggttttcaaagacgtcaacgtaaagtcgccaccgccgccgtctccgcctttaaggattaaaaaaaaaaataaaagccgcccctacctcgggcgcaagacctcagagggagagctgcggcagctgcagtggcctcaggcctttagcgtctaaagactggttgcaccccgactccacctaccgggcaaccacgccgccagccccgcctccgcctccaccaatagcggcccggcggcccgggcacgatgaccaatcgaacgccggaggaggcgtggcgtcgctgggggaccacgcgccgtcccaacaggctggaagggtgccgccacgactggcccctccaggtaggccgccgcccgcgggcgcacagcgctacccggccagctcgctgcggcatcaacggcttctcagcgtcagcgctattatcaggccttgtgaccgtcccaaatctgcccgggtgcccttccacctggcagcctactcgcaccttgtgggggccgcgcgggcacactccccggcacgcgtccagtccaggccccggcaattccgccctttaccgggacatcggccctacagcgcctgcccccagggctggcctgcagctcctggcctctcctcactccctgcccccttctcaattcccttagtcagactcctctcccgccgcatcctaaatcctgagcgcaccctggggcgcggaaaagggtagccgagccttagcaacgccccgaattctccggcccgagcccgcggttcggacccctgcccttccttccccgcagtgccctcaccataagcgtttccaccgtgtctccgacatcttggggttgcagcagcgacggacgtgagttctgaatcattggagatgaggcccgcgagtcctctgggcccagggtgccgtcgacgggcgcttgggcccagccctggaggccttgaagaaggctagggggtggcgctagccaggcgacgcgctttaagccgcgggctctctgacgtctgcgcctataagcacgcagccgccggggttcggatcctgctagtccaggggctgcgggcgcggaacaatcttgctgcgggaattacgcgccgctcttcacccgcgccgcagactccgcggctctgctctcctgcccatcctgccctgctgcaggcttcagcaccgtaggagatgaggttctgtgtatcccggggtggaggaagcgccggaggaactctgtagaaggggagatttcgcttccgggtgggacgcttgtcacgtgagggtgttctgagtgccacctggtgaaaacgcccagaactgaaggatccgcgctt

SEQ ID NO: 9487 - DNA, 6000 bp, Homo sapiens
gaggtcaggagctcgagaccagcctggccagcatggtgaaaccccatctctattaaaaatacaaaaaaattagccgggcatggtggcacgctcctgtagtcctagctacttgagaggctaaggcaggagaattgcttgaacctgggaggtagaggttgcaatgagcaaaaatcacgccactgcactccagcctgggcaacagggcgatactccatctcaaaaaaataaaaataaaaacaaaaaacaaacaaaacaaaaaaaagtgaacatttatagcttggtactatactaagcactgtacatttagtaactcatttaaccctgatagtcaggtacctgtatcattcccattacatggattaaaaatttgaggcaccgaagggttaagcaacttgtccaaagctccagttaagcgtggtggagctctcaagtctgtagtcccagtactttgggtggctgaggcagcaggattgcttgaggccaggagtttgagaccagcctgggcaacacagtaagaccttgtctctaaaaaaaagaaaaaaggaaaaaaaagaaaaaaagggtagtggagctgaagtgttagtttagctgagttctgtagttaaccaccaaagctagatatttacttttaccttttatatgtgcaattcaagtttctctattctaatttataaagttctaggtgactagagctcccatgatatcatctgacatgttgctgttctggactcagggttgttgaaagcagctgacacactctgttaatgattccaaggccagagtcaggctgcagtgaagagttggcctggtgtgtaagaactccatcccccctaaccggcaggatgcaggcaatgattcagtaggttaggctggttccccccatcccatcccctcaccccctgccatcgttcaaaatagtaattatgatgtaatgtttaatgtttaaaaaaatactctggtgatttatggacttaaaaactatctgaatgcaccctgaggatgatggtgaaaggtgcaattttgacatcaaaacaagtgggtgcatctaatatttaattaaaggatcagatgaagaaagcagatgcgaagtcgctcagatggaaatgtggcctaacccccaacccaaggtctgagagagtgacagaagctagtgtcacctttgaatacaaaacatggctacagatgaattcaagaaagaatgaaaatgtattgcttatataattttagggctagtttcttttttttctttcttttttttttttttacgaggcggagtcttgctctgtcacacaggctggagttcagtggcaggatctcagctcactgcaacctccggctcccgggttcaagcaattctcttgcctcagcctcccgaatagctgggattacaggcgcctgccaccacacacggctagttttttgtacctttagtttctttttagttaattattaaaatacaagatgatttattttcaggattcttgaaggcatatagactccctttcaaatgtaaatgagtggaggaaaaactggaagcctgcgtcctcctcctttgctaacaaagggtgtttattagctaggatggcaatgaaaaatttaatacaacgtagtttatagcagtggactgtgtctttggctcctcatctggatgtgtagctctggctcctcatggataagctgtataaagccttattagattcaaatactaaccgtcgctatgccatattaaaaaaaatcattatagctataagctgtatttcttatataagtggggttaaattggttgacttaaagatttccccctttgctaccagtgctaaaaaattgtcttaaccaaaattaggaatgtgctaatttaacaatttacactacaggcctgcttcctggcaatgtgctgtcaattcaagaaaagaaagaaggaaagctacttcacgatgagaaatcaaacctcacccccacttctcgctctctcttttcttcctttttttttttttcctctgagcaatggtccccaggaaacaaacccacaaaccgctgtcaagtttgattcctctttctggagttacagccttcctgctcctccgtgatggctcagctgaagtaccacctctgctactcgttttcaaaatacatgttgagtcttaggaccaggaggacgattgaggttttttttccttgtcatctttcttttctttttctttctttctttttttggtggtgggtggggccaaactaagagggagacagcaggtctgggccatccctcttctgaccctctggggccatcttccttctggcaattctcttcccccatctgttttcctcttgtttttgttttttaaaaaagaaggaaaaacaatcaaagaaaggaaaagaaacgaaacaaaacaaaattacatgaaacatctctatggcaaggccagtatggtagaaaattatggtaaaaaattataggagtgcattgattcatatgagcatttcatgtttctacacaggtctcaaattatggaagaaatacattgtttaggcaagagatggtggcatgagaagcttcctctttaatttttaaattatacaaagtttgcttcttcgtttggcaaaggaggggctctgttttggtcttatttgatcaataatttttcactcctcacacatttcagaaaatgttcactgatgttcattttgctccaggtgctaaggagggagctctgggggcagctgagggcttaggcattcccggtggggctgccaggctcttcctcagcctaggaaacgctcccatctcaggacagcaccctggcccccaagacggcttcatccttttggagaggtacttctgcagcttcctagggccatcagcacatgtgtccagctgggttgatttaagggctttttccagggtgattttcccatggattccaatgagcaaaaccagaggagctggggaggtccatgtagtgtatttttaaatttctccatctttatgatccaggcatagttatgcaggttggacaccgaggtgtttttttaaattgcttatcgaagtataatttaaacagtgaaatcgtgcatagatcttaaatggcatttataagttttgacaaatgtacatacacggcaatctatttttatttcaccaccccagaaggttccttcatgccctttcccagtcaatacctcctcatccccaagggtacttttcctctccccatagcttagttctctgttctagaatttcctggaaatggaatcacacagtatgaactcttttgtgtttggcttctctctcccaacacgatgtttttgagtcatcaggttgttgcctgtaccaggttaaataggatatcactaacagcgagatagtgttaagaaggggacaatttttaccccgttggcctccaggccagatactacctatatcctggtaagtggccctccttgcccttccaagtgagtctctctccagggccatgcaagttcctctcccagaaccgctcaggcggcctcgggcaccacccagatggctgcggggccatcaccaggtcgcctccccagaacagctgccccctgcttccccccagccccattaaaactcaaaagggaactctggcccctctgccgatcagaattcagactcgcttaattccatgcatccaactgcacaccaccgtgtgatgttttggtgatcagatatgcagagttctttaaaaaacgtaaaaagaaaaaaagaaaaggtgggtaaaaaccgagatctcccgggcagtggatatgtctcggttgagccagggattcagaatgaaatcttttcttttcttttttaaataaacggaagagtcgttctctgctcctcgctcagaaggtttcaaaggtcgtcacactgaagcccgggggcgttcatctccccagcggccgggagaagggaggaggttggagggcggagggagggagcacacaaaagcgggccgtgctgagagggctaatgtttcctgtttgcctggagccccctcccctgcctcccctcccccagccccctcccagcactcgggcggaagtgagtttgctcctttggagattaaaaggattccgaattccgatcagtcccaataaccggcgtactgaagagaagaggaggaggaggaggaggcagaggcggcaaagcagagaaagagggggcgcgcgcgcgcgcacgcaacccgaactgggggagttgtgcaaagccccaggaggccggggcacggcgggagcaaagctcggtaggcgcagcgcggccgaggccacccgcgtccggatcggcgactcctttcagaaagaagatgacgcgggcgcgagccggcggcgttggccacgcggctcccgagctcgccgcgcggggctgttgccggttccactgattccagcgcgcccgagaggagcctccatccccgaggctcgggatcggaggggggaccaaggcgagggcgaaatggcccgatgacaaaggaaatgtgatcccccttctctgccaaggtttcagagaggacggacgtgaggaggaggaggggcgcagggcgcgcgcggagctcggatagcattgcacgacggcccgcgcggagcgggtacatctaatatcttcctgccgatgaataattcagggcggcccgcggggacctgcggccccgcgcgctaagccgaaggggaaggagcgtgcgtgaggcgcccaggccaggcgaggcgggggcacgagggctccgggccgcgtggggcgcgcgtgcgtgttaagcgcgggcagccgcggcccggctgggcaggcgcgcggaagactcgaggcgcgtgggacgcgcgtgcgtactgcacgcgtgcggccgcggctgggccaccacgagctgcagctgctgcggggcccaccgccctgcaggggaggccgtgcctggctgtgcgcaagccccaagcgcagcacgccgggccacccaggagcccctggccgccgcgtcatgcggcggggcagccgacgtcgcgcggggagacaccggcttggcgacgcaccgctcccgcctttactagtttggggctccttcccctcccaagaacagactaaatccgtttaaagaaaagcaacgcaccaaatactcgtggaaccaaattctgctctcgccgggactgggactgcacagcgaactctccttttgggaactcctttcgtctatcgcgaagggaagcctcagctgctccagggagtcttccgacctccctgcccccgctcgcccctcgcctgtcggggcttgttccggcgttccctcttcggaaggcacgcggcccccaagttatccggaggaatctgtgtcgccgctggatagtggcatttaatgcctgcagtgtcgggggtggcagcgctcgggccggacgtggcgaggccaagcgggcagcgctgctctggtgccggctcccggattgcaggcctaatcgatgcatttttctgagtgagtcggtgactcccccacccacctcgtccgctctctcctcctcctcctcctcttcctctctggtctcctccctcctccgggctgggttgcaaatggcttcgttccccgagaccgatttccagatctgcttgctgtgcaaggagatgtgcggctcgccggcgccgctctcctccaactcgtccgcgtcgtcgtcctcctcgcagacgtccacgtcgtcggggggcggcggcgggggccctggggcggcggcgcgccgcctacacgtcctgccctgcctgcacgccttctgccgcccctgcctcgaggcgcaccggctgccggcggcgggcggcggcgcggcgggagagccgctcaagctgcgctgccccgtgtgcgaccagaaagtagtgctagccgaggcggcgggtatggacgcgctgccttcgtccgccttcctgcttagcaacctgctcgacgcggtggtggccactgccgacgagccgccgcccaagaacgggcgcgccggcgctccggcgggagcgggcggccacagcaaccaccg

SEQ ID NO: 9488 - DNA, 6000 bp, Homo sapiens
ggtagaagaggaaagagagactttttttctgcttctgaaatctcccagcatattgctttcgacttgtcaatggcaacacagcctttggatgctcacttgaccctcaacgtgtctggtcctttacaattctatgcattttcctgtagcgagatcccttctccgtcttccaccacccactgctttggctcccctcttgctgttccctgcctgcatctgggcaggaagttccaatcctgacttgaccctttttcagctgtgtggcctaggactcattgctcttttctccccatttcatcatctgaaaatggaaaaaataatacctgactagaaagtgaaagtaaaaaagagatataatggacaatgtgcctcgcacagggcctggcatggagaagtccttgatgtacgtcttttccttcccttttatgcagccgtttccctcacacccacccattgattgatttttctgaagagactacttttgtcatgtcaccctctaatccccagactttaaactgggaggtagcagagtggtctgattaagaccttagacaagggtttcttgtctgggcgcagtggctcacgcctgtaatcccagcattttgggaggccaaggtgggcagatcacttgaggtcaggagttcgtgaccagcctggccaacgtggtgaaaccccatctccactaaaaatacaaaaattagccagatgtggtagcaggctcctgtaatcccagctactcgggaagctgaggtggaagaatagcttgaacccaggaggcggacctcagcacttctgcctgggtgatgggagtaaatcctgtctaaaaacaaacaaacaaaaaaaaaaaacttagacaatggtttctcagctttttttaatcactccccaacaagtccttttagatattatattcttttgtgtgtggcggggtacatagcgtgtgtatatgtttgtaggttacatgaaatgctttgatacaggcatgtaacgtgtgataatcacatcagaggaaatggggtatgcatcacctcaagcatttatcctttgtgttacacacaatccaatcatactcttttagttatttgtaaaggtaaattaaattttttttactatagtgcccctgttgtgcttgtaaatactaggtcttatttattctaagtattttttgtgcctattaaccacattatatatatatatatatatatatatatatatatatatatatatataatttttttttttttttgagatggagtctcgctctttcgcccaggctggagtgcagtggcgctatctcggctcactgcaacctccaccttccggtttcaagcgattctcctgcctcagcctcccaagtagttgggattacaggcacccgccaccacgcctggctaatttttatatttttagtagagacagggtttcaccattttggccaggctggtcttgaacccctgatctcgtgatccacccacgttggcctcccaaagtgctggaattacaggcgtgagccaccatgcctggcccacattacattcttactcacctccccctaccatggaattttattccacagatatgctattggtttagctactatatgtatatctgtgttttatacataaagcacaagaaccttccagaaccaattttcgccaccttggaagtaataccacctctactaagaatgcacagcatagaccataaaacctcaatgctaagttcaaatattggccctaccacacatgagctgtgtggtcttgtacaagttacataacttctcctccttgtctcaaactcctcacatataagatgaggataataatagtacctgcggccacacacagtggcttaaacgtgtaatcccagcactttgggaggctgcggcagaaggatcactcaaactcaggagttcaagagcagcctgggtacatggcgaaactctgtctctacaaaaaatacaaaaattagctgggtgtggtgatgtgtgcctgtagttccagctacttgggaggctgaggtgagaggatcgttcgagcccaggagatcaaggatgcagtgagctatgatcatgtggctgcactccagcctggataacagagccagaccctgtctgaaagaaacaaaaacaaaaacattagcacctgcatcatagggtcactgggggcactacatgagttcatgtacatcgaggacttaggacattgcctcaggcagacctagtgctgcacaactgcttatgtaattattcccaaatttctccagggcccacagaagaacatggaagtatcttggtttggcaattaaggtgaatcacattctcactctccttttctgcatctctaccccacattcccacaaagctttattcacaccaagtctccagtccttgcctgcattgtgtgatgggtgcctgcagtgatgggtggggacacccatcactgtccagggtgtccccaccatcctcacagcctctctgtctggcctcctgcctttgagccagcccaccacactctcatttctctgcccagcagaaaccaaactgtcctctgcatttactgtctcaactggaagagaaatgcagaatgacaaagaacttgtgaacaagggtcagctccaacagagagtgaagccaaaggggctgggcagaaagagagatgaagacggggatctaaggaataaggctgtaccagagtgagagtacgggggaggggttgaacaagagttcagggaggagagaattcccagcgctgagccagagactcctttacagaggcccaaggaggcgtggagggagggggaaggctgccaaggctctttctgtctccatgagtgtgtcaagaatgcaaagcactaatgctcttcacttggtccatcttgcagggttgagtttgcagtgagcaaccttgaaggatgagctgacatctcgctcagggccaaataaccgacttgcttactgcttgctataaaatggcacgttacccaaggtcagagttcccttcctataacctccccatccctcacacattcacaggtatctatccaagccatggcatcactctgtggggcttgggggcaaggcaactgacactggacgctggttctcatgcttgccaagcatgaagccctgtgctgctagcagctgtggaacatagccgttagctttaaaagagggtaaaatcacgtcctggacaggacagccaggtgagttgggaagggaagagagcctgccacgggcacaggcatgttgggggaagtggaagtggtgagagcacagtaggaagtgagaaggggcgggccgtgcttaccaggccgtggacttaaaccaggatgagagaacccctggaggcgtttaagttggcagacttggatttcaggaagagctctctggcttctgggtggagaatggccagtggggtaagtggtgagaggaaagacagagaacggagaaggttagatgggcttgggaaattatccaggccctggatggaggtagagatgtgtgctcatgaacacggaggggattactgatgtggggtggatgagactgtcgtcaagagtgtgggacaggaagagagggagagtcttggccagatccaagaaaggagccctcagaagaggaggggagtcagaggcaaggaaggggctgaggcagccagcccagctgagtggaccccaggagaggtatcaaggggtggtgtggggtggggaggggccagtgtcagaaagtggatggggagcggcctgactctgcttttgtcctgtggccttctggccaaaggcagggaaaggtggccaaacactgagaccaagaacaaagaaagaaaactgctggtggacttcttccaccatgagcaggccaccaagcccgcagcactgcactgcagcccccagctctgtcctggggttgggggaggtgaggaggggcaaggtggggagcacacagagcacccgctgtcctcggaacaccacagcgactagaggtaagggagcaccggatgtggctgggatgtgggcagcaaggggccagaggggccttgaaggggtcacagaccatttaatgaaggtgtattgaaggccaccatgggccaggccctagttagggatggatcagaattatatagcatatgccaggggtcaggcaggtaatgaagtgatcggaaggtgatgaggcagtggcagttgagattcacgttgcagtcgccccaagctggccaggccagggagcagaagcatggctggatgccggagcccaccaggctccccactgcagggcaagagtggcagggggagagactgtgaaaggagcataggccaggtcctgggtgaaagctgtgtcctcagccttgactgatgggtatagggagccactaaatgccttggggcagagaggtgaggaaaaaaatatttaccgagcatctacaaggtgcaaggtactcactagatgccttcagtaccaaagcttctcaaacttagtatgcatatcactcttctaagaatttcattaaaatgcagattctaattcagcagatatagggcagggcttgaggtgctgtctttaataagctcccagtgcctgggactgcactttgaggagaagagctgtgtgtgccccagtgtggtccagtgagtactctgggctccctctcgtgggcagggaagctgagggccccatgagctctcccagcttcctgaaggctccccattaatgagagctgactgtgctgtgctttgctgactgcagggcctgctccctgccccccacctccaggttggggtaagtggcacctctctccctccagctccgcagtcttccctgaggtttagatcttccaggtttataaagtcaggccctcctgttggcagctggcctccaccctggagtatctgagcttgcctgtggcagcatctaaagatagtctcccttacaggaaacaagatactattggctaactctgcaaataaaatgctcttagagggaaggaaagggaaatactcgtctctggtaaagtctgagcaggacagggtggctgactggcagatccagaggttcccttggcagtccacgccaggtaggtgcacaggactagttgggtacctgtgggtggggtggagcagtggacagctaataggttaataatgcctgtttgcttacgtgcagacaatggaaaccattttcctggggatgttgtagcctaaatatgtccaaggggatggaagagtgggaggcaaggggtgatcagatcatttataatacactcaacctggtggaatagtattagaagcattagtaattacattttagagacatggagaaaagctcatgattttaaactaactgaaaaaagcatgaaaaattgcatctggatgctgttgaggaattattgctaattttttgagatgagaaattgtattaaagtctttttcaaaaaagagtccttaacttttagagatgcacacaagtgtttatgggtgaaattaaataattcagtagagacattaagtgggaaatagaggaaatattgaccatgggttgctaatagttgaagccaggtgttgggtataaggaggttctcgctgcttttatttgaaaagttgctttttatttgaaaatttaataataaagagtttttaaatttgtatctgtattttaatataaatataaatgcacttaatataaatataaaatatgtataacatttagatagagaaaagctaaaagattactgtggttgattctaggaaactgcattgcagatagtttcatgggtttttttttcctttttcttccactttttgtaccatctatgggtttttgtttgttttttgttttttgggttttctttcttgtttgtgttttgttttttgagacggagttttgctcttgttgcctaagctggagtgcaatggcacagtctcggctcactgcaacctctgcctcctgggttcaagtgattctcctgcctcagcctcccaagtagctgggattataggcatgtacca

SEQ ID NO: 9489 - DNA, 6000 bp, Homo sapiens
tcgcatctatgctggcgggggcacgggcagcctttcacagccagccagccgctactcttctagagaacagctggacctgctcctccggcggcaactgagccgtgagcgactagaggaagcccctgcccctgttctacgtcccctgagccggccagggtcccaggaatgcatggatgctgcaccaggccgactggagcccaaagatcggggcagcaccctgccacggaggcagccacctcgggactaccctggcgccatggctggccgcttcgggtcacgggatgcgctcgacttaggggcacctcgagagtggttgagcacgctgcctccgccccgccgcacccgggaccttgacccacagcccccacctctgcccctgtctccccagcggcaactctcaagggaccccctcttgccatcccggccgctggactctctgtctaggagctcgaactctcgggagcagctggaccaggtgcctagccggcacccctcacgagaagcccttgggccactcccgcagctgctcagagctagggaggactcggtcagtggccccagccatggcccctccacagaacagttggacattctttcctccatccttgcctctttcaactcctcggccctctcctctgtgcaatcttcaagcacacccttgggccctcacaccactgccacaccttctgccacagcctctgtgcttgggccctccacgccacgttctgccacgtctcacagcatctcggagctgtcgccagactcagagtaagtatggtccagccacctgcttgcaccctcatcagcttagggcaacctcctgtgtgccctgccctgtgttctgccacagaaggggatgagggctggcagacaggtgtgggctaccccaggctcagcacagccagagggccacaggctggggacaggaatctggcaagaaatgggggtgtgactagcagggacttgctggctgtgtgactggagccagccagccttcccagcacctcccaggctaaggagaaataggtgccatccgatgggctgagctagcgaatgggagggcaggagctgaggcctagaagtgggagatgacctggaatatgcaaggggcagggaggagagcaggaggccttgcttgggaaggttcgcctagggggtcatataggacaaggagaggctggaagtggtgccaggatataccaggctgaagggcttgctttgttgaggataaatcattcattcatcgatgtattcagtcaacattgagttcctcctgtctgtggacactttggggtggggctcacaggaactgagttggaacctggttcatctcgggtatgtgtgaagcatctgtggggaaggggatggcggacagacccaggaaatagctggatacacaggagtccgagagggactggtgggagtggggaggaaccaggagcttccaggtctcttgtaagccaagaggagagttgagtttcaaggaggagaaacagctgggtcaggctctgggggtttgtggggtaagagatggcttggggaggaagggggccctaggggtggggcaggggatcgacagaactgagcaggacccagggcagagagaggacaaaggaaggaggaaagagcaggggtttggggatcctggggcttgggcactgagggctgctgggggtggggaccagagggagctaacccacggcctgggtccccctgcagtctagctttggggtctggctgtttgggaggtagactagggactgagcaggggtccaggctctggagtcgcacaggtttgagtttgagctctgtgtcttaccttactagctgcgtgaccttaggcagaggcaagcttttctgggcctcagtttcctcatctgtaaagaagtctgtagtaacaaactctttgagatgtggaaatctatgagataatatctgtcaagtgctcaatatagcatctgtaaacagtaggtgctcttgaagcacttagagaaaacacctgggcagccaaggagcctggctgagtctaggggcgcggaatggaggactctgagaaccctggagtgggcatgaaggggctgggggctaagaggcgagagcagtggtggaggcaagggaagcagccaggccaaatgtggtgggggagtccagagccgcctgactcggagtcctctgggcatcaacctctgatttcctcatgtgcctccagagttcccagaagtgagggtcactcctgaggggatgacggcgtggacgaggaacagctgagggcgacagaggatctaggctaacaggagagactccaggagtgggggcagatcccaaggcagcctcctgctccccagtggtgggtgccccagctctacctggtgtggcagggctgaggctccatgtgcatctgtgagcatgcgtgtgacaggtgcagagacgggggactggagggagacttttatacgttttgtacctttgtaaccagagagatgcttatgttatttttcagcttttctgtctcctggggggtttgaggctgggctgggagggggagggagatagagggagagatgcagtttgaccccatttgggtcctgagcaaaccctatgctcatctctctctccttcctggggtggactcagatgggtgggacacatgccttcctccccctattccacccccaagttgatctgagtatcgtcaggggcccaaagtacagaattgttctttgctttttattgaatgctccaaaggccaaacttctggggctgggggttggtcttggaaacaggggtcctctgacttcctcatgggggcttgctcataccgcccctcctggtggatgtgtgtgtttattatgtggagtccctgccacttactgccttatgacctaggactgatgctgtggggtgctggtggagcagctgatgtcgtgtttacagagcaaggcttccctgtctcccacggggaggggctcgggcctctagtcagacattcctgcagagggtcggtggaggggtcattcacctgcccctgcagcaagcaaaagttgtctgtggtgccatttgattccctgacactgccccctgcttgaattgattccgaagggtagggtgggaaggtgagcaaagggagcagaaacaagggaattcaagacccagaatgtaggtgccactgcctcctatgtttacaggatcctccgtggccctaggcacctgggctgcaggaagtgactccgttccactcctcctttattcccttaaaaagggaaaaatgactgttacgaccctgttcacaaaactcttacttttgctattttgtctgctgtccagaactgaagactttaaaattttgttactgtttacaagtccagattcaaaaaatgtttttactttgtttacaactcaaaactttgagttttacactttgtttacagtagataattttttttcctttgtttccaagtgaaaggtagggaaagtgggagagggacttggaggacccacctgtgaggaccctgacctggccatcttgaggggttttctaacccccaggtctcccaggccgaaggtcagccttgagtcccgtttaacagcagatccagaagaccttgagagtaggcgtcctctaaccacgggggagagtggctgtgcagggctggggggtggtctgtgcagacacctcctcacccaccaccccatgcatactcttgggaagcagcttcctgggagattagaaattctacttccctgactggagctaaatcccaccagccaggacccaaactctccttaccgagaaggaccccagctcttgaagggctgagtggcctgctgggggtgggagggtgtctttactatgtcctaggtttcgtagatgcccctctctggggttcccctcctccagcccagcggccctctttcctgtctgtgtaaattgttccgtgaagccgcgctctgttttgggaataaacttctatagaaaacagttgttgccttttcctgttgggggctggggaggtaggatggaagctgtgaatgattcaagccagactgacctttgggaggaatctgagcccctcccaagaatatccagctatttttagcccatttcatggcagatctctttcaccttgaaatctggcccctcactttgtaattggggcctgatgttggagcacaggtgctgaaaataaggtgctaaggaaaacctccccgctggtcaaggcaacggcaacaggacttcctaattcttcagggtctgcagccctgacccggcattttttgccctcacctgcggtgaaaccaacctgaggaactgctcttgcagttcctgccttgcccacccaacagcactgacgcccacccaacagcactgacccccaccattctcctcggcggcccgcgcagtaaccttctgggagctacgtccgggctgtgcttagtgcagcggaggggatcctccaaccatttctggcctgggtggccagagttaaaggggaggacttggggaccgttggctccgggtctcaaagagatgcgtagtcgcagaaagcctgcgggtggcgctctcagctgaaggcaagagaggccccacagacctggatcccctacgagttaaggctggggtcaccggccagtggagtttccttttcccactccgtgagcaccttccgccgagccaggacctgggatcagctccaacctactcagggcctgggggcgcgactgcggccagcccggcgcgggtgcttagttccagttctgcagtcccatccagctccgggcagagggccgggcgagcagcgagaggcctcataggccaggtcgccggggaggaagcggttaaatcctccttctccagtctctccccgcccggcgcgcgccacttaggccccgccccagcgcgctgattggcccaagcctccccgtcctgccccgggattagcccccgggagagcgcagctggcctcacccggtcccggcgccgccttccggagcgtagcggcctctagctcgagcagcaggagcagcccgcaccggacaacttgcgagccatggggctggcggatgcgtcggggtgagttcagcgcacattcccggtggccccgcgcgagcgcctcgctggagcaggcattctccgcttgcgacgcctcgctggagcaggcattctccgcttgcgacgcctcggtttacctctgctgattttctgcaggcggctgcccctctgcagcaaggggtgggggcgggagccggcgcgaccccagtcccttgggctgtgcggaaagccgctggtgtgacgcccgagggccatcccgggccacagggaggcagctgcgtgcggaggagcccggccaggagatgtgccggcgggggtgcgtggggcacgggagtccctggcagcggcccgtggactagctgctttcagctgagtcccgagtccacccagctccactgatcccggagtgagcgctccggcctttctggccccagttgccttcctacagggaggggccaatgatcaaggctccgccctccaaacgcgggtcccaagttgtcgggggagggagccctttaagaagacctgagtgactcacgtaggaaaggagagggggctctacgatctccttgagatagcggtcccaagagtctctgaggatcttccttgcacccactccacactcctccaacagtacagccaggttagaggcgcttcccaggtgagttcctgtccctcaaatgggatcctctccccaggtcagggcttttcctagatcagaactttcctgactggtgaaagcttccccaacaggctagagttttcccccaggtaagatccttctgtgagatctattcccaggtgacagcttttccccattccacgtgggagcctcgcccgaggtcagagctttctctatgggagagtaccccccaggtgagaaccctctccctctaggtcttttcttcccatgtgagatctttctctgacttcaagtaggtgcctctggg

SEQ ID NO: 9490 - DNA, 6000 bp, Homo sapiens
gaacaatttttcactttatttatgtctttatttctcattttttttactttttttttttttttttttttcagatagcgtctggctgtgttgtccaggctggagtgcaatggcatgatcttggctcactgcaacctctgtgtcccaggttcaggcacttctgcctcatcctccagagtagctgggattgcaggtgcacaacagcatgcccagctaatttttttttttttttttgaaacggagtctcgctctgttacccaggctggagtgcagtggcgcaatttaggctcactgcaagctgcacctcccaggttcacgccattctgctacctcagcctcccgagtagctgggactacgggcgcccgccatcaggcccggctaatttttttttgtatttttagtagagacagggtttcaccgtgttagccaggatggtctcgatctcctgacctcatgatccgcccgcctcagcctcccaaagtgctgggattacaggtgtgagccactgcacctggccaagctaatttttttgtatttttagtagagatgaggtttcaccatgttggccggactgatctctaactcctgacctcaaatgatccacccaccttggccctccaaagtgctgagatttcaggcatgagccaccaatgccaggcctatgtctttatttccctcaataatgttttatagtttttttgtatgtgtgtatgtagtctttgcacatctttcattaggtttattcctcagcatttgatattacttgatgctattgtaaacatcattgtttttaagaaaaaaaatttttttttctcgttcactgcaacctctgcctcccaggttcaagtgattctcctgcctcagcctcctcagtagctgggactacaggtgcccaccaccacgcccggctaatttctgtatttttagtagagacgggatttcaccatgttggccaaactggtctcaaactcctgacctcaggtgatctgcccgccttggccacccaaagtgctgggattacaggcttgagccaacatgcccaggcaagaaatttattttctaactgttggtgacatatagaaattgcaactgatttttatatattgatcttgtgtccaacaactttgctgaactcattctaacaacttacctataggttcctttgaaatttttacatatacaatcctactgcttgtgaattagttttttttcccttccaatcttcataacttattatttttcttgccctactgcactggataggccctccgatataatactgaggcttgtggtcatgaatataaaatgagaccaattagcacggttgtttgtttttctccagcaatgttctgctgcgctagaggcaaacaatacgtaaatagtctattttaacggggttagattttagcccagcaagtttgtctaagaagaacagggcaggccgggcacaatggctcatgcctgtaatcccagcactttgggaggccgaggcgggagcatcacaaggtcaggagatcgagaccagcctggctaacacggtgaaacgccgtctctactaaaaatacaaaaaaaaaaattagctgggcatggtggtggacgcctgtagtcccagctactcgggaggctgagtcaggagaatggtgtgaacctgggaggcagagcttgcagtgagccgagatcgcgccactgcactccagcctgggcgacagagcaaggctctgtctcaaaaaaaaaaaaaaaaagaaaaagaaaaagaacagggcagggagtttccgtggcactgaactctataaggctaatgacacaggtcaatagctgaggtgatgaacaatggactcgagatctcagtgaggtcaaagaactgctggataattgagctggacaggttggccaggtcttcccctggaaaggtacacctggctgggagtagacaaacacagggtggggtggaaaaggcaggagaaggaaaggctgagaagtgttagtggcagtatctgccacacccttaccctggtcttctgatcgctccatctgccgcccagcagcctcaaatccaggtctctgggtcctgggtggacctctagttgggagctgataagagaaggaggataggctgggcacggtgcctcatgccggtaatcccagcactttgggaggctgaggcgggcagatcactagaggtcaggagtttgataccagcctggccaacatggtgaagccccatcacatggtgaagccccatcacaccacttcactccagcctgggtgacagagtgaaactccatctcaaaaaaaaaaaaaaaaaaaaaaaatgaggttaaaccacataggggtcttattaggaggcaagggcaagatttggaggtggagagaagaactaccaccactatcactaacatctggtttttgtttttttttttttaccgggagtgcattaggagctgccaatggggctggggcatagaggtgagtgcagattgagggagaggggctccacagaacagccacaaagggaggatgacagtgggatgacacacagcaggcagcaacatggagagtgatccgcaatcaatctcactactcagaagtgaggagctttgctctccaaaaggagtgttagctgggaccagcgccagccctattggtgagagggcagggcttgatttccctcagccatagtccctttatgtctctgcacatttgcccacacagtctccaagacctaggatgcccacccccaatccctatccctccctgcccttcctttgcagatgcggatctccccttggtcattcaaggcactgctcaggcatcttatgcaagaaggcgtcccaggttgcgaaggtgactcagacgcctcctttgggactccaacacccttccccggcagagcccctgcctgtctgcctccgtggtgtcaggttttgtgccctctactcactagattgtggacacagaaagcgctggtgctgtcaaaaccacttctgggttgccgggcgcggtggctcacacctataatcccagcactttgggaggccaagatgggcggattgcttgagcccaggagttcaagactaatctggcctacatggtgagaccctgtctctataaaaaatgcaaaaattagccaagtgtgatgacatgtacccgtagtcccagctactcgggaggctgaggtgagagaatcgcctggggagttcgaggctacggtgagctgtgatcaccactgcactccgaaagagtgagaccttgtctctaaatagataaataaaactactttgggggactcgctcctccagcccctgcaccgattggctcccattcaaaggagttcagccctaagtgcctctgcagatcttccacccccactcacaaacccgtaggaaccccggccgtgtatcaggcccagagctctgatcctggggaggtcctcagattcgtagacaggagagggaacaactggacacctgttgcctgaccttggtagccacaaggggcgctcgggaggtggaacccgcagaagccccgcctcccggaagcggagcagtcaaggggcgaaaggatgcgccgactgattggttgatggtgatgtcatagggaccgttcggggcgggccagaggccttggccaggagttcctcgcctgttagaaccaggatccaccccatcgcgggagccgcaccctgtggagcgttctggggtcccggccctgacctcttcctgggcttcgggatgcccgcgtcctctgcacccggcgctgcagctcgttatcgattccgcctttggaggccggtccgtatagtgtacctcccggactctctcacggttagccggcaacccgcggagccccctcccccatgcgatgagtccgccgtgaggggcggggcctcccattgtgccaatagaaacaatgactgaccgattggagtgctccgcgttcacccctcgcctccgctcctctcgtgacgtctgttgcgccaggtccacccattggcctggcgagaccggcgcgtgccaggagttacgcagggagagctggaatgcaccgagggtggggggaggactgagtttctgtgtcagtcccttcaaggggttaaggcatgcggtcgtgacggacgaggggcggggacccgaagaagcggggcccgcagccatggggcaacgccgggctccacgtggcatcccagagcactcgggactcgcagcctgggagggggtgcagcctccagtgaaggggccccgagcccgggagactgctggggaccagcaaggcagggaagaatttggcctctgctcccgcctcgggagggtcatctctggtccctgctccgcaggggcgatccaaacaagcaggtggtcgcgacatgtttcataaaactagctgatgggatagttaaagctattgttcggggtgctggcaccccagacccctctccagccatcgtcccctctaccccaggatttcacacagtaccccctcccagagctatgagaacgctcatgggcaccaaaatttcagaccaaaatccgggacacggttcagaactagtggtcaggaagggggaacaagagatctggaaggacagaaaaaggctgggagacggagctgggacagcgccctagaaggagggaggtgggtgaaggcggcgaccgaaagtggggagggcggacccaacgacggcgaaccttcgcgctctgttcagcaccaggagcaacgctcacgtcctcaataaagatggcggcaacatcttcggtcctcagagctgccatgcgcgatgggttgtaccaccgtgtttcgggcgccggggcagaggtggagcgaaccatcggggcggccgggagccatgttggagcggcgggaggcggcagcagcgtcggggatgctgtggtgggggcggaaaaagccagggccgcacgccggaggggctccggccgcggagtagatggtgcccagagggcggcgggggtgcggagagacaggcggaggggcgggggcccggggcggcggcaggggcccgggagggggcccgagcggcggggccagcccaaggcccggaccggggcggggggcggtggaggccgtgcagggaggcgggggatgatggcgaggcggccgccgtggcggggcctcgggggacggtcgacccccatactcctgctccttctcctctctttgttccccctcagccaggaggagctggggggcggtgggcaccagggctgggacccaggcttagctgccactacggggccaagggcgcatatcggtggcggagccttagctctttgtccggagtcttccggggtccgggaggatggggggcctggcctgggggtcagggagcctatcttcgtggggctccgagggagaaggcaaagcgcccggaatagtcgagggccccctgagcagccgaatgaggagctggggattgaacacggcgtccagccattgggcagccgcgaacgagagacaggacagggaccagggtctgtgttatactggcgcccagaggtctcctcttgcgggcggacaggacctttgcaaagaggtagtctgtcaccaggggctctgtcctcaggggtcccgggctcggggaacagctcgcccctcccttcagactttttgattcggcaccacggtcccaagccggtgtcctcccagcggaacgctgggacaggctcccgcaaaagagtgggcaccgcgcgctgctgtggggaattatgggcaacagggagcaagggtcagggcgagagagccacgacatccggagcagaaaggacagccccccggcggaactgtcttccaggggcctcgggatctggccccgagctggattcagcaccacgcacggcgaggacagctcctgcatcaggttcagcaccccgcgagtctcggacagctcccgagccggcgcccaagcgcatgcgctcccggggtctcttccgctgccgcttcctcccgcagcgccccgggccgcgtcccccgggactcccggcccgtcc

SEQ ID NO: 9491 - DNA, 6000 bp, Homo sapiens
agaaaaagaaaacaaagatacaataggttgaaagtgaaaagatggaaaaggatattcatgcaaatagtaaccaaaagagagcaggaatggctagacaaatatcagacaaaaatgaatttaagtcaaaaaattatgaaataaaaaagggtattatatattaataaaatatttaatacaacaagaaaatagagcaattttaaacattaacatgcctcataacagacgatcaaaatacatgaagcaaaaactggtagaattaaagagaaaaatatacaattctacattaatagttggaaactttaacattccaccttcaatcacagatagaaccaccagacagaaaataagtaagaaaatagaggatataaacaacacaataaacccactagacctaaaagacatatacagaacactctacccaacaacaatgatatgcacattcttttcaagtacacatgggacattttccaggatgggccatatgttaggccacaaattgtgtctcaatagattttaaaagacaaatgtcatacaaagtcttccctgatcataatgggaggaaattagaaatcaataacagagtaaaactggaaaactcacatatttgtagaaattaaacaacacacttttaaagaatcagtggatcaaagaataaattacaatggaggcataatgctcttgaggatgtgaagatattggaacactcatgcactattgatgggaatgtaaaatgatacagctgctgtggaaaacagtatggtagtacctcaaaaaattagaaacagaattaccacatgaaccagcaattccatttctggatatatatctaaaagagctgaaaacaggatctcaaaaagatatctgaacacctatgttcatagcagtgtcatgcacaatagctaaaatgtgaaagtaatttaagtgtcatccatagatgaacagaaaagcaaaatgtggtacaattgaatattattcagccttgaaaagaaagaaaattctgacatatacttcaatatcaatgaattttgagaacattatgctaagtgaaataagccagtctgaaaaagacaaatatagtaggattccacttatatgaggtacttagagaatcgcttaaacctggtaggctgaggttgcagggagccgagattgcaccactgcactgcagcctgggtgacagacggagactctgtctcaaaaaacagaaaaagaaaaaaagaaaaaattagatgatgatggagggtagtaaaaaacaggaagaaaataggtcgaaaagttaagatagaagtagaaaagggaggtaacatgcaagcacacagaagggtagatgcagatataaaaaaccactatcatttatttatttccttccttactattactctgctacctataatgagtgatttggtacaaatctgattgattgagaagcctccttctgttatttcctgccattctcttgtagaaaggaagaaagtggtgctcaatattagataataataagtgagttgaactatttttctttcaagaactgtattacagcagcagaatgaattcaaacataaaacctaacactttctcagatggttctcatctatcaccagatctcattggagaggaacaggggctaaggttgagaagaaataaccatactactggaccactcactgcatttgccaactttcatttacacttttacaacttgaggtctgattccagtgaaaaacatactgagaggctcttgttcagaccagatcagtatcatgcagtttaagatcatcatgataatcaaatcttccagttcacagtaaggaatgccagttataataagacatggaaacaaaatgttcctttattcatataggtcctgcaaattgcctccccataatgcttcatttagtctccatactgtcctagtgagtgggaactcagtgggggtttaaagtggtgtactcaatggtcggtgctcaaggcaaggtttcttgtatcattccctggaacagcatttcaaagacaagaagagaatagtcccaccacaaacttcacatcaatttcctttcaaacaaaatcactgagtaaccatatgtatcagaagcccaccatctctcttctcttgctctagacttgccacttcaagttgaaaacataaagactttccctgatgaagggccattggctagtacatgagaatgttccagccatgctattgagatggagtttctggaaggaagatgaaaaaaatgatctatatttttcttgatttctgcccaggcatatctcttctgtaggcatcttggagttcttcccagaaggcatatctcaatgccaatcatgaataagggttccacttacttaaaagaataaaattgtttgttgttgtatgaatgggaagtgccagataaaaggagcaattgctaatcttcacctatagtgaagtccagagagaaaggatcacttcatttaccctgcttctcttctatttccacaccaatccctccccattcaccacgggggtcaaggagtctaccagagacagctaagtcagaacagagttgactgcctagatgtgtgattttaggcatgtcagttaattttcctgtctcttgttcctacacagaattagagtctatatcactctttatcttccttttacttttgccaaaggaaggcactaaaaacatgctgaggaatatcttgccagcatttacaactgcccttgaagagagaatatgtgttctcaacacagaaagttagaaatagggttcttcctactacattcacgcattatcaagatagcattatcattaggcacaatgtcttcaaatgttaaagaaaataaacataggatactgaaacgtgaaaaccatgttgctgaaaatgagtgatatgaggttcttaactccttagaaggcctttgcttcattctgctcacataacagcctgacattactccctgcttttatatgtcagacaagccaagttttagcagtgcatattctcttggtccccttatccaagggaagaaaagccttggagttcacattcaacccaggagttctagtcttagggcatgttcaatatagttatgtcatataactaatacatttatgcccaataagttatgggcaaccttggatatggaacctaacctctctaaccctctgtattagtttgctagggatgccataacaaaattccacaggctaggtgaattaaacaagagaaatttatttttgcacagttttgaagggtagaaatccaaaatcaacagggtggcaggtttggtttctcctgcaagacccctctccttggcttgcagacagatgccatcttcctgtgtcctttcctctgtgtgcacatttctggtgcctcttctttttcttataggaaaccagtcatattggattagggcgtaccctccaggccccattttaacttaactcacacttcaaagatcttacatccaaatacagtcatgttctaaggttagggcttcaacacttgaattttggaatgacacaatttagtccataacagcctctataaagatggcatcatgaagactgatgtaatataatttacagaatgatttctaaatcatctaaatgatttctaaatataattatatacaaatgtattattaatattattattactgtcataattattattctctctgacatattatcagtcttttgggaagtttaaattttcttcttttggaagactataccatagtggttaagagaattaggttgtttagatccaaatcttgggtcagccacttgttagctgtgtgactttcagacattatactaacctccataagctttaattttcctatccataaattaaggatggtaaaaaatagtacctgccttgtagggttgttgaaaggattaaaaggagcaatgcattaaaatgactggctaaaagtacatgctcaataaatgatggttgttatcaatagcagtatttagaccttgttgatgctgctgccttctttctcagccagcagaggtctccatcatagtcaaacaagagctagcttccctataactgcaccgcagttgccaagcacatccactgttggcagagaaaacagccgaagaattaccacactgaccaaacagaggagaaaaaaaagagagagagaacaggaaatggttaggatgccacagtaaaatgtaagatgaacaggtgaccataagttaggattgtttatgttctactgctgactttcactgatattgtccttggttgcatctcactttagcttgttccaaaccagttttaaaaaaggtatctatgtatatatcacagagaagcagtaagaatgaattggcaaatatttatgaagtcctctgaaaacaagaagtgctgctaagtaaacatttaacatttcttacagtattaagcttatttcatccttattgccagttatacgccatgcctcagttttgctacctttgtaatatgtttcctttaaccttcttttcccagacaggcttacacctccaagttcaattatcctgtcaattgtgttttaaattgtactgatttccattaaccaattgtggtatcaatttgatgatctgttccttctgaactaatcatctttacacccaccaaaatctggaaaggcaattaaactgaggaaggtgagagttattcaagagaaattaaagcataaaggtaaaaacagtggaaaaactaagattaaaaagagcactgaggagaaaatatacatgtactaaaaagcacagtatccgagcagatagagagacaaagaggaaaagagagcgaggtagaaaacggatactgcctatgcctactccatccctctttcagcaccaaggacagaacctctgagcggctgacccaagcaacgctcagtttagggtccctcccaaatcctctaaagaaaacggatacattcgaaagcagctatgaaacatgcactaaggtctaatagggaagctggaaaagcagcactcaagtaatttcaccttagaggcaaaaatgggtgatttctttctgttcatttcatagtttctgagtcctgagaaaggcaaagtttgctttgcttgggtatgtctgctgtcagtaaatggctgcaggagccgaagtggtaaactcctcggtctccagaaatcagaagaaaattttagggtaagtaatttttcttttcgtttctaatttaggacatagtattttcctcaaggttatttaatcagcttggggttctgtggatctctaaaaatatgcattaaaactcaatatccactcttatttaaaaaccaaagccctgaggaaatggttttctttttcttctaagtggttggacagcagaaaccttttatattcctttttcttttattttttcccccaaaattgtatccttgtgggctctagaagctatatcaaggaagaattaaaagatagaaaacaaaaagctgttattatttctaggatttgtatggaagttgattgtattcctcttaaggattttacttaattgtaagggtctgttattttaaactcctcaattcagcaccctggcaattcagagctgaaggtttggagaggcactattttcaatggtctatttaaagtcaggctgtttctaagtcagaatccaattattcccagcagagatatgtagtacttgagatgatgattgtgtatgtttcctttgatgatggtatatgatttttagggtattgttatttaattgtgagacttccattacttgctgtagcttactggggcaacagaagtcattgcaattaggtatttgttccagttcatgcatttagtttaattgaataccatcaaaatacatgcatgaataataatgcagcaatagcaaagtgaaacttggattctaaactcattgtgcatgactatttcactttataggtgaagcctttgcttactgatactaaaaggtctgtaaaatatctgtccttagataagagtgaagaaccactgcttgacatg

SEQ ID NO: 9492 - DNA, 6000 bp, Homo sapiens
cttctatttcgccatcttgatccgccgccatatatcattcttatcaatcattttctgtttatgcacctgaaaatacactggtatacaaaattaagatccttactttcacagaatttgtgttctaatgggggaagtcaataatcggtggacaccaatacatatataaattaaataacacattaaaaggtgttgaggacatgctgggcatggtggctcatacttgtaatcccagcactttggggggccgaggcgggtgcatcacttgagatcaggagtttgagacaagcctggccaacatggtgaaaccctgtctctactaaaaatacaaaaattagctgggtatggtggcaggtgcctgtaattccagctactagggaggctgaggcaggggaatcgcttgaagctgggaggcagaggttgcagtgagctgagatcctgccactacactccagcctggacaacagagtgagactctgtctcaaaaaaaaaaaataaataaaaataaaagctgttgaggacaatggaggaaaaggcagatcagagaaagaacatttacaaaagccagagggagtgtgaagcaattttaaatgaggtcagatttttggataatttctattgctatgtttttaagttaaccaatgtttctttttgcaatgtctgatctgttacatttttatttcagatattatattgttatctctagaagttctatttagatctcctttttatctttcaattctctcctcattttgttcatattttgctttatatcctagagcatatttataatagttgttttaaggttcttgtgtgatagttatatcatttctgttatttctgtgtctgatattatttatctattttttaaaactttatgggtataggtcatattttttcatttctttgaatgcctggtgattattttgaattttacattgttgagcactggatgttgttatattccttttaagagcattgagttgtgttctggaatgcagttgagtttttacagatcactttgatccatttgagactttcctttagggtatatccagagtaacatctagtttagagttaatttgtttttactactaagatgtggcttttctgaggattttatccaatgtcctgtgtattttggggtctctccacactggctgatggaaacacagggtagtctcagccctgtgtgagctccaggaattactcagctattgcctatcagtgtttttttcttcaactccaagtagtttcttccagctcatatccaaatcatacttaggagaagactgggggggatcctctgcagatttccaaagtgctctccccactctctgtatctccctcttcttcattactctgtcccacaaattctaaccacctcaacatccttaaattccaatccattcccccttacctcaggtagaattctaggttctgattggttttccctccacgtgctgtgacctggaaatgacctccaggcagtatctcttaggaagcccagttgtgtggcatctgttgtacaatgcctgaaaatgattctttcatgtgttttgtctggttttcaacttgttcacagaaaaaagcaatttgcacagcagttaattcttcacagacagaagcagaagttctaccaactgcaaaacaaccaaaacaacttgttaaaagacagtatttgtatgactggtcataaattacgtatagaagaatagagattttgtgagaaagatatgggcctgtacagaggggtgaacttgcaaatgaccatcttgcttggggatagtgtctgttttcctgatcctaatcactgggaaggattctgtaatctctgtcaaataaattgcaaacactaccacacatggccttgggtctactactgtctatgacataaacagtttctccctagagacttagttgtgagggtacagggggaaggtagcttttggaggggcctggaagacccttccctttgtgccttcgattctgtatatatcttgtggtcagaagtcttaccattaccctctctgataactccccacccactttcccaatcactaaacactttttgaaaccattcaactctttcctttcaatgattgagcccttcattgtttcatcagctcctcttgtgtgaatctctctgaatgtgtgccaagtttgcagtttaatgcctgtcccatgtaggagcccaatatcacggtatataaagtttctacactggatatccatggactgaagaggggcctagcattcagggttccaagccagtgagtttagcttatccaagggtacctctagaatgtgctcagaaatttattccaagtcagagttgcatcccccaggactttaggctcagatggacaaccccatcatatttacagaatccctcaaagataatttaagtttaagattgtcagcccacctggggtgcacagtgttgaccagggtttcttaaccttagcactgttgacatttggggccagataattctttgttgttcagaccatcctgtgaattatagtatgtttagcagcatccttggcatctacctactagatgtgaatagcatccttctcttaattttgacaaccacagatgtctccagaattgccaaatgtcccctaaaggtgcaaaattgcatagttgagaactactggtaaagaggcactatggcatgccaagctctagggagcccacagaagtgcacctctgggaactaaagctgaagaaacccaagaggccccttggtatcttcttggaagaagttagtccagagtgtctgcaccatgtggagtgtatactgggatgacattgaccttggaatgtaaactcctgggattcttgcctctgcagatttggagcagggttttcttcttctctgcttttcagtttacttatttgaaaatgaggaatggtgtttacatcacaaaacactgtagtgaggacaaaatgaggttttatgtatatatacacccatacatatacatatacacttcttccaaatgatataataatatataaacattgaatgaataatggttcaaatataagtgtacttatttgccactatgattaaaagggcaatataggaaaaatacattttcttctaatccatcatgttgtaataatcctccctgtggttgcagtatggttctgtgctagaaggcacaataggaaatctctaactttaaaaaaaaagaaaagaaaaaatatctttctagcaattaaaatctcaactaaattagaatgcaaataggtttttatatttgcttcttaattttgcattcaataatctgactagaatatgcaataatttaaatgccttgatgggagatagtggcttttagttctcttgggatttcattgtaataaacctggtaaataattcaggaacatatgagaggccaatgaatggtcagcacctggtgctatattatttgtgcctaagcacacagactccaaagatggcactctccacctgtcactgttgttctggcttaaacatgggccctgtgttcagtggctattgagataatagtaatggatatttttgccttgtccaattttcctccacaatcaaagaaaactgtgctaagctgtttaaaaaatacaaagcagaagtggcagcctcttttagattaccactggtaaaatttcaaatctattttctctattaagggattgattgttttaaagaattagggatatggctatcttttctactggtgctaatttgagcctttttgcctttctgtctttgttccacaaggctgagcttctctttagatcacattattcatattgcaaggatcttctgagagaaataacaccatcctctggccagccactcactctgcaggagttcctagagctccccagtttctttccctattgcctgagtagtctatctcacgcctgttagtctcacagtttaaatacaaacacacaaagactcttgcaggcagcttgggtacctttctttgaccccagccgactggacatagagaacaagagctagagagaacaagagctagagtgaccgacagatcatgtgtggagacagcatggggcacctgagcccagcaccatccaggatcagacagaacttaagccatgagctgcctagaaagatcttgggagggcactgggtttcccagtatggaaaaaagaaaaatgtggctcacaagtctaagctaaggtctttacagtactgggccataaacaggatctgaaaagaaactgcagaaaatgttagatatgctttatctttgttttaaaaatattatttactataatggcttaaaatatgttgatttaaatatatgatatttgatacctttgtaatatatataataaagtgtataataaaatataactatataattaaaatagatgatattttaaaacctctctaataaaccatttacgtgtgtgtgtgtgtgtgtgtgtgtgtgtgtgtgtgtgtgtgtgtgtatacatgcctttgtttaacaggtttaattgctttcctttcttcaggaaccagagtgagggtactcgaacagtgactgccatctggtggttaaccagaatcatcaccttgtgtagcctgatggttactaagatgtccactcttgactcacatggcatgcactcgcagcaggggaccagttgaaggatgtctgactttggagggtcaccagttgaaggatgtctgatgaaggagcctagcgaaataaccctttgcttctacctgaatgggttgttcactctggattctgagcctgcagccagctccaaaatggggcctctgaagaaaagatttgagttgctcttgtgtcttagtcaaagatctacatccctaccagtgggtaaccaagactgtgaataagcacacaccaacaggggcatgtggtgacatggagcctgaaataaactgctctgaattgtgtgacagttttcctggccaggagctggatcggagaccccttcatgatctctgcaagacaacaattgtaagtgagcagccacaggatgccagggctgctcagatgtatgtggtggtggtggtgttggggaggaggaggtggagggaaagggggatgaggaaggggaggagtgggaggagaaactgctcatgcaggatacatatttcccagcacttggtgacgatggggcagtttgtttttgacctatagaagatccttcattcctaacagctcctccttattctgtcctcagacatcttcccaccacagcagtaagaccatctcttcattatctcctgtcctcttgggtattgtttggacttttctcagctgtggacttctgctgatacttttctttcttgcctttacaattcactgcaggaagaacaggtaagcagcccagtttctcatcacacatagctcaatcatgaaatcccaaatgttagtatcttttggcagcacaagccactatctggtctcccactacaggattaaaccacatgagacattccctctgaaatagtctacctgttgagaaggggaaagatctaggtcggtattgtgctaactactgcaagggtatccaaagaagagaatgaagagtctctctctataatggaggtacaatccttctgagaagatgaggtatctgtatttaaaatgaagaccatgtagaggattccaaaacaacacaaaaacttgaggacagcacagcagaaccagtctgggtgagttagggtttctgcaaaagcagtgaagcactgctacctggctatttgctagataattctggctgactagaaagtcatcagcttatcagggtaagtatggctcccaggattcgcaaaagaagcaaaatggtgacttttttctgaagggacttatagcaccttgccttggatgcaatttcatccttcctcagggcccatcccatctctcccacccccacactgtaccctcatcctaccacagccgtcccagggtgcctcatgagaagccctgctccagccctctccttagcccacagctg

SEQ ID NO: 9493 - DNA, 6000 bp, Homo sapiens
ggtgtgtctggagtcagacactacattgaagtgtgttgacaggtaggatgcagggaagtgagaagggtgaatgtgagttactagttggaggctggagtgcttttatgtcacccaaagatgtatgggtcagagaggcattcccaggtgtggaatggactgtgagagctgggacaggcactggagtgggatatggctttttctcagatgagaggttcttggacatgtttaaacactggttgggggcagggtaggagagacagaaaggtgggtggggtgagtaggcagcctctattatggccctgatggcccttgccttctggtattcacacccttgtgtgatctcctcccaacagcataggacagatgtggttggatgttactttggagattcagttacaaaaagactgcagctttgctcactctgagagaaggcagcatccatgtcttgaggacactcaggcagcctgggacaggcttggggagtgaggagctgggaccccagccaacagtcatgctggacttgctccaggacacatcaccttggggtttgctcttcccaggtcagtaggcatccagcgctggggcagctgcttcaggacatcgccgaggacaagtctcctccccattctggttccaccatctgtagcctgtggctttcatcctcaagggctccatgcgaccgctgcacatccaggtactacatctgacccatgtattgagccagctcagctgtgatcaagcgcagcctttttcctccgtaagaactgcccattggcgtagttgtgaactgaggcagaggagctgctgtggcagtggtaggtgatgtggatgtacaacggattgcttacagtctcagtggattgctgctaggcccacccacctgaatttacatattagagggcctgacagaacccagttcatgaggggcagctctggcctcatggtcacttgatgtcccctagtcatctctaccagggtccagtagcctggcagagctgctttgtgaatggtgtctagttctctactatagatgacctggtcttgctccagaaccctagggggtctactttgtggtttttcccaccagagcttgctgtaagcttcacacagcatatcttcccaccatgtatgcctctagtatcatggggtctgtgggtcccatagcctgagggacagcctttgatgtcatgtgacccagagatatgtgggtcagagcagcactcccaggtgtggaatctgctacctccagaacccaaagaggcctctaagcattgtgcttgctcttctgtgatggagtgtgcagggggatgttctggtgtgccccacaccaccagacccctacaaacctcactgatgtggcaagcccctaattcttcatagggtttaatcttctgcccgctggagcacatatgtctcatcaagttttccatgtacttgtcacctcctgctcatccatcctgattagcacattgtcattgacaccatgaaccagtgcagtgttctgcaagacgttcagatggcccagtctccttcagactgtgatgacaaaggatgggaaaggtatcattggcctggggcaagaccatatgtgtgtattgttggccgttcctatgagtgcaaatggtccctgatagggatgaaaaagtgtggtgatcagatggcccctgagaagcgggggccgtgctgatctgtctgtgctagcaatgcacctgcacagcacctgtggtcagggctaccacttggctgaatctgcaatagtccattgccactctgtttatttttataaggtcagactgatgaattaaataggtacatggtgggggataccctccacacgtctttggtcttcaagggtggcaccagtctccgccattttctctggtgtgtgatgttgtttatgtgcttgctctcttggccggggtgggtggtggtgatagtggggtctcagaggctttcacttgacttttactaccatcactctcaccccatagaccaaggaaccagtgcaggcattttgtttactacacaggatgtctatcccagtgatatattgagcttgatcttgatggtcctatgacagttgcacccactttgcttctcacgcctaagcactaccatctggcgtctgttatctggggattgctgtcatccccatggctatcagggagcccagttctgtagcagcatctcctactgtcagccgtggccacccctgagcctgctgtagggtgatgaagaacctgagagtcagatctgtttattaagctactattcatttaatgttgcagatgccacgctctgtcctgtgtgtagtggatactgcagtgaattagccactgcctcagctctcaaaggcagatacctttggttatttcacaaatacaacaaaatcccacagaaacttagatatggggttcaaaactcaagagaagaaaatgcagaattctccaagtctcaaaaggcagaaaaataaaaatagagggtttaagattcttcctggggcctgaaagcttaagatgaataactcctcccttctcaggcccagttccaaggtgcaaggctacttgtgccagcaagatagcagaagcaggacaagagctggctggaagacacctaccgtggtgggaagacatgtacccgtgaagatcgagaaagagtccatccgggtacaacgtagcagttacgtcagactaggacacttcctgtttacaggagactataaaacctttgccgcgtcctcacttggggctgatgccattttaggcctcagcccacctgcacccaggcgctcattaaaacagcatgttgcggccgggcgcggtggctcacgcctgtaatcccagcactttgggaggccgaggcgggtggatcatgaggtcaggagatcgagaccatcctggctaacaaggtgaaaccccgtctctactaaaaatacaaaaaattagccgggcgcggtggcgggcgcctgtagtcccagctactcgggaggctgaggcaggagaatggcgtgaacccgggaagcggagcttgcagtgagccgagattgcgccactgcagtccgcagtccgacctgggcgacagagcgagactccgtctcaaaaaaaaaaaaaaaaaaaaaaaaaaaaacagcatgttgctccacaccgcctcgtgttgtgtgtcggcgcgctcgcagggttcgaaccgatacaagaaccttacagagggtagttattaggcctggtcacacatgtcccatgacttctacttcctggcacatggtagggtggcagtttcctgccctctggaggctagaagcggtggccaattgaatgtgcgtgagagtgatgtgtataactttctgggaggaacttgaggagccactggattccccacggctcattgtggctgtggtcattcgtgattacgcaggccggcattgcccagcctctctggcgaatatagaagcctaaacttaggtatgcacatttgggtgtggtccaggctgggaaagtcccagaggatcacaaggtggtttcttccccaatctccctgtgtttttaggacaggagcaaggagaagaatgggacccaatctcattccagcccagcggtgctgtcgcaaggtgtgagtcttggggtgcctgtaataactgagtgcctacaatctgcacgaggctctgagtcagcctcaggatgctgcaggggacatcctgcagcttggctctcttggctccatcctcatgacgctggaattctataatagggtggggagactggacggggaggcaggtaaatgaaaacaatcaggtgagaattaagatgctcggaaggaaatgagactggacagccgctccagcgagggtgtccacaaaaccctctagaggacatgatgtggcaaggagccagctctgcgggggaacaggtgtagagccaggagcaggaacaagcttggaacagccgagggacagaaacagagacccgcatggcttgagtatggtgaatgcagcatcgatgccaggggataagacaggcgcaatcagggagggctttccagaggaacaggcgtgaagaactgtggaagttagagttggggagaggcgtcctggctgtgtcgcttcctcattgcgcggctttggtcaagttatttgacctctccaagcctcaggtggccctgtaaaaggtgactataatgactgcctagcagggttgctaagaggagtgcccgaggcatggcggcgccgcgtggagcagggcgctgggaggcggcggccctgcggcgtggcgcggctggagcgcgtggcgccggggagggtccccgacacgccttcccccaagctgaccccaggtcacccctgcagggcgcccgaagcgcccgcacgcgagggggcggtccccggaggctccgccccgacggtccggccgcggcccaggccgggaggtggagcgcggctgccgccagctggtccactgacaactgctgccagctggaaggcgcgtagggcgagaggtggcgcgtcctcagctttccagtcttcgattccgcccgctttccgagtgagaaacgcaggcctctctcttccgtgaagcagcgtcttgtctctgcacctcctctgtgctgtctctttaagaggtcagcgggctgctccgcctcttgggaatttgattggtctctcccacttttttttttttttcccccagtgatgacttattcctataggctgctggaggttagagggcgggcctgagtgataacagggactctgggactctgggacttgtgggactgtggccgttttcgcaatttgggctggacgaaaaagacggtcttgctttcccggtcgccgctgtcgggaagggctgcagggtgtccgcgagacccgcggcccggcgagctgaccccgcctcgcctttcctgcctagccctcattccacggagccggtcgcgcccggtccttgcgcgacgcttcccggcccaggccgcctggtctggcgctggaggccggagtcccgcggcctgtgctggatccgcgcacacccagtggcggcggatgggcggccggggcggccggggcggccggtcctgagcgcggcccgggctgtcaggtaaggaggggccttctccccgtctcctgccgcagctagagggggagccccgtccctcgccccggcgggaagcccagccgccgttcccctccttgctccgcgagcggcccatttccgctcgggcgcagctcggacggccaaggcggcgtttgggagggaaggccctggatgtgggaacccacgggaggggtgccgggcagtcgggagtcgctcggggcgcgggggcacgcgaggcccgggagggagccgcacgtagcggcgtcgggctcggccccggctggaggcagtgcgggtggagatccggacctcggcgacccggtccggcgcggggtggcggcacgggctccagccccacggtggctgcccgcagcggccgaggtgctcctgagccaagcctgccgccggttcggggctttgctgccccgtgagggggccatgtcgaagcctccgctccctctggactcggggaatgcaggtgggggctggctttgccctcttctctgcagtgaggaggggccgcagggtcgtccagtccccagcggggcttggcggtgctggagattcagttgttcccgtcataacaacctgttgagggctcgtgtcgtgccaggccttgttctaggggaccgagtcctgagcactcccgggatagagagtagtaaatacccagacgcggctcgggcgctggagacagctgagaagggaaggcttctcagaggaggtgtcaggagagagctgggggagagccagcccaaaggccctgaggaacggaccagctcagcaggtggaaggcaagcagggagggcaaggtgcaggtcagattgggcccaggcctccccatcttactggggtctccggcttaggacagggaccacacgcctgccagccccaaggccgaaggacaacaggggagagc

SEQ ID NO: 9494 - DNA, 6000 bp, Homo sapiens; identical to SEQ ID NO: 2273

SEQ ID NO: 9495 - DNA, 6000 bp, Homo sapiens
agttcatatctggctaacagtatgaaagtagttaggtaaaaaataagaaaaatggtcttattttaaataagaaaaccagcatttccatcaaggccattcaaaataagagctccttaagtgtttgcaaagtacattcagaatgttctggttaatgacagataaagctctgagaaacatttaaaacctaaatgaaaaagaataaaataaaaatctatctaagctatatcaaataaaaactttgtcagccaataaggcaaattcacctttctatctgaccaagctgcctctctcctcagacttcctttcccaggactaaaacctcagtctcctctgctccctctctaccccaccctgcagtgatcttacttctgcagtggttctcagctattcctcccttcccatgtaatttcagatccttattgcttctcacttaaaatgactgcaatctttccttaactggcttctcaccttccactttctctcctaaccaagcaaactccaatgttggtagattcacctaatactgcccaattgacagctccttgccttgtataaccatgagctctccaatgcttactttattaaaatcccagggagcatccaagatttggtctcaatcttttcctcacagagacacccaagcccccaaattgcctgacagtcccccccaaaatttctcatactccaattatctgtgtcatcccccaagcatgccaccttgtagctcattctgaagaagctcctattcaccccaccacagtctggagcattacaatacccggattcccacaggttctaacagcacatagcaggtgataagattccttttcattcctgtacaaagcataaaatattctccaggataagagctcaggaggcagcctgtaattgataaatatttgctgttataatttttcataaatacttgatcaagaaatattcacatggctgggtgcagtgttgtgcccctgtagtcctagttactcaggaggctgatgcaacaggattgcttgagccaaggagtctgggactgcagcaagctatgattagacctctgaataaccactgcactccagcctggacaacgtaagacgaccctgtcttaaaaaaaaaaaaaaaaatcacatggctaggaaaagggagatgttctccaaagaacattctcctggaaagtaactaaaaagttttaaaaatgtgttctgtgctttgaaaatgtgttagtcatggccgggcacggtggctcacatctgtaatcccagcactgtgggaggccgaggcaggtggatcacgaggtcaggagatcgaaaccatcctggctaacacggtgaaaccccatctctactaaaaatacaaaaatttagctgggcgtggtggtgggtgcctgtagtcccagctactcgggaggctgaggcaggagaacggcgtgaacctgggagacggatcttgcagtgagctgagattgcaccactgcactccagcctgggtgacagagcaagactctgtctcaaaaaaaaaaaaaaaaaaaagataatgtgttagtcataagttcataagaaatggaccataaacaaacaaatgggggaaaaaaagcatgaaattcagtgactaaaaagaaacgagataatctttaaaagttctttattataaatttcccctccataaattatcttttaaccatggaccaaatagcagtcacacctcacaaccaaaaggtaaaatgaaatgttgacgcaataacatcaacaaaaaggcagacaaccaaaaggactgtcaaggggaaatgacagggtaatgtacccagccattcttttaactgagttcacattccaagaatgtgaaaaaaacaaatttgccttcaaatcatttccaaacatgtattctccatttcagtaaagaaaaaaaaacaaggcagaatttaaataatacagaaacagtaacatggaaaccatacgtctacatttcactttaaaactacactgcttaatcacatcagtcactctcagatttaaagctaccaatctcagagcacagaaaaaaatctttgggctaacgcaggtgggaaagaatattatgtgcaaaaaaaaaaaaaaaaaaaaattattttctttcaaaacataaccctgaagcacaacggctatagagagagggctgaactggagttgcacaggctgtggcagaagtgactgatcataaaaatcttccatttgtaaattattttgatgtaagagcgtcccaaattcacattccagaggctgaaaactccatgaggaaggcaagaacagtggtacactgttctaccacccaatggcatgcaaattcaaatggttacaaatactaaatgggaagggggaccggattgacctgatggcctccattgtaatcactgtccccagcaatttcattgtaagaagcataactaagagctgggacgctagggtctaactgtgcaggcttgagtgggccttaatttctctgcaccacagtttccccatctgtaagaggcagaatctcctgtatctcatggcttgttttaacaaaaacaagtcctcagacctgtgcccggctgtggcagtgaccaccgaccccaacatttgctttccccttcctcattagttccaaatggcttccatgctatgccgaaaaagcacattttaaaaacgctaaatattcaaagcaagtatttctactgaaataccgttgtttggtatttgtgttcaataaaatcaaaagcacgttttgtatggataggagagttgaccacagaaaatattttctttctcaattcataacttggtggacaatttagctttaatttttattttacacatacaaaatatccatgaaatattcataagtaatgaatagattatttctttaacaaaaagtactgccatgaccaaggtaagggaaaaataacttcacctcacttcttcccgcttgggtgtgtattagtgatgacatgcaacttcccggaacactaagtacagtcacaaacacttgtcctcagtgaaacagatagaaaaaagtggcttatagaaaatcaaatgaaactagtattaaaaaatgaaaactacatgtatttccactgtgaataaacttccacacaaagccaggttgcctaagctcattctcagaaggaggaatatgattcatctattaaaagattaattctcactattctaaaaattaaatagaactctgagaacaagggcacttcagtgctttcacatttggcaatccagacacagaaactgtggtctgggtagatttttaagtacaattgtttgtacttttcaattgtgtctacaaccttaaagtgaaccgaggaagtaaacatataaagagacctaactaaaaaaagcaaaacagaaactgtcaaaaatctttcatcccagtttttctccatgccatggtaaaatcattcaccactgtttgcagtcaactccactcatctctaaattctctccctttcatctcctctaccctccagtggatgtaaaccctgatcacttctcacttacttgtctgcaaatatatcttttctacaagtatgttcttcagtgagtcctgtacaatgttgaagcatacatatcttaaaagaaagatcctttcctagcactatgatgatgaagttcacagtggttcttaacataaaatgtttgagaaacatttgctttttccctcctagtttataatttatggtcttcactggcaaaaataataattatatgaatttgggagaatgtcagaatacctgagacgtgaccaatatcatcataagcatctttacatttttttcaaaagtctccttagactttccctaaattctccctagctagatacttctcatttcatcttttgagacatttttctttttaaaaactaataccaagagattaattttagatcctggaaaggtatcttcttttttcttatccagaaaactgaccaagtattattaaaagaaaccaaagcacctaccaagccaatgaagcattagaagaaaccagaccctaaataaccaggcaatggctttgcattaacacatcaactttgaaccagaaaattcagaactcttgaaaatatgtttgttaggtcccccagcatgctaggcttctttcaaacattcagttagttctgccacagacacaatgaacatttaaccaaacaacttaaatacacactgtagggttcctttacacacaatctattaattactaaatactattccaattcatcaggctgtttgagtcaaacagacaaatacttattacaagtctaatctcataaattgaatatataatatattcttcaatgaaaaattataaactataaaatagtatgaataacatctaagtggaaatacataagcatagaaaaaatttaaaacttatgtaccaaaaatattaacagtaattatctctctgcataatgatgttccttttttatttctatttccagatttttctataatgaacataaaataagataaataaaatgtatacattagctgactctgtaaaacacatctttttgtttacttctttttttaataataggtgtctcagcaggaataaaaactgcaactattttttaaattttaactttgaaatgctgtgttactatatatactgaaaaaatatttgcttaaacaccttatatctttaattattaatccccatcaaggcatgaagagtgatattctttgaaatcattatgacacaaaacataccttggatactttaaaaaaaaaaaaaggctaggtactaaatgaagatcttttctctaaaaaatatgacaaataaattgcttaagaaagcatacatgaaattgtatacattaaaaaaacttctttaggagactttcataaagttaaactacttgcaaaccacagtttcatctacgtcaatatgcaacattttaaaaccacacaaaaaggaaaggaaatttttagtaaagccagcagcctgcaatggggttgctactgctgcggctaaccaaacagctcatgcttctctgaagacttgcagcaaggcttgctgaggctcacagaagatagccccaggtatgtctttttaaacacttaatatattcaaatgcttttccgtggaaaacaaaattgtgatttttcagtatttaaggcttataagtagaaaaagccaagctgtataaaaaaaaagcatcaatttttaaactctaaataggtcctagctgtgaatgacactataattttcttatatctgatgaacccattcatctgtctccaaaagacaggataattgacaccagactgaatacctgagcgagcataactattcagtaactcaatcttataactgggtggatagaggccatgttgtagatcttcacaacagggaacaacaggccttaagatgactttcctctacaaacattacaataggtgatttcaagaagattccactgtgattcccatagaaaatctaataagcttttattttgtttttgttttgttttgtttttgaggagtctcgctttttcacccaggctggagtgcagtggtgcgatctcagctcacttcaacctccacatcccgggttcaaacaattctcctgcctcagcctcccgagtagctgggattacaggtgcccgccaccgcgttggctaatttttgtatttttagtagagacaggatttcaccatgttggccaggctggtctcgaactcttgacctcaagtgatccacccgcctcagcctcccaaagtgctgggattacaggcgtgagccactgtgcccagccagtttatttattttctaagcaatgggcactctatccaaactacagagacagttaaaatcttgtattgttgttgctgcactacttctgagtatctcacattttcactggtaagtaactgtctggtaaaatatttattaagcacttagttctcaaacttgtgacacagaacacaggatgttattatacaatattttaacctctaatttacataagcaaaaat

SEQ ID NO: 9496 - DNA, 6000 bp, Homo sapiens
aattctgattctttgctaacatcagtcgagattcagtccttctgattttcaagatttaaacccaatctaatgctagcaatacagaaaatctgtttgcacacttcaactaattgggattagacaatcaaccatgactcaacgttagtatccacaccaaagtgaggttttgtgaactgcctacaatacatgtacaaattgcacctattaatttttttaaaaactgttacttctttcaatctaccagaagggggtgatattgtaccaggcatttgtttctccattgtaattctcagatgaaggcaagtgcacaattgccaatgaagtcccatgtcctgtcattcattgcaagaggtttaacaaaaaggcattattttataatgtggtgacttatctcacatcttaatgatgtaatttctgccccctttctccactactctaaatcaacaagctggtagaactgaatgcttcacatagggaaacataaaaaggcatgtctgcattcaatgttttcctatcagattacaattttttcaaaacactttttcaattattttactacaaagctcaaaaactttacagcacactaaattaggaagtcctgagcgtgacattttggatccccgacattacgcgctcctccacctttgctggctttcctaacattaaaccttggctcacatcattcttttaatacagtactaagttgactttcacccccattctacaagtaaaagagccatccaacaagaagcattttggatgctagttccttcagagatcctatagaggacaatttccaaatatgcttcctttaaatatccttgtacactgtactttcataaaatgtttacaccgggcctttactaaaatcctctacattcttacgtcaacatctttctcaacaaccagtggaatcctttcggcagccatgccccccaacacatacaaaacacacacacacaattataaataacttgccagcaaaacaaacaaacaaacaaaaaaaaacaaaaaaaaactaaattatataacccagcaaatatctgctatggttaaaataaattcattgaaaatgttcatatttatctgaaaatccatcaataggtactgattaaacaaattatggaatactacaaagctacgaaaaagaataaggtctatacagggctcacatgaacaagtctccaagagagcaagtggggatgaggccggatgcgctagtgtcttactcactatgctcaataaagcaaccagggaaaggcaggggaagggcagtaacaatgaagttgtctctgtacttactttaaagaaaaatgatttcaaaagacatatggtaacaattatgcataggtgaattccggggtaaggagcaaaataggacatttatggaatcaaaatgtaagccagccagctatttatgcgcagtcgatgacggcctggatagaaactgactggaaacagttacagacatatttggggattacgtgtgttaaactcattctatttgtagtatgaatacacaagggatgtttatatataaccagtcctattactaataaggcagagtcctgtctctaaatggtattggagaatgtgtgagcacgtggggtgggctaggggtggttgtcatatcagggttatgttgagggctctgagaaaaagattagtcaggaggaaatcacagtactttaatcttaggattccaccaaaggaaatgggaattcagaactatttagcataaatcaaaacaccacagataaaaggaaaatattgactattttagattttgttttttaaaagattcttgcacacaaggaccaggccctctattattttaattataatgtcgttattggctatgttgtattatgcctggtgtctagtgttgaaaagagtcattacctacgttgctaaaagtcataataaaatatctttttattttttatttatttattttgagacagagtctcactctgttgcccaggctgaagtacagtggcgcaatctcagctcactgcaacttccacctcccgggttcgagtgattctcctgcctcagcctcctgagcagctgggatcacaggcgaactccaccatgcccagctaactttttttttttttttttttttttttttgtatttttggtagagatagggtttcaccatgtcggtcaggctggtctggagctcctgaccttgtgacctgcctgcctcggcctcccaaactgctgagattacatgcgtgagccaccgtgcctagtttaaaatatctaatttcaaaaacatatgaagatagaataaatattgtcaggctaaaatattttttcaaacattaatacttacttccaattctaataaaggaaaatgtgtacaagctaaactgtgatttaagcatatccacaaaatgtacagcacaacctaaagactacttcaaagtccagtcctgctactttctagcttagacaactgttaaattttctgaggctctattttcttacttgtgaaaaaaaggaatagttacttctccaagggttgccaggtgttttggctgtgaaaagatctagtaggcacagagtacgcttcaatcgagtgtacgagtatgtgcatttgagacgatccaatctttccagatgagctttcctttcaagtgcctagctgtctgccccctacccacccctcaccatccttgtactgctacgtgccaataaaaccacagaacagaggtcacaagctgactgctcacaagcccaatacagtgcacactcaggttttgttttagcccacagggtatcaggtctacactggtttgtaaggtattcgatttagacaccaacaaatgaaatcagaggagacatataaaggcagtagcagtgcacaggctccaggatctgcccagctccagcaacctgatgtaacatctccatgcctcagtttccttgtctattaagaaaaaggtggggaagaagtagtagacagacctactttactcatggagccattgtgagtaatcaagctaaaacacacagagtgtttagaacagtacatgcaaatcagcgtttaatgttctgaagacactggcccatcccaagatgaggcccatgactctggcaagcttccagacacaactgtccccctgggtgggccctttagctttccatttctccatactccctctactcccaagtgtcttacacagagtccaacccatttgtaccacctgccacgaggggaccacctgtagggctatccttttggccttggactttgcaactcctggcattaagaggcaagcaagcagctccagtcaaagaaattatcatgttctccccagtcatactcaataacatctatgtgaaacaccccacggggaagtcaagaagcaacaaattatcatgttctccccagtcatactcaataacatctatgtgaaacaccccacggggaagtcaagaagcacaaaagggacccggaacaattaatgggtgtttttgagactgtcagagtaaacagcatctcctgcaataaatcagggaagtcttgagagtcgcaccttagagatacggttcctgccaaatcatcaatttaatcagcaaaatgtttacatctggaggactctgcaatgtgccctggtaataaccaggctctagcggctcctcctcacatccacttgtccttaagtttatttacctaccagatctcactgcagctgaagctaacaagcctctctatgcacatcagtattcttagcccctcaatcaaagcatcagtgaggactattggggcccgctgggggtctgaagaagagtccctctggcagggagaaatggcgaacttctctaaacaagctctgtgtctcacaggtctttgccaaggatcaacagtgactagcaagtctgtgagacagaaagtaagaaaatactcttcatgagggaaataactgtttgggtatgtgtcagtcactactccatctccaatgtccagaacactgcctcctacgtagcaagtacatataaagcaactagaatagtaacgggcatgtcataagccagttataattattataactaaatgtatagctatgtttttaaggcaagctgaactttactagttgttacccataatttggcaatggaacagcctaagtaaatacacttaaaatgcaggaaccttataaagtaagcttttcagccccttgtcttctttctttctggttctgagttatacactttgaagaggactttgtagccatcttctgaaaacttccaaatctaatggcactaatagtcaatgggaaagacagtggagcactgcaggacatcaccaattatattacagagcctgaaaggaactaaaaatatgaagactttcaaaatagtaacacagcacaaacaccaaaatgttaacacacgaggagtttatctgaagtcctacttgtgatctatttatcagtaatgttcaaatatgggaaaattaatgtgggaaaaatgacaatgcaacacctcttatctagaatatgtcgacattggtgtcaaaatacttctttattctgttaattccgcatttccaggtagctccaactacccatctctgcacgttatactgtgaagctgctgacaattttctgagggtgcttcagaaagaaccatatcttacacatcagttctccacctcataccacatgttgaatttgacaatggcaaaggttagaaaagaaaacaggtttttgcctggctgtgcatcagatgatgtagggatgtggggaaaagtaggaggagaaataagaaagcaggactgtttttgcattactggaggaaaggaactagctcagaagtcagcctaacacccacagagattaaaacgtctcttccttcctctttgtttccacgtcccagtcttcaataaattctatctgacaacagcagcagagggacccactatcttgtggtttctgtcaagttcctgattttcatccgtagttgaagatgagcaagaactctgtaacagtgttaccttggagcctacaatgagaggtatttcaaaatgagtgaagcatgactctcacagatgaaggcctagacgcaggtaagaaaacagcttttccatgaaatgacttgcatgtatgtgaatggtgcatgggaacagaaaagatttctgagctgggcagcaacaaagctgaggaacactgaaccattgccactcacatttttctcagtaggttactttttgtttgacaactataattggtatattaatatatttccccatgctaatatggggatccaatactgaaatattatcatttatgatttaggatttccaatcgtggctgtcaaaatatatctgtgatgaagagatatcaaggaaaatgtttaaaaggtattcatccaggacaaacatttcaaaagctcgtaaatgtgtattaaaattgcttctcaaaactacaaaatcgattagcataatacttaggtcagtatgtctttgtttgcaattgcatatgtgtacagatatatagttgcatttacttgtacatacacttatataggtaaaagtttttatctttgtcattattaggataagttaaccccattaacacctactaaaataaaatgcctttaaattgtaaatcacagaaatatctgtcctaggcatagcaaatatttgagttcatatgctacttatttatagtctatgactaatcagctaaattacttacaattctttaaacattataaattaaattacattcaggagaattagcacagacccacaatgtcagcttattcaaccaagcccatgcaatccatcttgtctacatatactttgttaaccaaggacaatcaatcctacggagaaaatgaatcaaagatcacactagtaaaaaaataaatagtttgtatattcatctttctaaaacatacaaacttgataatcagttttagcactaaaaaaaaacctagccattaagttaaaaagaaaacaatgcactcggaaaataccaaaat

SEQ ID NO: 9497 - DNA, 6000 bp, Homo sapiens
aaggaaattaaatttaagacttaaggaagtaaactagttctttaaaaattacataacttactcagcatgtgaacttttgccactcttgtaatacaactcaaactgacaaatataacatcctgaggcataataacagaatgtccacctttatttttgaacttcagtttaaacgttaaatgtgtgtatatgactttacttactggtgttgatcttaattgtatctaatgtatttctgaaggctttcatagctttgggttttttaaaaaaaatattagctttatgtattgactttatatcatatatacacataatgtcactggtctttaagtctttttttattctatttaactgtacaactgagtttcctaagtccaaaaatgcccaaactgtgaatgaatgaagctttatcctgaacacagtaaccctactgagacgacctcccttctctccccatatattctaacctcagcttttatagattcccacaatttcagatagtctggaataaagaagtccaaacttccttctttacaggagaaaaaaactgtcaaaaaagattataaaaagcatttcaagcaatcatcagtttgtcactaataggaaaccagaagctttctaaaagcaaccaaaattatggatgtaccttaacttctaagctgaggcatatcattccaactccaccatgcatcagacaccccattcattcgcttgctctcccttcaccttctgacaaaagacaaagtgctcctgtacccttaaatgccaaccaagttccaaacactgtggaactacactgtatatatttatcctgaatagattacctcatttaagctttacaaccctacatggcaggcattgccatgctcattttcagaagaagatatgctttgcccaaagtaaaaaaagctgctaagtggagatgttccaaattggagtttacctgaccccaatcactagtcttgtcacagccggacactgcctctcgcacaagcaagatttacaaagcaaggagatagattaagttgcccagcataggaaggagtatcagtaaaaggacaacagtcagagatgcagccttatctccagactcaatctccaaaccatcccccttccctttaatcaaatgaagttctcataccagaaaaaggtgtttcgtgtaaagcagacctgatagatacaaataatttcaaatgacagattaaacacagtaattcaagcatagggacccaatgataccaatcttgtcaaaggactgactattaaagggcttataataattatactcagcacaagttctcagctactggatgtgagccacaattagaaagacttgtgtacagagatggaacagtaagacttgggcaaaggttttactataatccttgttgcatgttccagccacatggaaaagaccaacacgggcattcaagagagatcaccttgagctatgttgcaattagatccctgcttgtctttgttttgtaataacaagttagtgtactataaaggactatgacgccctttatatgtgcattttccttaagaagaaacagatacatctgagattagtgatacagaaaaatgagattataacacaaatactatgcctaccaacactgggaggaaacactgtccccaggtccacaccaatgcagaaaagccaaagaaagaagggaggaaaaagtcatatgccatggagaaaccactagaaaccaaggtaagccttggtaatacatttgctcaatgtctcatatcaaaaacatgagaaaacagaataaagagttcatttcaggactgagaaaggcttatgagtaatcttacctattttaattccttcgaagatgtgacactttttctccttgagcgcccctgtctctttaagaatatattttgaaaaatcagtaagattacgggaatcctcatttgaatttctgtgactaaaccaaatatgtttggtttagtttgttgccagtttgttgtattttgagtaaagagttatgctatgcagattttgccatttttcatgatgattcataaataataaatgaggtactgctcataatctgacattttactgtcgtcagtaaatatgttggagtggggaagagtatatgtgaaaaacagtaacaatttataaatctagatgaaatctagttgaacaattctttcaatttgtttgtagtcttaatacctttaaaaataatgttagaaggaaaaaaatcaccctagtataaaaacaaaacaaaattttttaaagttttctggtggccgacacacacacacacacacacacacacacacacacacacgcacacacacacacacacctggatgttctgtatttaaaataaatttggggtttgtaatggctaaacaaaattaataaaagagtgccctgcatttaacaggattttccaatgaagtggaaaggaaattatcgctatgaagattcccggggcttttatgaaatgtgagacttgctataaaaaccagcaggaaaaaaattatgctggtttacctttcgattatgtgaacaataataaagctatgggctggctgttagctgctctttgcatcaaagtgttacacttttttcatgactaaacatgtattacttcccttttggaatgttaggtaagaccagctttcacaagtcccaacttgagactggcataatatactttaagactaacgcataaaggctgccttgcgttaacttttttgttactatactaaatttgcgctgccagccaacgaaacactgaaacactccaagccagctgttaggctaccgtcccgggcacgttgcttacagaggtattgggaaaggaaaaagtgcatcctatcccaagcccacttcaggagaaaaagggggccacctactgtagtgaagggacatcaccttatttcctacttaacaccatcacacataaagttaaagatgcttcattatacaggaaaatttcataggcccctcacaagcccttcttcgcacttagaagggcctatgataaccctttcacagtagggccctctcttttttttaaaaggtctttattcttataacagaagcctgtcaaatatctgtcagaataagctccctactaagattttatacacatcactggaaatttggggtgataatcctcagtacttgcagcaaagttctttgcacaacatacttttatgggggccataagagatgcttctccctttgactgatgcctttagtacttaacagttagttgttctggcagtaaaatgtcaaattatgagcagtacctcatttattatttatgaatcatcatgaaaaaatggcaaaaaggtcaacacaaggacaaatctcccaaactaaagtctgcatagcataacccttctgctcaaaatacaacaaactggtttcaaaaaaaaaaaaagaagaaaagaaaagaaactggcttcaaatgctaaatcaatggggaagtataaaatagcacagagagagtcaaaactaaatgaaggattgtttgtaaatctgcaaattcttaaaagattaggccattattaagttggctaattgttattcaaacaccttccccaggactagctacttttccgtaacatacttaatccacccaaagcagaatgtaaaaaaaaaaaaaattaaaattgtaggtgtctgtttttgtatggttaggaagcagataggaaaatacaaaaaatataattttgatacccaactcttgatttttaagttaaacacccatttgtttttctgtaaaaacataaggaaaatcaactagtacgtacacattatttccttaagacacaagtaaacactaagtaatacctattatagatttattcactccaaaaaagttttcacctttgattattttcatttatcttcatccacaataacaggttttgattccatttgatgaaattttatttttttaaatgtatttaaatgttgcattcaagaaaatatcagaatctttgagattctcatctgaaagcaagaaaattatttacaaatcagaaaaagtggccgggcgcagtggctcacacatgtaatcccagcactttgggaggctgaggcgggcggatcatgaggtcaggagttcaggaccagcctggccaacatagagaaaccccgtctctactaaaaatacaaaaaattagccgggtgtagtcgtgggcacctgtaatcctacctactcaggaggctgaggcaggagaatcacttgaatccgggaggtggaggttgcagcaagctgagatcatgccactgcataccagcccgggcaacagtgtgagactccgtctcacaaaaaaaaaaaaaaaaaaaaaaaaaaaaaagtgatatgattatataaatttgtcattgttggatgcttttttaaagcaataaaataaattgttttatgttaaaggtcagcattcaaaggagtcagtgaacccagcccctgaataatttaacatattttgaatacttatcattgtgtatgtgtaaaaatatgtctattgtgtatgtgtaaaaatatgtctacagatttcattagtttcataagactacaagtttccaaagttatcaattacaacaatactctttaaataatatgtagaataatattttcaaagaattcatctgtcataaagcatattcttatttcttttaatccaaaatttaattggcaggaaggctgcaaatacatgttttctagatagcaataggaggctggaaaaaaaaaatgacctaaaaattggatctgatgagttagtaggccccaacccgagacttcatcccccactccttaagcagacttctggcagtctaagctccagccctctgtgtttccttcaggtgaatcaccatctgattcctgcaggttcaggaaatactcttccccagtcgacaaatctcacctactcttagttatgagtcatttacattagcaagagagcaagttgttccagtagtcgcctggcaggagaatttgaaagggtgccccaaaggacaatctctaaaggggtaagggagatacctaccttgtctggtaggggagatgtttcgttttcatgctttaccagaaaatccacttccctgccgaccttagtttcaaagcttattcttaattagagacaagaaacctgtttcaacttgaagacaccgtatgaggtgaatggacagccagccaccacaatgaaaggtaaacgaaaaatttttcattttcttaaaagccgtggttgataagacacagcaatgattaaaaactgtaattatacttctgcttaactctgaggtttgaagaaaaactagaaattagaatgctgacagtaagatatgaggcaccactgtgagccatgaagcttcaactgtttccagctcaggcaggcagaaatataaactacatattgtgccttcaaaagtagaaacaatgttttggcaatcactcctatttagtacatttttttttaaaccacatttactttattagatgagtaaaagtcaaagtctcttataattgtttcccaggacccaaaacttaaaatttgtttcataatcgtttatccgtattgtttttttttaaagagagagacaaagatttttctctttcccaactgtctcattttgataaaataatctcagtcttttcattgtaccacaaagaacagggcaatcctcattctgatccctggagaagtcatgttaaaacatgtcaggaaaggcactgagaaaactgcccagtgactgacaaacaggttaggaacagcttactgttgttccacattcaaactgtttgggaagttttcactgcaatgaggaaaacaagaagcaagcatggagatctcagttcttttaaattttaataaggacttttaaaagatagatgagcctaaagtagagtgactttttgatttcttattttaagatttatctgctatggaattttacatcacattctcaagttgaatctgcttttattttaggtatattaacatttttaacaagagatt

SEQ ID NO: 9498 - DNA, 6000 bp, Homo sapiens
aaataaataaacaaataaaaattaaaaaagaagactgcttccccctggaccagtactttaaaaacaggtggaaaaaaaccttttacaaaaaaaaaaacacaactctctttttgtacctaggtgtttcaatcattttgcactgaagacatctgatcactgttcactgccaacactcaaggtgtgattacaatactgtcagtgggaactaaagatgtggaaatgcacttcataatcaataggtagtgagaaatcgccttttttttttaaatggggcaagagcatgaaaaggcaatttccaggagaaatagaaatggcaaaaaaaaaaagaaagaaagaaagaaaaaacacataacatcaccaataaggaaataaatttatatttatataacatggctttttcacttacagatttcaaattaatttaaaagattttttttcttttttttgagatagagtcttgttctgtcacccaggctggagtgcagtgacatgatgtcagctcactgcaacctccgcctcccgggtacaagcaattctctgcctcagcctcctgagtagctgggattacgggcacctgccaccatgcctggctaattttcttatttttagtagagacggggtttcaccatcttggccaggctggtcttgaactcctgacctcatgatccactcatcttggcctcctaaagtgctaggattacaggtgtgagccaccatgcctggccaagaatcccactcttaattgaacaataaattggtacaatctttctggaaaactatttgaaaatattatttaacattttgacaaataactttttcctagaaggactgaaccaataatccttcttctaggaaacttcctacaaacatgctagaaaaaatgctcaaaaatatatggacacatacatgctctatagcattgtttttaatagagaaaaactattatcgtaaactaactacatgcccatcagtcgcagcttaactatggtaaatttatgtagcataactgattttaaatttgattggcatgttgttagagaaatgcagatcaaaaccacaatgagacatcatctcacaccagttaaaatggctattacttaaaagtcaaaaaataacagatactggtgaggttgtggagagaagggaacacttacacactactggtgggaaagtaaattagttcagccactgtggaaagcagtttggcttttctcaaaggacttaaaacagaattaccgttcaacccagcaatcccatgactgggtatatacataaaggaataggcgttattctatcatagagacacatgcatgtgtgtgttcatcacagcactattcacaaaagcaaagacacagaagcaacctaaattcttatcattggtatactggataaagaaaatgtggtacatatacaccatgagatactatgcagccacacaaaagaaagagatcgtgtcctttgcaacaacatggatgaagctggaggccattattctaagcaaactaacacaggaacaggaaaccaaacaccagatgttgtcacttgttagtgggagctaaacattgaattcatatggacacaaagaaggaaacaacaaacaccagggcctacattgagggtagtgggtgggaggagggtaaggactgaaaaactacctatccggtaccatgcttatcacctgggtgacaaaataatctgtacaccaaacccctacaaaacacaatttacctatgtaacaaacctgcacatgtacccctgaacctaaaataaagttaaaaaaaaaatcacgtcagtctacatgtactaacatggaatgaaacaaaaatccaatacataaataaatgtaaatatatttgtacacatatattggtatgtatatgtattaactttcactttctactatatatgtttgtatttcaatttttaaacatagtgtgaaatattaaatgttccaaatagcagtgaatttattgcctatctctagctacatgtagatattttctactattgttcttactcagaaaaacagattgttacattaataaaaagtataacttatttcagcttattattaccacttttagtttaccacttttagttactcttgtatggaatttttaaaacaatttcacataatctgagaaagtaccatggtatactttgatgggaagtaaaagtcttttctaagagtatagaagtataggagttcctacttcaattttcatcccaaatgaaagcaaatacttcctcatcttttcacatattatttatatggtactgggccttggactgtcaattttgatgcaactgagaaatcccaaataagactacaaatggaaatagtagtttattcctatctggctagagactgatttctgtgacttttcattttatcttctttgtatcccttctgatcacactgctttcactcaatttacattggcataaagtttcacaagtccattaaacattgtggctgattgtttccttctcacacatcaggaactttcagctcaagaactccagaatttggcaaacaattccactgtcaccctatctatggcttaatcggaggcaagagagtgaggcaggttccaagcatgggctctggaaccagaccaactgtgtgactttacggcagatttgggttgcatgatatggggaaaatggcttaacttctgcatttccttttttctcaactctaaaaatgggaccaatctctggggattgttaaggattaaataagataatataatcacttaaaacagtatagctagtgtgactttactgatttttaactacatttccttagagccctataggatcttaaatgtttagtttattcccatttgataggctcctagcctctgggatctttcactgtatcttctttgattcttctctcctttcgtgagacatcaccatatgtatgcacaacattccaattttctttcaatttcatttaacaagaaacctacatgatacctaccacatgacagacattattctaagcactggtgaatgttcactcattttattcttttaacaacactgtaaagcaaatactattatttatttttattgtaaagataaggcaaccatttcatagtgggcataagcagcttgcctaaggtcataagaaaagaaagaattggaaaaaggaattgagcccaggcactctggcgcctaaacattctgctgagcagcttctcagctgtgtcttcaagggcaaaaggcctccccagcaggcaatagtgctgctgtaaactaaggaaaaatcagctaatacataagaagcacaaacacatagaaatgaatgatctattggatatttactatagtcaaacactttgacatctaccacatttaagagactctatttccataactctagaaacaggcactgtaagtcagttcctctttggaaagtttcccacacttcagtgttttgaaatttgaccaagaagtgatttccagttttcagattatgaaattatcctgcacagaatttatcttgcttaaagaaaaactattccagatcttcctttagattatggatttggggctataggaaaatttacaattaattttgtaggttaaatttctctacttaagaaataaaggattttttttcctctgctgaagcaaacaaaaagatatacatttatgtttaagacatacatgtatgttctattaatgaaatcttgaatctatactcccaaggattaatttatttcagtcaaagagaaatttttcaaactgtgccgttattgggtagtctaatcaaaactattagacactgtattgcctcatattttaaaatgtccagggggatattaagtttttcttctcagaattcaaagccaagtcacccaaaactttgtgatcaactaacactagtctcgtctaactccatggtaacacttgtggcaagaaacatgaaatgaaactcaccatgaactccacatcctccgtaagatctcctaatttccgcttttcctatgcctacctggcaagtagatttctgccatggacaacaactttctctatgcaaaagcaccattacatctttcaaacttgaagagaattaaagcaaaaaaaatgcacagatattggcccaatgttgattgatgaaattcctgaagtcctctgcactcgaaatacaccaaatacaaaaaagatttctaaaaatggccctctactaagtgaaagagtataatatctctatctggatttgcaattcattcccatggcaatgggactaaaagccactaaaagtggctaacattttttagtgcctcctatatgtcaagcactattccaggcaaccaattcattcttaataacacagtgtgttagatactattttcaaacccattacacagatgaggaaattgagacacagagctgttgaatcatttatctataatctaatcccaattaattggtggaactgggattctaactccaaaaatctggatctaatagtcttcacctctcagaaaacatcatgttaactctcagagatccccaaaccagaagactaagtcaaatacctacaaaaataaacataccgtcttcctgaacacaaattactggaaaatccagtttacaaggatacagaagattattctgtctgattttaggtagtcttattctcctacttgattgtaatttgggactattttcttcatctttctactttccactatatacaagaggcactcaaaaagttcactgaacatgcagatcaagaagataaacttcaagaaagttatgaagaaatttaaagataattgcaaataagcttctttattcaagtcacagattaacagtatgaaagtttgaactaaaatagagtattagcaaatgtcccaaaggtctaaatatgaagaggttctaatgggtcacattacataagtaaaaataaggaaggaaatccactataagaaagcagaacatttgcttcacatgctcatttgtaggctgaactaatgactgccgccataagaagacagagagaactgagtatcctcccaaaggtgaatttcaatttttgttattatgagtgtgcttgcttatataaaagaatatgcttaagggaaaaaaggtgctttaaagttaatattctacaaaccatagtttatgagcataagaaattacataatttacagcaatctgatgtattagtaataataatgtattattatctcttaaacagtgttttgttttatggctaacagtagcacctgtgaatgaggcagaacctgttatttggatttcacaaggatgtgaaagtaatggtactgttaaaagtaccaaaaatgtattatatgctttaaaaattctagccagaaaacagtattttccttttcaacacatctattgaaagtgttggataaatgcaggatgttaatatgctataaacataaagtctgtttttaaaaaatagcatttgaaaatcatgaagggctttttgttttcttttgtttgtatatatgtttattggtaacaggtgacactggaagcaatgaacaccacagtgatgcaaggcttcaacagatctgagcggtgccccagagacactcggatagtacagctggtattcccagccctctacacagtggttttcttgaccggcatcctgctgaatactttggctctgtgggtgtttgttcacatccccagctcctccaccttcatcatctacctcaaaaacactttggtggccgacttgataatgacactcatgcttcctttcaaaatcctctctgactcacacctggcaccctggcagctcagagcttttgtgtgtcgtttttcttcggtgatattttatgagaccatgtatgtgggcatcgtgctgttagggctcatagcctttgacagattcctcaagatcatcagacctttgagaaatatttttctaaaaaaacctgtttttgcaaaaacggtctcaatcttcatctggttctttttgttcttcatctccctgccaaa

SEQ ID NO: 9499 - DNA, 6000 bp, Homo sapiens
tcagctactcgggaggctgaggcaggaaaattgcttgaacctgggaggcagaggttgcagtgagccgagatggtgccattgcactccagcctgggtgacaagagcaaaacttggtctcaaaaaaaaaaaaaaaaagaaaaagaaaaaagaaagaaaacgtagaagccttcaaatagcaattcataacaaatgagaataaagtcaacctaagaaaatataccaaatattttcaaaagtatcaacgatttctgctctttcaacttggtgtttaaacgccctcaagttgcacagttgtaagtaatattaataatctgagataaacacccaaaaattactcttgtttattccctcaaggatacagttgttggacaaggaaaagcatcaactggagagtctgttacaggagacgtcaggctacctcttttatcctagtccacctgctgctattgaattgaatgtgtcatctcccatgtaaactaagttctaaaaatctcgtcctttagatcaattactttctttctccagatattatctcatactcacagaaacttaatagatgaagaaactagaaacatgcatgcccaaaaccctggcaggcttgttgtactacacgaattaaaatatgtctcttgagccaaatgtccttagaaagaagaaatggagttaaaggaattgaggtctgctctaattcatctttatttctttaaaataactgattagaaattttgccaaaatgtgtatgtgttgacaaagatgtcataatgatggtaagatgatcagagctgtgtattatcctttcaccttactcacattttctgatatttcaacaatgattcaattatcatagaatttttaaattactaatgtccttaaggaaaaatgaaaaagatctcactcagaatgcgcttcctttcttccaaacactaataaaaacagatgaagtggatgtaattgtccttctgataagacaaaatatggcacttcatacttcccagtacttcctaatttttgcatgctctacttcaaatgcaaatccagtatatatccggaagtaaactgcacatagcaacctatcacgtctctaagaaaagcagtaaaaaccagtctttagaaacaataaatgcatttagttaaaatttttagcttattaaataactcttaaaagatgccttaaaacactatttctttcagctgtatctttcaatataccatgctattttgtttagaataaaacaagttcatataaatgttccatcaggaataagcttcgagcctgggaggaagaatgggtgtgcacatggatgaggaaactgttacaggaatgaagaaattaacaggtttttttttaatcattagtaactatacatagagtatattttctgtaaatcaagaaaataggaggcggatttaactacatttgtatattaaatctttgttctacacagcttatagtccacagtatgactgatatttatatatctactagtcctcttcttgcaagcagaacacttaagactgggatgtcagataactaggtcacaaaagacggcattcatttttgcgaaatatttcaatgcccaagactcgttacttttggaacctgttggtatctaacctaaatttctatattccaatggataaagccaagctagcagacatgactatgcactgctttaaaatacacaccctcaaacaaaatattaatgtcaaaatgaccacatttagaaccagagaccactggaactaaaacagcctaagagctatcaaatgtcataattatatctctatcctcctgcccagttccaaaagactacaggtttcagagtaatcccatttgaagcaaacattttcagatgagcagactacctttagtagacttggtaaaataaacaaaccagttaagccacttaaaagtaaaaattctgttcatttttctaactcatctcaattatacaaaataaccaaaccaaccaaagttagctctgttcccaacactaacacaaataactacaaactgtatgtgttgatgttatttactaatgagagattaaagtatctataacttgctctgcttctattcatatgaaaatatacttctgtaactgagatacttttcacttaaagattttagtcactttcagcattaagtggtctaactggcagtcttcctccaatgaaaaaatgttatcagaggtggtttgtaaataggtatgtggttgtgagttaaaaatcagaggaaaaataaagttaatttagatcaagaactgaagcccttcttttatccctcaaatctctactgttagcccttctagaggtttagaaatataaattctcaataaggtagtatgacttaagtattctgaattagtaatatggcagattgatttgttaaaaataatcattttcttgaataagccttgtttcatttgatggtcttagaaaaagcatcataaacatcctttagcatttacaatttgctgtaaaggagagtatggtccttattttattgaaagacgtacaaccatcccacacgagattcacttctcactactggggcctcttagtgggagaggggttgaggagagggtgtgatagggaaagattctcaggtacagaaatacacaaatacagattctaaggctaactagacagcacaggtcagaatggggtctccatctaacttcactgctctgctcttcagttcccctcatccagagaatgaggatgatacgcgtacttcagagaatagttgagattattaataaagtgagttaatccatgacagtgtaagaaattaaatattgacaattattatttgaagtacatacagcataaaagctctttttaaaattttgagactccaacaaataaggaaggctaagatttgtttacaatagtcatatttaaaaataacaatacaaccctttccaagagtttaatatcaaactaatccctttaagatgaccaacatttggggattattatgtgtctgaagtgactgatattaatagcttcaagttctaaatggcaacaaaattcttattccatttaaatcagtggtcctcacatttgagtgtaccaagcatcaatggaaggctcactaaaatacagatgcagggtggggcaccccagagttttttattcactcagctagattggtgcccaaaaatgtgcatttctagcaagttcccaagtgatgcagagctgctgctctgcactgtgaaaaccaatgaagatatttaacatgtaaagacatagacaaatactcaaaacgcagaagaaaaaaccaaaacgtgttcacagcaaaggcaccaacacaaatgattcccactgataacagaaggacactgcagtttgagacaccagggaggtgtgtttctgcaaagcaatatttacataaagttaaagcagcacaggtgttggagaggatgtggagaaataggaacacttttacactgttggtgggactataaactagttcaaccattgtggaagtcagtgtggtgattcctcagtgatctagaactagaaataccatttaacccagccatcccattactgggtatatacccaaaggattataagtcatgctgctataaagacacatgcacacgtatgtttattgcggcactattcataatagcaaagacttggaaccaacccaaaagtccaacaatgatagactggattaagaaaatgtggcacatatacaccatggaatactatgcagccataaaaaatgatgagttcatgtcctttgtagggacatggatgaaattagaaatcatcattctcagtaaactatcgcaagaacaaaaaaccaaacaccacatattctcactcataggtgggaactgaacaatgagaacacatggacacaggaagggaaacactacactctggggactgttgtggggtggggggatgggggagggatagctttaggagatatacctaatgctaaatgacgagttaatgggtgtagcacaccagcatggcacatgtatacatatgtaactaacctgcacattgtgcacatgtaccctaaaacttaacgtataataataataaaattaaaaaaaaaaagttaaagcagcaaaacactttgcccttcaatctcacccctaacatattttttgcccttctggtttcaaagttaaacaactgtaaataattgtgatacaaggatgccttaatttaatgttatattttcccaaaaactcaaagttaggtaaagaaacaaaaaaaaattgtttatatttaaattctattcaagaaaagcatgaacgacacagtatataataagcctggcaatggatacaatcacttctctaatgtaattttggaatctgctaatttataatagaaggaagctgtttcacctacaaaggagttaatcaaacacaggtttaaaataatgacattattaaccaagggaaaaacaaagggccagagacttaacatccctagccagcacgcattttgagttaacataattacttgttagaagaaaatacatcacccagtgttgtacacaatatatttcagataaattaaccacccaagaaagcaagcttaaaatcttctccaggaagcagacttcgaaggcttgatctcaacttggatttatcatttgcatagaaaataaccataactcgaagttataaatcatcaactctatagcaggtttcagtaaaaagccgcaagattttaaattgctttttaaaagatgacttctcagccatcctcatcccacatttcctgggaaataaaagcagaagtcctaaaagaggacagatagaaattcagtgtctgcatagctttgagtccagtgtttgaagacaatctctgattgtgaagccctctttttctctccttctatttctctctagagcactcaagactttactgacgaaaactcaggaaatcctctatcacaaagaggtttggcaactaaactaagacattaaaaggaaaataccagatgccactctgcaggttgcaataactactacttactggatacattcaaaccctccagaatcaacagttatcaggtaatgttatttctacaagtacttgacaaatatatgtatttacactctgatatgtgtgtacattttttccaagtttctcttaaaattgtaaaccttaataactatcaatgcaagcatgtatttggaataaaaattataattaaaatagaagtctaattagtgatgtcagagacaattgttaattagcctctttattaagaaaaattatacaaagcatagaaataaaatataaatggtcttagttactttgcctcaagtataaaatgagatttaaatacagataaagggagctgaaattctcaatgtcaagaatacttgttaaatatcttacagactacacaaaatgtatattcactaagtcgaatttccaaaacggtcagggatgaactaagaccacacagcagtagcaggaaaggttaaaatcagtgatcttgtattggaaaacattaggttttgtttagcattattttaaagcgctaaataggtgaggagatgctgaaaattgaagccatactgtgacaacatgattcttaatcgttttccttccataattaaggacagaaaggaattccatggacattttggggaatttaagtgctacattcatttatctaaatatcttttacacgaaagttattttttaaaatttgttatttgtactttcaatatatctctgattattaagaatattttatatagaatcaatttcacttatctctggtgaaataaaaagattacaaacgtcatttcaaattcccaagatgtagatgccatatagcatattcaagtcacttgttaagttttcattatagctgcctattgtggtaataacctatattttattttagctaccattacacactccataaatctggaaagtatgccctgttttgaggaatgccaactcatgaccatatatacacaggccatttctgactcttat

SEQ ID NO: 9500 - DNA, 6000 bp, Homo sapiens
taccttttagtaggtcacacacacacacacacacacacacacacataaacttagaaaaagaaacacacacgacagataaattagaagctaaaatttttaaatgttatcttttgaaaagtaggaaaagaaaataacattttcctgggtatacttttgtttaaagttttaaatttagaaccatactttaacattttaattgttagatcaagaaaatgttttatatattaaaaactaaaattttaaagcaaatttaaaatttaaaaataaatagaaaatttaaaaattgaaagtaatggaaacaaatgaaccatgtatcaaattggtaaataaccacacatagaaaaacattgtttcaagtaatttgaaaatacagcaattgtacaaacttagtgggatatactgtaaggacaaaagagaactgcaaaaacatctcaaacttcatttgtcaattttattattagtggtaatgctgacgttattagtctgaaatcattttatgtataagataattatgtttatgttgttagaaacaagatgttcagtataaatatcaactcaaagaagttaataattggaaattgaatcagaaatatctatacaaatgtatgagttttgaactttaatttgaaagtaattttaaacttatagaaaatgtgcaattatagtgcaaagaaaatcattttaccgtttcgtaagatttacctgttattaacattttgccccatttgcttcctcatttgctctatctacacacacacacacacacacacacacacacacacacatgatttttttgaaacaattgagagtaagctgcataaatcacagttgagtgtgcatctctaagaataagaacatcctcttccatgtagctgtcaacttcaataaaccgaacattgatcagaaattaaaattagaaattacatttagttgttatgtctctttggtgtcatttgttctggaacattttctcagtcttcctttgtcttatgtaacattgaaatttttggaataattttttaaataaatgattcctcattttgagtttgtctgatgtttccttgtgattagattgaggttcttcgtttctagctggaatgcatataagtgacattgtgtccttcccagggtatcatagtggtgatgttagttttgttcatctgctcagggtctgtctgatttatctacagtatcataattatcatctcatgatttatagatatctagatattgtgagatgataatgattatacacacactcatctatatatgtgtatatatatgtatatagtacatagcctatatatatacacaccatatatatgtatagaatatatagcaatatatatattatagcaataaaagattattaaaaactcacaaatatttatcaataaactggttaaatgaaactaaggtacatcttcataatggaaactatgtaactttatttatatgtatagaatatacatataatgtgtatacatatgtatatatcctacctttgtctgcagaacctagaccataatgctccagggataataaccaaccccactgcccaaatgttggtctctaaatgctgtttcccactgcggataccagggattcttgaaataatggttgctcctaggtatagtgtggagaatttacaaggtgagcttgaggcatctcattgtgccacaaaacacagcatgtaagctctaaaaatctaagtgagttatgtcaaaaggaccctggaaccaacttgaagtggatctcattggccaaagatgggacaatttgagtgtctaaaagaaaacaatcgccgtaactgattggtatgcacttactatataaaaatccacaagtcaataataatactctttacaccattcatagaacaaggcatactgaatgtcactccaaaatgcttttgtgtccgttgtctgaatggttgagcaagttttcctttttctgatggaactgaacttttccaagatccagctcagatgctgcttcctctgagaggccttccctaaagcctccacgtggttcattcattctctgaattccaacagggctcattgtacatgcctctttaaatgcacctatcaatactgtactagcattacttatttaactgtatttttctctctagactataagtttataaatataggatctgtctgggttttatttattttgttatcctagtacctaccacttactagagatagttttatatacggtattacataatatttcacatgttgtgaataaatagagcaactacaatagcaccctctgtttcttcttggtcatgcaatatagatttgtctatattttagaaactggttgagtgccattaaatggctggctattttagctaacatgaaaattttttttatcacaatagttttggtggtttttgttttcagttttttcaactatcagccatagctttagcactgagtagactagaaatatatccaacaatattttcctgattctcagtcttaggcaataacttcccatagtattctgatttatcccagtccactttctctccctttctttccacatacatcaacctactgataatataggtcagggagtaacaaagttattgattaaataaaaacttgtttgtaattggtagtttgacttagttgtaatacttaaaaaatagtagtctgaaattaatgttttaaaaactcaatttggggccgggcacagtggctcacggctgtaatcccagcactttgggagaccgaggcgggcagatcacgaggtcaggagttcgagacaagactggccagtatggtgaaaccctgtctcttctaaaaatacaaaaaaaaattatccaggcgtggtggcacacgcctgtagtcccagctactagagagactgaggcagaagagttgcttgaacctggacttatgcgctcagaagtccaaacgggtgggagatccaatactgggaggcggaggttgcagtgagcagagatcgcgccactgcactccagcctgggcgacagagggagactccgtctcaaaacaaaacaaaacaaaaccagcaaaacaaaacaaaacaaagcaaaacgaaacaaaactcagtttggtccaatgtctaacacaccagcggcaaccaaaccactatgttaaatttcctgtatcaaacttctctcatgtagtaatttactgcatggagtctttcacgcatttgtgcacacattcagtcttaggtctttgtggacttttaagtattaacaatttaggtagtagaggtggtacaaactgtctgtgaaaggcaagtacaaacgcattcaactgagggggatactctctcatacacagtacgtggtatctcatcgggtgagcgccgatgtgtatggtcaaggcagtgactaacgccggcctgtgcttcgtgggagtctgccctgctcctccgtggggtaggactgaggcgttagaagcgcaagttaaaaacggtgggagtgacagggaagccattcctccagcggcgctttgcggtaggatggatgtggcgctggccacagtgctgaatatgttcctggggcggtcccgaggtcggtgggccgggaggggccggtcggatttgtgaattcgctggcaactggcagtctcatgccttcgggtgctgatttctggctctgagcaggagacgcacagaccgcgtccagagggtcaccttgctagtgtaggggtggcctttgacctgttcccaccggcacagcttctacttctcaacagcaacgcgtcttctatttattgagtgcctccggtggtccctgacacttgatatcacccccagtggtccgcacaaatcattgcaattcaaagaaaaagacgtaatgctcaggaggttgaagaccttgcccaagggaatacggctactaaatggctgatctctctcagttatgcctcaaaaaatgtttcctgcacactctcgacgcgccagcctcacagcctcttcttcacttgccgcctccacacacctccaaccctgcctttttcctttctcctgttccctccctgaccaacctcggcaccccgccaccaggtttgcatcaagcaaaagtaatataccctacagcagactctctaccactaccgagtgatacaaaggactgggattctggacagggtttactcacatatcttgcccctgtgcgctcagaagtcccaaccgggtgggagatccgacactggtccccgagtccccagctcgctgtgtgaccttggacaagtagtcacatcgctgaacctgggtcctataactgcgtgagactattctttggtgctcaccggtatgaatacaaacacaaggtccttcttttctctctctatcccccttcccaagtcgagttggtcaagctcgctttttctttccaccagggccatagccagctgcagccttgtggaggaagaaatcaggtcccagctgctaaaggtgtcctccccaccgccaccgtcgtcttcacccccacccccgggtgtgacctgtccttccggggcacactagtccagcgtcgcccagggcttcggagagagcgcctcacgctcccgcttcgcggcgcctggtccctgcggtccccactcgctgcgacgctttgggaagtgcgagatggaactggatcgagaacgcaaatgcgaggcagggctggtgacaggtatgcgtgtgggcgccggccggaggatgtgttgggagaaactttgggggagttggtgggggaaaggggaggtgtcagagaaagcagtgggtcactctctcacccactgaccaccagtctctctccctcttccttgtccccatctcaccttcttcctcggcttctgcctctcacctccctctctttcttctccaagcatcctccctacgcgtctgcacccgctcctccctcgcaccctcccgcgcctaagcggacctcctcgggagccagctcggtccagcctcccagcgcagtcacgtcccagagcctgttcagctgagccggcagcatgtggaacgcgacgcccagcgaagagccggggttcaacctcacactggccgacctggactgggatgcttcccccggcaacgactcgctgggcgacgagctgctgcagctcttccccgcgccgctgctggcgggcgtcacagccacctgcgtggcactcttcgtggtgggcatcgctggcaacctgctcaccatgctggtggtgtcgcgcttccgcgagctgcgcaccaccaccaacctctacctgtccagcatggccttctccgatctgctcatcttcctctgcatgcccctggacctcgttcgcctctggcagtaccggccctggaacttcggcgacctcctctgcaaactcttccaattcgtcagtgagagctgcacctacgccacggtgctcaccatcacagcgctgagcgtcgagcgctacttcgccatctgcttcccactccgggccaaggtggtggtcaccaaggggcgggtgaagctggtcatcttcgtcatctgggccgtggccttctgcagcgccgggcccatcttcgtgctagtcggggtggagcacgagaacggcaccgacccttgggacaccaacgagtgccgccccaccgagtttgcggtgcgctctggactgctcacggtcatggtgtgggtgtccagcatcttcttcttccttcctgtcttctgtctcacggtcctctacagtctcatcggcaggaagctgtggcggaggaggcgcggcgatgctgtcgtgggtgcctcgctcagggaccagaaccacaagcaaaccgtgaaaatgctgggtgggtctcagcgcgcgctcaggctttctctcgcgggtcctatcctctccctgtgccttctcccttctctctgagtctccatctctatttccccctgagtcgctacctctttcttcagtttctctgggcctctgtctctctgcgtttctctcaattattctctcctcttgctttcttgagtgatgtttttgatctctcaatctt

SEQ ID NO: 9501 - DNA, 6000 bp, Homo sapiens
gtaaggaagataaactaaagaagcagtaacaaatggcagcatattgattaaactatactttttaccttcctaggcctccactttcggatctataaaataacattaataataatgatatatatcaaatgaggttatcttgagaattgatatctattgtgcctggtacctagtaaccaagtgaaaaatataagctcttggtaatattcattattcatataaaatgtacattaatataaatatattcatatactatttattaataataatataaatacttttagtaatgcctaaatacatttggctgcaagtaacagaaaacacagctaatacttacctatgcaatgagcagatttcttggcttatgtaactggaaatcaaaagaggaagcattggggataatttgatctagtggtacagggaacctctgtgtattgaactcatcttcaggcagctagcgaaagaactacaataatcctgggtctcatatctacgcagaatcatgccagatgcaagaagtgctttcagaaacccccatcaaacctttccctagatgtcactgccttgaattcctgagtgaactaatagaaaggaagataggattaccagtagggatcaatttcaatccacccattgcaggctctgtggagtgaatttctctgcacaataccaaggtttcttaacaaaatgggatcagaaaatggatgaatggatgctagttaagtgacgaaagttgtctattacaaatagataaagcaaaaaagtataacagacaaaaatggaatattctctctccaagataaagtgaacacccattcaaaagtacaataaaatgtgagattgtattttgaaatgcagaagatattgaagagtagaacatcttccagcagcagaacaacaaagaaaataagtaaaattaagatgatcaagaaaacaaaagaatatgaagtaagactgagacctttagttagttattttttactaaccccagagtgaggacagattgattactaaatagaatcaagcctgtgaatacattttatagcttacaatctttgtgcctaaaactaggttcccctccaattaaacctgacattttctaaccttaaagaacctggcccagttttacataaacctgtcttaaacagagatttctgtccatataatctcagaaaaccaaacaaaacgaataccgtgttccttatcaagtgccacatcctatgccatggttaaaggtataaagatgaattataaatcatatgtaatagatgtgtagtgattttgcaagctcagcatcactttccagttcgtctggtaacagacttctctttccatgtagtttaagtggtgctggtgcctggctagaaaaataggtctatgcttcctagctcctctaaccagcctacgggcatggccacagttattaattcctaagtgagcatttgactcaggaaggaccaatcaaagctttacctgcgagttaatcaggttctttaaggttagaatattttagtcctgcacattttttaaaaaagaaaatcacttcaaaatttactaattatctttaagttccagaaactgtctatagcgactaagaggaaaatgatttatctgtcaacatttctgctctgcccactttaagttttggtcactgtcaaataaagcagtagagaatggcaaaaccagttctgtgtcattcaacacatgagtgcttcttaggcacaaaacattatttgaaacatggtcccggataaaaagataaataatacccagcccttaccctcaaggatcttacaacttggcaagggaaataagacatgcacacagatgacagcaataaaggaaagataatgattgctaccagatgtttggggagaaggagcagagcaaagagagaacgcagaataaggcagcattcaacagtcagccaagaaatatttattgagcaatcattgggtgggaaatgaaaatggaagcacagagcatgagccgagacatgtgcaggtgaaaaatcaaatgacattacttgttactccaactctccaaatatttttgtcaccaagtttgtaataaatagcctgaaattaaaaatgaaataaggatatagtagtctctgtcaaagacagcctgaggtgctaatgcttaaacactaggatcatagtatgagtgttcctaagtatgcctctctattgctttatttatatcttcttccaaatgagttgatgctgccctaacagaatatctgttcagctatttcacctttttggtcttgtgtattagaacaggtgaattagaagaggattcttttggcttcaaacagaaagaaagtgctatataatttaaaaagttcagaggcaattcttcaagcatgtttggatccaggaatgcaaatgttttaattaagcctcaatctctctctcattctttatctttctctatctccatgtatttatcttactttggggttcatatatctccctgttcttgtggaagcccctggcacagcttcaggcttatattctcatagctccacaacttgcaggaaggagcaggtaccatcatggcatatggtcattcaacttgtgcatttgtgtagcaaggcattgagtctgaaggtgattcataggcacattgcgcacagagtagatttgtatattaattacagcactgttttctggaagctgactagaaaatatcttgttttgacaaaatcagaatagcacaacaattttccaaaaaagaaacaaagtattttgtggaaggggcccctttgtatctgacttatacagagatggcctatgtggtagtgataaccctatgtctccatcctggctgccccagcgaaagtccagggattatccctgaatggctctggttggactttctgcccaacctggaatagcactacagccagaaggatctgatgttctgattagccaagacttgatcacaggcagtgggatcagttctcctgaaaccatgaacattgaaacaagtaagaggggcatatccaaaaaaaaaaaaaaaaaaaaaaaaaaaattgatgggatgtccctgacaggaaaaacaacaacaacaacatcgacaacaaaaaccaaaaaccttctataccaggaaaccatcatagtgttctttgaatatacaaaaactggtctacacataatacaatagaaaatattggcctaaaaagagcaccatggccgaagggacatgacctattttaacagatgatttgagagttaaaagataacttggagggcatccaattcaatctcatcattttccagatggggaaactaaaacccagacagaggaacagaagtgctgagagcacacaagtattcggtggcggagacaaccaactacgtgccttttgacgttttcccccctacgatgatgataggtttcttcgttacattgccaacaaaaacaaaaagtatagtcttgtttctggttttctctccgccctaaaatctgtataatatgattttgctgccctccaacagaaagcctcaggaagagatggtttaacctccttaagtccgctcccatccccaaggacagacattcactttccttgaattggaagtagagccacttgttgctttaatgggccaaatgcggtctggacctgcaggaggagacgccgctcataaagagcttctcaattgcactgcaacctgtactggcatcctgactttgcccccaaaccccagccagagaaagacaaagaaaggcattcccaatcaatggggacacttgtgcctgccccctctttcttcttcctgccatcacctctttcctgctctttcttactggcaaaaactgccaccaggtgcaccagatgcatctctggaaataggtaggagggagtcttacacctgtcagtgctagaaagtgcgctctgcggagttctcagttgttccctctctgcaacgaagtaaaaagaagggatgcgtccgaggtttttgacacagacatgctggggaaacgcgtcagttcaaggagctctgactctagtgactactgaagaccagtgatgcactcccatgcctagcatctcctcttgacttctgtttccctgcagccaagctcagctcctggccctggaaacccctttgggtaaagcgtctttaagtcaagaatcaggctcctgtgtgcacgtgtggctttcttagcaaaaaactagcacaggcggctcaggagtagagtctagctagggtcttcccgcgcccctccctcactggtttctctgcccctgcctcgctttctcccagagctaagagcctaggctccggacctagggtttgggagcagtcagcacgacgtcctcgccccatcccgcggctgatgacacccgtgcccagaacgtgggtgtgggtagggaggcttccacagtgagttagggtcgagagctaggctctcgcttgctccccgcaatccctagattccctggggaccacgaaactcccattccgaggaaacctccccccattccccagccgcccacccgtttcccccccttacctcagcacgcagcccctccctgcgtgatgatgcaaaccagtggggagggctggcgctgggaagggtggggagagaaggagagccagcgagggagggagggagtgggaggaggaggagagggagccgaacgaccatttaaagcgatagcagtccctgccctctccccagtgctgggctgttggagagagcgagcagcaagccggtgagcgcgagcgcggcgcgccggccggctaacccgagagcgcgaggcgccccaggctggcaggcgccgcgggacccctcaccctctctggtcgcccctccccggattcccccaccctccgtgcctgcaggagcccctgggctttcccggaggagctcgccctgaagggcccggacctcggcgagcccaccaccgttccctccagcgccgccgccgccaccgcagcagccggagcagcatggtccagctgaggaagctgctccgcgtcctgactttgatgaagttcccctgctgcgtgctggaggtgctcctgtgcgcgctggcggcggcggcgcgcggccaggagatgtacgccccgcactcaatccggatcgagggggacgtcaccctcggggggctgttccccgtgcacgccaagggtcccagcggagtgccctgcggcgacatcaagagggaaaacgggatccacaggctggaagcgatgctctacgccctggaccagatcaacagtgatcccaacctactgcccaacgtgacgctgggcgcgcggatcctggacacttgttccagggacacttacgcgctcgaacagtcgcttactttcgtccaggcgctcatccagaaggacacctccgacgtgcgctgcaccaacggcgaaccgccggttttcgtcaagccggagaaagtagttggagtgattggggcttcggggagttcggtctccatcatggtagccaacatcctgaggctcttccaggtagggatgcgctccctccggggcggagcacacagtggctacctgcgcccttaaccctaaaagctggcttggactccggtggtgcgggtcaggtcagccttcgctcatttcctccctggagatcctgccgaatccctcccaccccgctcgaggagataccttccctgcttggtttatttcccttccatctctcccctgtccacgctccactccatccggcttgacatctggatttatggccccatttacaagaagcaatctgcgaaaaacaaggcgatgatttaaatgggtttgcattagggtgaaatatggtccgaaaacaggctcgtaaaagtgccaggctcctaggagagctggttaggagaatggaataggaaagatgagacgatgcctggaaaccgggcatttcccaactccccagcttcccacccccaagccagcctgccaacctgcactcccttgaaaaatttggagacagccttaaggaggcacttcttaaatcgagggctccgtctta

SEQ ID NO: 9502 - DNA, 6000 bp, Homo sapiens
attctttttctagttaaacaagtcattaatttttagtctttcttctcttaaacataaacatttaaacattctcttaattataaacatttaaggccaggcatggtggctcacgcctgtaatcccagcattttgggaggccgaggggagtggatcacttgaggtcaggagtttgagaccagcctgaccaacatgttgaaaccctgtgtctactaaaaatacaaaaattagcagggcatggtgttgctggcctgtagtcccagctactctggaggctgagacaggagaatcacttgaacccaggaggtggaggttgcagtgagccgagatggtgccactgcactctagcctgggtgacagagcaagactccgtctcaaagcaagcaagcaaacaaaccaaaaaaaccatttaaagtcttaatttttctatggcccaatttagctacccaccacaacattgatgagtgatattttatttttattcacttatatgtgttttctgttttccattgttgtatcttctttgacattcaggtcacatgaaaatgtgttgtctaatttccaaatgtgtaggaatttttagttatcttttaaaaaattaactagtaatttagttgtttgcagtcttctatttccttaccaaagttttgtctgtttattcggacctcctctgtaatatagttgttgttggtttttaaatgctgtcttgaaccagttttaaggcgctggctaaaggccagtcagttcccctttttgaacagctaagttcacaccccaatcacttctcttatcagaccctcatactcaggggccactatgcattagccctaattgccctgaggccaggtaccaggcactagggacagcccctttgctctgaacacacaaaattattcaaaatagccaatgggcagaaagcccttgaaacctaagtaacctcacatgcttgccacacataaactgctaagtaacctcacatgcttgccatacattaactgcccctacagctccggctcattgttaccttgtccctgttactcctggtgtggccctgcctggcaggcttctcattttgagctgtaaataacaggtttgaaggcctaatcaccgtagctctgcagctgagtcctgtggtgctcctcttgaaggcacaatttcagatatgctggtccctgtgggttggtatggtgccagagcctgggcaatgtaccttgatgactttgaccttgaaataaggcttgatgcaccagggggcgctgtagtctcatgttccagctttccttcgtgttggaagcatgcgctgtactgtgtaccaacatggtttggggtaggctttgcagagtcttttgttggcctgctcctttctgcttaggtttcagaaacgaagcctaatggaacatgtgtccatgtaaatgtcaggagtgtgagtgtagccctgacagtgttcctcactggctgggttgccttgagcataccacctcccgtctctgggttcctacttctccatctatgaaatgggcattaataaaacaatgattctggctgggagtggtgactcatgcctgtaacctcagcactttgggaggccgaggcgggtggacatctgaggtcaggagttcgagacccgcctgaacaaaatggtgaaaccccatctctactaaaaatacaaaaaaattagccaggtgtggtggcaggcgcctgtaatcccagctacttgggaggctgaggcaggagaatcccttgaactggggaggtggatgttgcagtgaggcaaggttgtgccactgcactccaggctgggcaacaaaagcgaaactccgtcttggggggagaaaaagactcttttttgggggctgaggtccttttttttggatgtttaattttgaaacccttactgaagggacacctacttagtgtttctccaggacagtaatgttgttactttgccaacctgaagactgactgtccccagggcagtaacctctgcaacttggaaacctgaaacctgttttttacctgaaccctgacttggaaattgaatgtggcccaaaaagtctaaatccaaatatttcctgggatcccagcaatggccaagggcatgctctgggctaggctatttcaagagaggaagctattcctgtgtatagtatttatcctactcatttctaatcactgctgctgcgttgttgaacacctgtatataccagccactatgctaagtgctttacaaatattagctcatttagttccctcacagtcctcaagtattatcatccctttttacagataagaaaatttaggtttacacagctagtaagtggtgatactgagatccaaactcagactcaaagcaagtcctctcgaccaatggggccactagagctcacactctgcctcactcatgggaccaggatgcatgtctcatggccaggttcactcaagggaggactaactggctctccagggatcatctatagacccatatggatcaatgctcatttatgatgatttggacctctagatagcgtatgttctagaaccttaacactgcccccacccagggcagaacccatggagatgtaggcgttgtgctcagatgaacttgcccaggtccctgccgcggcacgtgctttcctgcccttcacacttcgcccccggccagctctctaacttgtacctcaaagtctataatttaatggcagaaacttcttcaggccccatgtttctggaaatatgttcattttataaattactctgtataatgggcatagattagctggtcaaatacacgtgggacattttcattgcaaatcctccttccagaggctcaggatgatatcagcattggaaggcccccaggaagcattgcaggatggaactgtgtttaacctgaacccaagcccagcattccctagacctacctgaccacacatccccatttctcttttgcaggctatccatgaatctggttccacagtttatactctggggaacattgctctagctcattgctctagctcaggatttctcaacctcagcaccattgatcttcttggtcagacaactctttgctgtggtgggctgtcctgtgcattgtaggactttagcagcattcctggactctacccattagaaaccagtagcaggctgggtgcggtggctcatgcctataatcccagcactttgggaggctgaggcaggcagatcacctgaggtcaggagttcaagaccatcctggccaacatggtgaaaccccgtctctactgaaatacaaaaaattagccggacatggtggcgcgtgcctgtagtcccagctacttgggaggctgaggcaggggagttgcttgaacccgggaggcggaggttgcagtgagctgagatcatgccactgcactccagcctggtgacagagcaagactccttctcaaaaaaaaaaaaaaaaagccagtagtaactccctcccaccccaagctaaaatgtctccagatattgctgtatgcctcaaggaggcaaggagcctgagttgagtgcctctactctctactctaactcgtgcattctcagtagaggcaatattgcccccaagataaaacttggctcttggagggagaaaaatttcatactcattttatgtataaagcacagatatacatacactgtataaatagatatatggtatgtttgtagcattaaaattttatgagggagtgttaggaaaaaaagtctcaaaagactccttggggcaagtgataatgaaaaaaaagaaggggttccctaacaccattctagctcagtgttttaatttctatttatgccaattccttagaaagaatgatctttatggctcttttaagctgaatcaaagagctaagcaacagttgaaacacagggaaagcatctggaagttgccaaaaagctgaggctatgagagacttagggctcatgtcagcccctcgcttatgactgctacccacatccaaagtgaagatcaagacctcagccaagaccactgccaatgaagctccgcaatccccaagcagaaggcgcttgggtgaggggtcttcctgactcaaaaggacttgaagctatgttgccaggccacttcacactggtttgaggccatgtcaactattgaatcaaagaatgtggttggctgatgccttccaagtcactcacagacacatacatttggacaaatttttctcttctctcttcttgaatatcctttttcttgactatctctggccttccttctcaccctggcctctcagatcccagttgtcaggagaacattgcacatcttgattgctggcccctgcatatccatgatgagaaactagcaaacaggttgctgatccaaaatgtagagatcattgctaccgcatatggccagttaaatggaatttttttttttaaactaaaaagcgaaaaaggagtggctgattcctgtaatcccagtgctttaggaagctgaggtgggaggattgcttgaggccagtagttcaagatgagcctgggcaatatagcaagacccctatctccccaaaaattaaaattagtcagtcatggtggcttgcacctctagtctcagctacttgggagactaaggcaggaggatcacttgagcccaggagttcaaggttacggtgagctatgattgcaccactgaacaccagtctgggtgacagagtgagaccctgtttctttaaaaaaatctcttttttaaaaaccaacaaatacatttttgtatttttaaaaaaactaaaaatcttttttaaaaagaaaatgacttcattttttttcttaatctttttttggcacatcttcttggccttcggtcttgggaaatgactaagaatcattttctgcttcctacttctatcaaaaaaccccacttgaacttagtacagttgggtgagggagataactcgtgctcacaggaagccacgcacccttgaaaggcaccgggtccttcttagcatcgtgcttcctgagcaagcctggcattgcctcacagaccttcctcagagccgctttcagaaaagcaaggtaagcagggacggggacattcccagggtcttgggtcgcacactgctttctggacctggctgagatgctcaggcccctcacgagtctagggcttacacttggcacctaccttgcagcccacacaccttctacctgtccccacaccctctgagccctcatctgatgggcactaatttatgcaggactctcttcctgcacacatctggcctgagtccacatgccccaaataaatagatcattttcataaaaaatatacacttgtctgcttcttgcttctagcaagactcccaggcaagaaataccacacacgcaaggcctacagaataattccagacacttaccagctgtgtctcctggctttttgttctcctgataatttcctaactcctcagccttgtttatgcctttcattttcactggtaaaatggtggagaaagactagaattgttagtcattcaacaaacttttttggagactctgtgatgtaacaggtgttcagtatctatttgcatgagtaaaccaaaatcttttttctttctttttttctttttcttttctttcctttttattttttattttttttgagacaggatttcactctgctgcccaggttgaagtgcaatggtgccatcatagctcactgcgccttgaactcctgggctcaagggatcctcctgcctcagcctcctgagtagctggtactatcagcacgtaccaccacacccagctaacttttaaaacaattttttgtagagacagggtctccttatgttgctcacgctggcatggagctccttggctcaagtgatcctccctcctcggcctcccgacgtgctgggattataggcgtgggccactgcacacctggcttcaaaagccctttcttgagaaacacagtttgggcattgggtgtgtggtggtgggggtgtggggagagatcgaatgtgaatttac

SEQ ID NO: 9503 - DNA, 6000 bp, Homo sapiens
aacagtatttcacaaacccctcttctatgcagaggaacagggtaaatattatcaggagtgaagaagagaagtatcttgacattctacgtttacccttaacttgtgagcatttttcctgggcagaggcgaactcttcctagtttccccttaagagtttttcatgtggcccaggtactgaacataagatagacttggagaggccattggttctggaggactcacactactttggcctcatattttttttttctccccaacttcataatgataaactcaggcttcctttgtgtaccacttttggcaatgcaggtgctttttgcaagtcaatgggagagaattacaagtgtggcttattaaattgatctccaatttaatcaataaatcattcacaacatgaaaatgtgtttgctttgaattagtgcttgatagcaattttctatttcctaaaaacttgtaattgaaatgacagcgtgcctttattaaagagaattttaagaataaaaagaaataacctaatataagattgttttaatttctgcctatttcattctggatgtacccacactcatccatgcttcgcaaagagacagtcatagtatacatgccaccttaatcataaagatttctctgggtttctacatggttttcacagtgatactttttcctttcattattcatcattcttcagagaaccatcacctcctgggactcctgtgatgaaagtgccatgattgctaagctccttaagtgaggaaatcataaatttcatttttttatcccttctaatggcaaaagcagttctgagaatatgctaggcacttcagtgcttgtagccttggaaaaaggtggtgagcatgtttgtagaagataaattctgggaataaagcaccaccaaaaggctaagagatttagccgggcatggtggcatgcacctgtagtcccagccaatctggaggctgaggcaggagagtctcttgaacctgggaggtggaggctgcagtgagttgagatcatgctgctacagtccagcctgggccacagaggaagactctgtctcaaaaaaaaaaaaaaaaagaaaggccgggcacagtggttcatgcctgtaatcccagcactttgggaggctgaggcgggtggatcacctgaggtcatgagttagagaccagcctggccaacatggtaaaaccccgtttctactaaaaataccaaaaattagccaggtgtagtggcgggcgcctataatcccagctactagggaggctgagacaggagaatcacttgaacccaggaggcagaggttgcagtgagctaagattgcaccattgtactccagcctgggcaacaagagcaaaactccgtctcaaacaaaacaaaacaaaccactaagagatctaatcaattattctggcacacaaggtaatatgaatttcctgaaaatgcaactaaaaatacgttattaaccacatttctccatattcaacccttcaaatcaaaattatgatgatacctttttttgtattctgacaattgtcatgattactcttatgaaggaaataaatagtagtaaaaaagaaaatctgtttcttgttactcttttttgtaatccatatgggaaattaaattatatagacagcaaaactggctttactattaataacacacgagcttttcttaaactctggctttgtctaacacttttcgttaagcaaatgcatttttaccctacaaatcactgagggactgacatatagttgaaaactatagaaaatacagaaagacttcctctagtcttatccacaactcttcataatgttattgcacgagaattttgaatgtggtgcagtaagaaaagcaccctcagctgtgcctcggaagacctgagttctggctctggctctaccaccaaattactgtgtgattttgggtgagccactttgcctctctggacttaaatattactactttgaaagaaagagagggagagagacatcagctgtatgacctgaggccattttctgccctaatactctatgacaaatatctgtgatagtagtaatttctacatttacacttagggtttatttaaatacagttttttctttctctttattttggaggaaaggaggtcaaatatgctgctagtctctttttccctctgaagtgaaatacagtcttttgaacctttggagggacccagtagaattgaatttagatgggatgtccccaatggatctgatccagcattttcagaacccattgaatgtgcagcagaaggtagacttggagaggccattggctctggaggggtcacactactttggttttgtagtttggtttctgctgccttcccatagaatgcctgaatccctgatgtaggcccaaaggtgaggaaccaaggcttgtcagttaactatgtcacagtttgtctgtcttccgagtcaggatgttgtgggttgaataatggtcaaccaaagagatgaagtcttaattcctagaacttgtaaatgttactttacttgggagaagagcttctgcagatgtgattaagtcaaggattttgagatggggagattatcatggattacctggacggatcctaaatccaatcatgagtgttctcataaatcagaggtgggtgagatctgatgcagacacacagtggagaaggagatgtgaagatggtggagattaaagtgatgtggccacaagccccaggtttgctggggcagccaccaagagccagaagtggcaaggaacaattcgcccttcaagcacccagaaggaggcagccctgctggattatagccatctggcctccagaactgggggagaatacacgtctgctgctctaagccactaagttggtggtaatttgttacagcagccacaggaaacaaatacacaggtgacagcaggcaagtgtccagtcctgcaggggcccacaccagccctcagatctggctcaggaaacacaaaaagaggagcatccttccattctggctgttcagtcctttcctccaactcttcaccagactccacatctccaccttgcctcattctctctgttcaactatttattaagaagttgctgtgcactaagcactgtgccaagtatggaggagcagctgataaaagaatcctcaggaactgaagatagagactgtttggggtttagatcagcttgcactagaaactgggcttggggggaattccaccttagtccctcaggccttgcttaactgggctttggaggggaaggtggcttcccccacacctgccctcactgatgaggcggtcccatagttcccaccatcatgacatggactagtaatacctgagggccctgagttctccatcggctcaccattgatctttgcttatcacatacaaaactctcataaaggaactgggttttccccaaactgcgtcaaaacatgaatgatggtgaggggaatttgccgaggtatgaattcaggtaccagcagatatttccttttattttttctttagagacaggtcagtggctcaatcatagctcacctcaaactgctggactcaagtgatcctcccactttagcttcccaagtagctgggactacaagtgcatgccaccatgcctggctaattttatttaaaaaatttgtacagatgatgcattagtccgttgtcacactgctataaagaaagaccaagattggataatttataaaggaaagaggttaaattgactcacagttctgcattgctggggaggcctcaagaaacttataatcatggtggaaggcaaaggagaagcaggcacatttttcacaggtcggcaggatggagtgagtgcaagcagggaaaatgccaggtgtttataaaaccatcagatcagatctcttgagactcactcactatcatgagaacagcatgggggaaactgcccccatgatccaattaactccacctggtcccgcccttgacacatggggattatgaggattataattcaagatgagatttgggtagggacacagagccaaaccgtatgagatggggtcttgctatgttgaccagtctggtcttgaactcctaggctcaagcaatcctcctgcctcagcctcccaaaatgctggaattacagatgtgagccaccgtacctggcatccagcagatatttctactgcatttctccaggaatgagtgggttggagatgaggagattctggaacttctgtcatttcctcccaacaattctgggactcatgttcactctcctgggataggggaaactgacttaaagtgattttcaaatggcattcctgttgaaagagttaatatatgtacatgcatacaacatacacacacatttgtgtatgctacataccatggaggaaagccagtcctggtataaattgtataacttcaaaataataatggaattatgatttcattttaatactgatttcaattaaaaattttaatagactattttttagaggttttaagtttacagaaaatctaggtagacaacacagaaaattcccattaacccctgtattagtctgctaggacttccataacaaaatactacaggctgagtagcttaaacaacagaaatttgttttcccacagttctggaggctagaagaccaaggtgcccacaagtctggtttctggtgatgcctatttaccttacttgcagatggctgccttctccctgtgtcctcacatggcctttcctctgagcacctggaggcaagagagtgagctctggtgtgtattcctctacctaggagacaccagtcctattgaattagggcctcagccttacgatctcatttaaccctcattgcctccctttaggtgactaggtgtgagggtggagccctcaagagactgccttctctccatctgctgtttgtagtgggaggatacctccagagaggctgctgctcattgagctgcactcacatgaggatacagactttgtgaagaaggaattggcaacactgaaacctccagaacaaaggctgtcactaaggtatgtgctacaagcatccttggggaagaagggcatgagtaggcaggggcatttttatatctttagaggataggcaaagggaagaccaaaatttcagaggtctagcacaagaagtaaaatttttttttaaatctttgcatttcctcagagcccacaaacatgcatgtgtcttagtggctgcccatgctctggctgaggagagcaaaccgtgccatattctctgcaggcctttaggagagagtgaaaactcctacaagagtgggaaggtagataagagaagatcctttataataccaggcatctgggaagatctgtccttgtgctgggtacagggcttctatcaggtaactgaaggacacctgggtgctgttcttaaggaaagaagccagcgagcaaactttcatatgactaaagaagttgctggtgggtgcctgtagtcccagctactcaagagcctggggcagaaggattgcttgcgcccagaagtcagggctttgtgtgagatcacacctgcgtataactactgtactccagcttgggcaacatagtgagaccctgtctctaaaaaaataaataaattgcttgcttgcttgcttgtgctttcaaatcatagaaaagtagcagagtggagaggggtgtctgaatgtaaagcaaacaaatgccttggaaaaatatgtctggattgaaattgcattgaatgtatatatcaatttgagaagaattgtcaagttttataatttttatgtaactgaattgcatttttattagttttattcctagtaatgctagtaattttcattgctagtataattgggatcatttttctattgcatttataaagttattttttttctggtgcttaggaaagcaattaaaagaataaactgatgaatatcatgcagatatatctctaaaacaataagcaaaatacaaagggaaaaacaatatatcatttatgtaagttaaaacaatat

SEQ ID NO: 9504 - DNA, 6000 bp, Homo sapiens
ctgcctttcgccttctgccatgattgtgaggcctctccagccacatggaactatgagtccactaaacctctttttctttataaacttcccagtctcaggtatctctttatcatcagtgtgcaaacagaataatacaacccccttgctaagctgtctggtgacagactgctgaccccctggacaaaactgagtcctggggttttgagggaaggagttctcaggtttttcctctctgcccagagcaggagctccaagggtaggacctaggtcccctcttcctctatcccctggagcaggagctctctcacatacttcattctccatgcctcagtttcccctctgtggcagctgcaaaggggcatcacttggatccacctctagaaagagcttgccactcaactgtgaggagggcaatgagttggagcctctagccacattgccttcaggctcttgtcaataggtctatgactgggcctgtcaatgctcttcccagacagccccagacattgacaaagcacagtagggttactaaggcttctattccagcctttgccctggaactcgttatcaaattggcaaagactttttcagatctgcaatgcagtctgagtttctctctgcccaatcctactttctcctcttttgtctctcacaggtccccctgccatccaataaacattcacactcctaactccaccttagcatttgctcactagaggacctgaactgacacacctatagttagcaccacccttccccgcaacagagctctaagccccagcctccaggaccaggaatagccatttcagaacttgtccttgagcttcatttccaaatctgttatgtcaggatgattctttctccatcacctgctctcccgtgaacttggttttcttcctagatgcaggtgtagcaccaacagaagatcccccacaatcccacacccaagcagtgctaggcttccctgcagaggacagcccatgtctaagacacagtcacgtccccaatccccagatgagtgcgggtgttgagacgtgaaggatgaatgaatgatattcactgcatgctgttatggaagggaggaagggaatatttcttctttaaatgcctgcccaggcctctcctgccctccaccaaattacagcctggagttaaggtgcatcttctcacaggaagaactggccccaaaagaaggtgcaccctggggaggtggtgatcactccatgttgccagagctaccagccccgctctatggataaagaccaaaagtgtaggtcccttcaactcagaagcccggagaaagcaaatgttgcctgcatccagacagcaacgtgggtggctctggcaggggaatcctagagcagtgactcccccagccaggtggtttcctcaccatctcctagcctggcctccagcgtacaggtcaaggccactctgtggcccccccagcccccttcccactccaccacagaacctcaccaccatggagcccctgagctggaagccttgaaggcagtgagtgcacgattctgagaggaggcgagggcggcacacagcgcatggatgagacaggcaggaagccaggcaggctcagaatgagtaactgcagattctctttgtgccatgcctgttgtcacgggggatggcaagtgactccacttctctctctttcccgccacctcccgtgtccttggcacccatgtgattctgacatccagaagggatatgagatggtgctagagactagggacaggttttagggatcccagaggggagacttcagaacagacccccccagggaggaatccatgcaagaaggacatgggggaacagagagtaggaggcgactatggctctcctcctcaagcctggactgggaaggcaaggcagactccagaggggcttaggctttggacagggtggggagattgggaccacaggcttcccactccctcaggtagtccgtcggccccccctctgcttctgacatccctcttcctccaagaagccttcccagatcaactgggtgcacaaaaggatggcttcctcagcagattctacaggactccccaagagtgggcccacggttgacccccttccccccagtgcttcagaacacaggacaggacattcgggagcaattagttgaaacacagtcacatttaatgttggttgaattttttaggtttttgtttggttttgctattttctttctgctcttttcatttctgaatatgttttgtgccctttgataggtaaggaagggtggatcccccaggagaacaattctgaaagaacaaagaagtgatgtttattccgaagaatctgcaaggaaacaattatttctgattcacctactcccttccggggagcaaggcctgcaaaggcatcagatgccttcccagccactcactgcctccaacctggccatccagccctccaacagaggagaggaagggtagtgtgggcccccctccagagccaggggaaggcaacccatccccactggtagccagtccctctccctccctccccaccctgcccaccagccattcactggtgggtcacatggcaaagtgaggtctgcctctccaatcctcacacccatcatataccctcaagtgtccaagaaccttgtcctccaggagagcaggagaacttcaacaaccctgggggcatgacacattaatgataggatttcagcatcctgcagctggctaggtgctgtgtgtgtatgtatgtgttgaggagtgagggctgaggattcatgacaccccaaacccacaggtttgctcttcacatctagggctcctaggacaccatgccagcacaagtaacttcccaggaaaaagacacaattccactgtcctgccagggaactgagacccgagacggggtacacagggtcataaggagagacaaagacccctgatttctgagctaacagcagccgtcaggggtgtggatagctgaggagatggctgaggatgattcaaacactcccgccattgggagatcgagtacaaacccaagaaaggctaggacagaggcatctccacagctcccaaatctaaggaaaggcctgtgtccagcctcactgattatatcgggaaggaggtagaaattgcagggagtacagtagctccccaagttcccctcatggcaaggggatgctgcccatccacctctgtgcccccagtgcacagcacagggcctggcacacagaaagagattaataaatgtgcatggaagaaaggagggaggggctccatggtggcgaggttccctttaatgaagggaaggaggagagggaggaaagggaaaaagagcaagtgcaggggatggaatgctggaagggaggaagaaagaagagaaagaagagagagtggaaagaaagtgtaagtacgccctgaagaaagggccagggcactcatcccttcccggctttcccccactcccctcaagcccaccccatggcagcatcccaacgttccctctctgtagggagggaagccctggtgggtcctcagggagctcctgcgcgcctgctgttcagccaaagcctagcgcgggacctccttcaggtagccgcacattctgctcagggctctgggacccgctgccctctccgcctctccactgaactccgcctctccttctgtcacacggctccgccagccactctatcctgccgccgcgaccacatctccagcctcgattgtgcaggctcgagcccgtagaaagagggctagcagccacctgcgcttggtccacaagaagacgcgctcccagggcgcagagctggtgaccccgctccccatgccagggacgaataaacgagaaaaggggctgacccggtgtcacccagcggccgagcagccgccccttggaagctcagcaccaaaggcaggcggccagggtcctggcccctctctggaccccagtatccccagctgtaaaatagggaatgcaggaggaggacgacgtctgtggatcgttttaggtcagctgcggagtcggcctgcgggctgggagcagacctcgctccccacgcgagggcgctggcacttcagcccagcctccctggggaggtgccctggacgagacccgcgagggtgcggacacctcatcctccctggagcaggtctcccgaggcttgaagggccagggcacccaacaggtgctgagcgcgccccaccaggtcacccgggagcagggaacaccaaggaacccagagtcgggcctctttcgagccctcgcttcctctcgcctggcttcttcggcgcgaaggatgaattggggttgttgaaaattgatcaaacaacccgatctctgtcagcgcctggacacttgctgggccccagctcgcagcctgggaagataagtggcacttcctgtctcgtaatcggatttgcgcgcacgaaccctcggagacgcacaggtgggaaatggggaggctggcggggaggcctcctggaggaggtggctccgagggtagacatgaggagcgccctgggatggggctgagggtggatacagaggtgggagcttgcgaaggtcgtgagctaagcatggaaggatggaatgtgttcgggtctcgagattcccgggtgatgagcccggaggggcgaaggcctataaatgtctcacgacggaagaccaaggtgtgggattggcaaagagagagcagagcttcctcactggcaggggctccccagccccgccccatacctgcgcggcggccccgcctccacccatccattggctagatccgccgcccgtcagacgagcccccggggcccgcccccagccctgagctgcgcctcttagctctggggccacagcgccagcgccactctgccaggctcccggccatcgcccgcctggtgcgccgcccgccagctctttgcccgcgcggggccgcccgccgcgggctcagggcagaccatgcgcccgccaagtccgctgcccgcccgctggctatgcgtgctggcaggcgccctcgcctgggcccttgggccggcggtgagtgttcgcccggccgcccagagtcccggcagcctgggggttgcggagggcgggggaggtgggggatggcgggagccgggccgtctgtgcgcgtgtctgtgtaagaggaataggggacatcaagcatctcgactcgcctcctcccaccgctccagaccgaacctagacgcgagggctgggatattggtcgtgcccagtccctcccagcgcagcccggagcaggcacagcatcagtggaggggcagcggggaagagtgggccccagacttgccttccttgtcgtggttgtgggtgcgcagcggggtggggcggccagtgggtgcagagtcaggtactgcggccgattgagatggaaggtttggtacaccgtaggtgagagggaggatgtgaggggccgttcttgtgtgctgtgaccgtctggaggtgcctgtgggctgtcagcatcagaaccagtgctgggggccccaggacttgagaaggggttcttgggatcaggtgagtgacaggcacatccctccgtgtgccctcccactgagcaaagcaaaaaggtaccagaccccaaggtggaagctggtgggcagtgaggggctaagggtggtggttaacaggaggggccaggcctgtacatggagagagctgagcagggagccaatgccaacaagcagtggcctccctcttcctcccacttctgcttcctctcaacgtgggtatgtgtatgcccttgatacatgtgtactcgtgtgccccatgtgtgggtgtgatatgtgttcctgtggatggcttacctgggctgggaggcagatgctgattgaggcaggagatgcatggatcatctcactctagaacaggggagacctcagcactcattgagtctactgaagcccattttacagatgggcaaagcgaggtccagagacacaagagccacatctgtctcccaccagttagacctagacaaaggttgattttctc

SEQ ID NO: 9505 - DNA, 6000 bp, Homo sapiens
ggcgcacccagtcctcccggcttctccccacccacagccgtcccagccaatcagaggccagcggccgcaaaaggacgcgtgcgtgtgcgcggcgggtggggcagtgcagagcgggtcctggattggctgggccggtgagtgctggcccactaccccggctctagcgtactggcggagacagacgtgagagctcggcgcctggggttcgcgcccgggcacttgaggggctttggctcctggcccaaggactcctcagatttctcctgcccttttcccctcgggcagcggaggcgagcaccgcgaacgccgtgtcccgagcgccgccgcctgcggacgcctcacgggccgggaagggatgcgggtgaggggtttcggctgcgggtgaggttgtgttccccgacccacccgggtccgactgcttgttctcgccgttcagtaacgagatgcagacagactgggaaagaacggagtttatttctgcaacaggttacagggagaaggtcggagtaactcaccagaccaactcaaaattattaatacaagtttttctagtgcttaaatacattcagtgcatttacaagtcgaaagccaaagtgtttcactcaagccaatctttaacggtaatagggtcaggtgtctagacaattgcttcagagccttggaaataatctaaagtgggtcctggtacaaggtgtgcaagaacaactccattattttaattaaactctaggggttgaaaaagctcaggcgggatcctaatggacttgtctttacattctagcctttctcctaaggcaccagtttctccaatgtttaacttatacatgcatcagaatgacagtgaggcgttggtgagagctgctctggttgctaatggagatctggcctgccacagtgggagcagagcttgcccagtgcgccgggacgactgcgggctccatccattccgctcccagggcggttgtcggccaggaccgtgagctgtcaggtcccccgcgggatccttcctggagcttacactatagtaggaggcagccagtacttgcaagcacggggtcgcgggaactacgacctcacccaggccaggcgacctttctctcaagaaggagatgtcagaggcccctcgtgacagcgagcttccggggacagggctcctaatgtgtttgtcaagtaaataatgagtaataatccggccaattggtgggtcaacgaaaaaagtcaaactctaagatatttgaagagatttattctgaaccaaatgtgagtgaccgtggcccctgacacagccctcaggaggtcctgagaacatgtgcccaaggtggtccaggcacacttggttttatacattttagagaggcatgagacatcaatcaaatacatttaagaaatacattggtttggtccagaaacgggggacaactcaaaggcgagaggggagggggcttccaggctataggtaaatttaaacattttctggttgataattggttgagtttgtctgaagacctgggatcaacagaaagggaatgttcaagttaagataaaagattgtggagaccaaggttcttttgaagtcttgtagtggctgcctttagagacaatagatgacaaatgtttcctattcagatgtttgaaaggtgctagacttttaatctctttaggattggggggcctggaagaaaaagatctagctatgttatagggattctttacagatgagaatttttccccgcaaaggacagctttgtatggccatttcaagatatggcaaagaaatatgttttggggtaaaatatttttattttcttccttgtcttataatgttatgccagagtcaagttggaaagtaagtcacgatatatagagttaaataaaacccatttgatgataacttattatttgtggggcatgactccccagaccccttagataggaatttgggcatgataaaaaaaatcagagcttagtcctcagatgcaaagcatctacaactgcaccatggagaaatctgtgattaagttagagtttcttgatataaccacaaaacaaggcagactaccaagtgctcgtcatacagataggaactaaatgtcatgggctcaggattttgaaaatcgttcatctcataattaagatacatgtaagaaacatttcatgctatggatgattaagaacttcatacttcgctgggcacggtggctcacgcctgtaatccaagcactttgggaggctgaggcaggcggatcaccaggtcaggagatcgagaccatactggctaacacagtgaaaccccgtctctactaaaaatacaaaaaattagccgggtgtggtggcgtgcacctgtagtcccagctactggagagactgaggcaggagaatggcgtgaacccgggaatcggagcttgtagtgagccaagatcgcaccactgcactccagcctgggtgacagagagagattctgtcaaaaaaaaaaaaaaaaaaaaaagagagaacttcatactttgattatatggtagctttcagctccttgaaggcacatattttgtctggatgatcctggtatctccttgaatgctgcctgtgtgctcaatagaaattcaataatggtaaatgaagaaagatgtaaatgctgcaataactggagggtttaaaagataagtagggatagtcaggaactataggataaaccccactgccttcaatatgaaggtcaaccggaagtcattagtctcttgattctgtaaacacaaaggctaatggcagcagtgaccaaagcatattcatttctgaaggcaatgtatatgcctcaaactaacatcagctaacttgttaatttccagagaataagatatactgccccatcagcggagagcaactagttggcaacatactagccgtgaccttggatttgatttctcaaagtgtcacttttttcacttgtaaaatggggggtaacatgaatgatggttaaagaggaaatatatgtagcatgttagccccatgcttggcatgaaaaatgttagctattgctttaaaaattccttgctgtgtactgtgcaaaaagagtcagaccttgcccttgaagctgtaagtataagcaccttttaaaccaattactattagggctcccaatccagaccccaagagagggttcttggatctcctgcaagaagtaattctagacgaatccatagagtacagtgaaggcaagcttattagaaaagtaaaggaataaaagaatggctactctataggcagaatacccccaagggctgctggttgcctatttttatggttatttcttgattgtatgctaaacaaagggtggattattcatgcctcccctttttagaccatatagggtaacttcctgatgttgccatggcatttgtaaaatgtcatggtgctggtgggagtgtagcagtgaggatgaccagaggtcactctcgtcgccatgttggttttggtgggttttagctggcttctttactgcaacctgttttatcagcaaggtctttatgacctgtaccttgtgccaatctcccatgtcatcctatgacttagaatgcctaacctcctatctcatcctgtgacttagaatgcctaactgtctgggaatgtagcccagtaggtctcagccttatcttacctagcccctattcaagatggagttgctctggttcaatcatctctgatgattgattggtataaaggtcaaatagctagtaagtaatagaggtagaggactgtaaactaggaattttgattccgctatattttaggaatatagtatcgctcaacagcaagtaatttttaagacatagaaaggaaatacatttttatatataagctggactctattcataatattaaaaaataaggatttagacaaattataggatgacagatccacatagataatttaaggaagttagatatgcactctatggctacaactgtgtggaagatgcacatttgtcccccaaaatctctttattgaggctactggtatacactacttggtagaattgtcattagtctgacccagtttgaatgacggttgaatttaggagaaaaaagtcccatctttcgacaaaagtgtaccagccctgtcagtttaagggagaaaacataaacagaggcagtgtaggggtggaaaggggatgatccctttctttcccatcataagcgttacagctaacactcctataacaaaagacaggttaacaagagaaaattactagcctggacaacatggcaaaaccccgtctctacagaaaatacaaaaatttgctgggtgtgatggtgtgcctctgtagtcccagctactcaggaggctgaggtgagcagatcacttgagcctgggaggtcaaggctgcagtgagccaagattgtgccactgcactcagcctaggccatagagtgagaccctgtctcaaaaaagaaaagataaaaacaaaacaaaaacaagagaaaaacattataaatgtactgtatttgatcaaggtttgttttgtttgtttgtttttgagacagagtcttgctctgtcgccaggctggagtggagtagcgtgatcttgtctcactacaacctccgccttccgggttcaagcaattctcctgcctcagcctctcaagtacctgggactacaggtgtgtgccaccacacctggctaatttgttgtattttagtagagatggggtttcaccacgttggccaggatggtcttgatctcctgacctcatgatctgccttcctcagcctcctattgatcaaagttttacatgatgcaggagccttcagagtgaagacccaaagatacaggtgactctgtctcattatatgcttaggtttgatgaaacagggacagtcgtgtagaaatgtgattggacaacaaaggatatgagctaatggtaatagaaaacctagcaagacctgtctgttcagattcttgaactttctttcgattgtagcatttctcctttcaggatacagtacgggatcctttctggaatggaggtcttatgagctgctattgaacacggcaggtgagagaatttctttatggccaattcttagacaaaaagtaggggaagcggttgggcacagtggctcacgcctgtaatcctagcactttgggaggccaaggcgggtggatcacgagctcaggagtttgagaccagcctgaccaacatggtgataccccatctctactaaaaatacaaaaattagccaggcgtggtggcgtgcacctgtaatctcagctactcaggaggctaaggcaggagaattgtgtgaacctgggaggcagaggttgcagtgacccgagatcgcgccactgtactccagcctgggcaacaaagctagactccgtctcaaaaaaaaaaaaaaagttggggaagcttagaggttctggtttctgtaatcagccttggggaagaggaattctattttctatgacttgcttcaggagagaatgagggtatgacagatagacaggagggtaagacaggttggttagaaactttgcttctgaggctgcttctgaggccttcactttggggtatcattttctgagccccaacagcaggaaagaataaataataggaaattagaaaacagtattgacatagatatttcctgaattctaaagtgattcattgtttaaaaaataacattttattggaattaattgcagaatatctttcagtctgttggtaatgcgattaagttgcagaatatctttcaatctgttggtaatgtgattggaatgatgagttaggagtcaactaaccatttcaaacaaattaactttttgttgaaattgtttaaaaagactgggtgtattgataaactgatgtgggatatgataagatttctcttcaaataatctgatcaatcttttattctttaattcatagtacccccccccaatttttctcctttttcgccttttttcctctttgcctttgttaaatgcccaggcacgccacaatacc

SEQ ID NO: 9506 - DNA, 6000 bp, Homo sapiens
aaaaatgactactttctcctcattcctgtcctttaagggttttgattactaactgcgacacacgaagaatgtgtaaaaatacttttaagggaccttgcccttaaaagtatctacaggtattctagaaaaccagtatagctaaagcctgccctggcttgagtgctactggggaaggaagagctcagcctcacacccttcacccccttgcagaagggagtgagtctgccacaggccagctgccctggcttgcatcataatgtgagctatctaaggctagagccgaggtagaaatattagctgctgaatagcaggttggtctggacctgtacaatccactagggtggccactggccatgttggctgtttacatttccatttaagctaattccaattaaataacgattttaaaaagatcacactaaccacagtgtcatgttcactagctatatgtggccacacactggacagatagctatagaatatttccacattgcagaaagtgctattagatggctctattctagatcctcaagacttatatcaggtgaattttttgcattaatttagtcagaagatgtttaatattctcctagaatgtgctgctgggcttcaaccatggccagtatccacatagtccctttcctcatggattagtggggaaaaaagggtccttgcagactttattccttggaaatttggacctaggactctttttacctgcactgatcataatgtcaccaccaactactaactgcctccagacactttggctttccaagtcaagataaggcgttaatcaatgaaaagtagaaagacagcattgtcctcttccaaagaccccaatatgcttttgaaatatgactttcccagtatgtacaggaggctaaggaaggaggagaacaagattacaaatctatagtagttttcaatttggggaacctaaaaagtagaggactgaagtaaaattaattttttctgtgccagagactgtgctagatacttggtatattggaatgaacaagaggtaaccgacttgatcatatattgtaatgaacagactcagcactcctgttggcccctgcaacaaagtcagcttgggtcttttctctgttacaggtatcagcgttgtggattgctgtttctagtccacagttattcctgaaatgctcttcagttgccaggtacagcacttggtccataacccaaaggggatactattattattattattattattattattattattattaacatttttttaaaaatttcttttcatagaatgcatttttgtattagagattcctctagtgggaaaataacagtttattacttatagttctatatttgtggacagatcgttttagaacaagtaaaacacatttgagaatgaagtctcagtttagaatttgtaatattttgatacttctacaagggggaccttgcccttaaacagaactttgctatactcagaagcattccaagcttttcttcctaggatttagaaattcataatgtgagatatcagcatttcctaattttcaacttcccctagaatatgtaaccatcagtagctggtgtctactgaatagagagggaagtttttgaaaattaaacacggtctcattttctgcaaagtttttattcatgaattaacagtatttctctttgcccattattcccaaggcaagtacagaagaaatttgatcatgtagtaatagtaataaagctggattctctttaagagattgataaattcaaaggcaaaagctcatatatcatgttgagttatatgtgagtcttataagaagctgggaggcaaccccgttaactcaccagaatacagacctcagtctcacaatttcttggacataattcttctcaaaccttttcctcaaagcttaaattctgaaaatagtctggtgattaagagaagatggctgtccaccaatggatttatctgttatttcttccttattgtgagttgaatggcgtgacaaagtgaaggcaaagaggcatgcattaattcttcaaagtataagtcaaaaaggtcagcgcttctacaatgtggcagtatctttgcagatgcccacatcatgatagttgaaagagcaaagcccagaaaaggctaaagctgaaagtgccaaaaggcctgccttggcagctttctgcaatgcatccccatgaacacagtcaggaacaacttgtccaaggccccaagaccatgaagagtgagagttgcagccacggagtaggccatcacagagcaaggattcagttaagcagctagaagcaggcccaggagcaaaacactgacaatcctctcactagtccagtggacagatgcagccttggaaccagaaaggtggctcagtgacaaatgaatgtgctgcactccacgccattctggggtaggttgggtcctgaagaaatcctgagatctgagcaggtctgacaactggggctcgcaggaacagagctcagcctccttgggcaccacagagggcactcagcctctagagaacctccatctcttccctcagagtatgcttatagtgccctgtcctccagaactcacctttggcagggtgagaatgcaagagagaaatagcccttagaaaaggggaccagcaaccttttatagtcacccagctctgaattctagttgcaaagaaagaaacacagcaaagaaaacaagaggatagggcttttttcaggaatggacctaaactagattgcagcaaagggagtcacatttgcacaagctcctttgagaaagcggaagttctctctatgacttccttgcgtcttcccttctccccagcctcatgatcctctctgcatcccaggagagggcatgtgagtgctctagagcagctcttccagacctggatggaagaacctacctaagcttccccacctcacctggaccacggggacccgtgcagaggagggaatcttcccacaccggtgcatttaccccttctcctcttccctgacggccagcctcaccttccttcctcccccgagactcactccaacgtctaggggcaagcagtgtctaccttgtatgctcttacctgatgaggaaacagcctgagtcaagagaagggagaagcacaggcttttcctcacccatggcaattgcaatagtgcgtgtctcacctcgctgcaagctttccaaggacgcaatcaaacacgggggagaaacaaattcagccaagaaagtcaagtaagggaacatcttcttccctctagcaccagttccttttgtgtctttatttgccaagtgagagggaggagtgagatgccagagcatctggctggttctcagctatgtatagtttcagacaccatttatttgcaatgagcgcccgccgagggaagggaatttcacggctccctcgcaccgccgttccttaaggctgatgaatcagacacctctttcgttcttactgtgcatgccctctacctttcagatgacctatttgttggcctttttccatttagacaataaacccaagtgcaccttctgcatccctttgctctacgggaactgagggtgatgaaggggacatgcgcctgggagtaccacgccatgacagagcggcattgagtcctcgggacaatcaatacaccaagaggtggaaattaacatccacaagagtgtagtcatgattttcccccagaacaaatatataaaagggatctttgtcataacaatgacaggaaatcattaatcacatcaggattgaagtccccactgtagcagtggatgggaagacttcgtctgtgatcttcattaaaaatgcaatattttgtatatttagcttttttcaaagttttaccaaaacacctgtaattaatacaatttattgtattatctttgttaatgtatctgatgtgcaaaaccttactagatttgccccaatttgaaggtgtctgtggctttccagcactccatgtgttcctagctacatctcacaggcagactttctaaagcagtgcctttcaatagcactgttggcgacgatggacaggttctgtatctgcattgtccattgggatagccactagctgcatgtggctattgagcacttgaaatgtacctggcatgactgagaaactagttaacacttaaaacatttttcttttttgatacagggtctcagtctgttgcccagggtggagtgcagtggtgcaatcttggctcactacaacctctgcctcctgatccttccacctcagcttccctgagtatctgggactacaggcatgggccaccatgcctgcctaattgtttttgtgtgttttgtagagatgaggtttcaccatgttgtccaggctgttcttgaactcctaggctctgcctagtgatctgcccgcctcagtctctcagagtgctgggactacagaggtgagccactgcactggccctagttagcattttaattaatttgaatttaaataggcacatctgcctagtagctactgtgttggatagcacagccctccgggttctggtacgtctgtcaaggccagaaaaggtatgttgcgatggatagtgctacatctgccactgggtggtaatctgatacaggcctgctcaggtgacaccacctaaagaaatctcatcagtgtgcacctctggcaagcctgacaaggctgacttctctcgatgggatcctccaatttccccattccctgtaagcagctgtgctgtctaggaagagaatttgctcttagatcatcagtctgtatgtgcgtcttcagatgagacagtttccccttatcccagcagttttcagctttttgtttctggttgcaaatgattgactccgctgattgctggaagctacacaggtgactccccaccctcttgggctaccccaccagtgacaacacaggcaggggtggcctggcttcctttctcgtgttgttatcgggtagctgcctgctcagaacccacaaagcctgcccctcatcccaggcagagagcaacccagctctttccccagacactgagagctggtggtgcctgctgtcccagggagagttgcatcgccctccacagtgagtattgctcttcttcttgttgcccccaacccagtgtcatcttggccctcagttgtgtgctgctatgatggcttctaaaacctgggcttgcactcatttgttcagaggtcatgggcaccaggcacttttctagaaacttccaggaaggtaaatgggaattggtgatgcccaacccaggtttcttgtagggcgagtaataaaactccctcccccttcacatacatgaagcttaggcttaaggcagtctgtgatttataccttaaaggaaggagaagcaggtgctgggggacaagatggtggccaggggtaaaggacacacccatgaggtccttgagtctgagacactgccccatggaaaggattctttgtagcagtgaaaaactggaaacaaggaaactatgcatcaggaggcgaatggttaaatgaattgtgatgtatctagacaatggaatacacagcagccatccaattctatgatacggttctatgttgaattggcatggaaggtgatccatgaaagatgggcaattagaaagcaagatagaagattatatgtgtagtctgatttcctttctattaagtgcgtgtgtgtctgtgtgtgtgtgtgtgtgtgtgtgaggttgtgttacagagaaaaagtcagaaaggaagtatctcagaaacttaacaatggctaaactaggaaagggtgcttcaggagtttttattttctatattatgtatgttggcattttggggattttttgtgcattgtaaaaatactcctttatgatcagagtaaagcaaaaagttattttaaatgactcatcagtggatgctggtttgccttttcaaacacacctaccctctttagttctgaattagctgttactccatagacggctggcaagtccatccagagagtggtcactgtgtgctgaaccg

SEQ ID NO: 9507 - DNA, 6000 bp, Homo sapiens
cttggggttttttgttgttgttgtttgtttttgagatggagttttgctctgttgccaggctggagtgccatggcacgatcttggcttactgcaacatccgactccctggttcaagcgattttcctgcctcagcctcccgaatagctgggattacaggcacataccaccacacccagctaatttttgtatttttagtagatacggggtttcaccatgttggccaggatggtctcaaactcctgaccacatgattggcccacctcggcctcccaaagtgctgggattacaggcgtgagccactgaggccagcctcgaggctcttgttttgaccatatgtatacacacatgcaaactaggtagccgtgcaaaatgtatttcttaccatgagatgttgtaggaaatgttcaagcaactcagaggatgtcaagggatgtaagagcttgagaaaggacagcaaccaaagcatgaccactagagggcaccccacctcctactacagctgcttcctttccttgctattgaggcagcctcagcaaagataccagatactcactgcccacgcggctttcctcctccccttgctctggtcatggcagcctactgctagcttggctgatggcatgccaccctttccttccgagtttctgtctgcagcctgtggtcagttgagtgaatatctcttgagcacatgttctagtccgtcaacttgtctgtccctttgtgggtgccatcctggcattcctgggcagcctgctgtgcacacagcccatgcccagtgaatatctacattatttgtctcagggtaaggttttcttctgtcccaaatgctcccaaaggaggacatacccaaggctccacattagaagcgagtcagaataaagtggtgagcacaaatcaggcagcccctggcactgtagtcctggagtccacacctctctgagtcatggtggagccccttcagcttggtgtctacaaatgggagtctatagtccttccctgtcacgactcaaatggcctcagcctgtttgttatgtaattactgcacaactttaatcctgcagactgcctgcagtacagatctgcttgtttagaaactagctgagggaggaacagatgcctggaaaatccctatggcccaaggtgccttgctgccaatcttccccagagggtgccatctcccctcagcctcgctaagccccgcagagtgagaagtgttgttttcctgattacacaggctcccatcgtccctctggtcagcctccatttgtgaacagtctcctgtgaaatggagatgtcttcagtttagaactgcactcttcaatacagtagccactagccatatgtggctatataaacttaaattcatcagataaatttaactaaaaatgtggctgcctggtggcattagccacatttcaagtgctcaattcaagtggcactagccacctggactggtggccactgtgttgggcagtgcaggtacagcacaggtctctcacagcagaaggctccactgaccagtgcaggtttggaaggttgggctgaaccacaccacacacatcatattcactctgtgatctgggggcatctttaaattttgctatcaaattattattattgtattaacttgattttactttgctaatccattgcttataaattcctagtgttagagtaggtagctaggcagacatgagcagggcaggagagggcccccctcccccaggaatgtcaggtgaccatcaagtaatggtcaggcaattgttaagctgtctctctaaaataactggttgcagccagagccagagaaagagtctcccaatagatagaaaacatctgaagctggtaatcagcagcttcctgacaagatctcaggagttgggcgagtgggctcaagcacgcacactaagaggcaaaatggcagtttaaccggtatgtgaccttcctctagaaacgactgataagggaaaaacacctcaaatgagcatgcatacacctccagtaaacagtctgagcatgcagctcctcccaagtgctggcaagccaccatgcctgcggacagcctgctccaagggaagagtcgggggagaagaaacataaaccctggaaccatgccaatgtataaaacctcaagtcaagggccggatggggcacttggatctctcaggtcacctgcttggctctcttccaagtatactttacttccatttgttcctgctctaaaactttttaataaaccttcactcctgctctaaaacttgcctcagtctctccctctgccttaagcctacttctgcccctcggccaaattctttcctccaaggaggcaagacttgagttgctgcagacccatatggatttgctgctgctaacatactttggtgccacatgactcagacacattccctagtggtaagacactcctacaactcaccttcttccgctggaggtagtcaacccctgtacgcggtttccttctcctgctctcctgcttatagaacaattgttcctccagaacaattcctctcagccatagtggctctgctcccaccagatgatctctcagctcatcctggtgacttgcaggggtacaggtctgccggctatgttgcccaggctggcctcaaactcctggcttcaatgatcctctcatcttagcctcttgagtactgggactataagtgcccactgccacgcctggctggttaggctacttttctgtggatcacagcccatcatccaccaatgccttgccaacaactgtaaatgtctcatccctgaatcctggaactgataacagctctgccaggtcttcaggtaaggagagcaggccaacagtctgacttccaagataaatctgcagcaggtatgtctgccacttcctttttactcttccctcaattttatttagaaaatgtttaggtatttctggggaaatctaagacatatatgattgggttcccacccttaggaagttcaaagttttgtttcaaataaaagtaatgcccttaaaacaattaacactataaattggcagatagtaaacggcattttgtaaagtgattaaaataaaattttagccccaaacctgcaagtggctcagctcctcaaatttaggtgaaagtcttttgtactatagagaagtttctattaaagaatggccacgataaacaagccatgctttctcaaatacacatatccccatattgacatgtacacacagtcatggagggccccaggtgctggcttgtttttccccatggagtagaaaggcttgctgagaaaagcatggccaagggtgcttgacaaggctcaggccattctaacactgccctatggacctgtcttgaatggcatggttggttgtccctgggtaaaactcagctctcaaagcttaaagattcctaaatgtcaggcagggttacattaaattgccaccctgccttgaaagttctctttcaggaagacaggtgcatatttggctcagtctgttcctttattcatttgtccaccattccctacatccatctgtccatcggtatgtagtctatgcggcctcatggttcatgcccataaggaacacctcactcatttgtaccagtttggtagaaaggacagtctgaacgaattcattcaaaaaggcctgcaaacctactagaggtcttcagatcttttatcagggccccctggcacagctccatactcagagcagggcaggaagcactggctttgcagcctgacagtcctgggtgactgccagggatgtgtgttcttgggcaagtgggctaatctctctaatcttctgtttgcctatctgtacgtgactaggattagatggctgtacatagaagcatccagcatagggccaggcttgcggtagaaatgagtgttagtctctggatcctgaggctgctcctggtccctgctcccaatgcttgacatttgcccttaggaagagccacatgagaaggtttgcctagcaggtgggagagagcaacagcattggagagaagcagcctgaatgggagtgcagagccagagaaggcaggccaggcacctccacaagaaggcagctgcttctgggaaagcagacatcgagtccatgcctctccctagtaccctctccactacaaggcactggggcatgtgacccaggctgacatgcctccaattcctgccttccagcgttatttcccagaagggtcagtaatgttagatcatggagactgacaactagaactgtactgagatcaaagtagtcaacatctggggaattccaggagtacagagggcagcccaaggaaaccagatgattccagccagcctacgcagggtgggtgggcactgcctgctgagtgcctgagtggtgtgggcttaggaggtggggctgcaccaggccctctggcagacccatcatcatgctgttgattggtctggtaatgacagatacctgagtgtgtatcttcgattttccagtttctagctgtgtgcaccagggcttgttattttggctatggtcctcagtgttctcatctataaaggcaggataatatccactgcagggctgctatggggcttaacagctatcacatatgctggagctgcatatgcacgcagaacccagcccataccatggactcagcattggcccagaccctaactgttccaaaaagatgtctgactagtgaattaagtaattttaaggtacaaatgccaccatcttcggtggatggccagagccaaacctccttattgttcccctttagtttacgaataaagctcgtcaggccctgacagaagaatcagccccaaagcagaatgaagggagtgtggggtatcagtcacccatccatctctgacccacgcgttacacaggggcgggttggtcatatggattctgatctgaaggacgggagtagggggtgggtctcttatagtaaccagctgagggctcttaaaaaatgttcagcggaaacatgaaccacatcacagaagtagaggcagaccttgcttcatgagcaagctcatctctggaacaaactggcaaagcatctctgctggtgagtcatttgttttactctttatattgaaaagaagacagggaggactaaccccaggtattgttggtattctcagattcctgtctgtagtagggtacagtgcaaaatgccaggctatggagctcagctgctcttcgttcaaattccatcactgccatttgctgctgtgtgggttaaactggagaaacatgaaaactactgaacatgtttccaggcacacagttagtgcttgcaggctgatggtactgctagtaatggcatagtcagacccacccagggagataaggagaatctagttattgtctatatttgctcaatgaataatctctgttttcatttcttttgcataagacaggctgttttatcagattatcatttatgttcttttttcaatataaatcaacatactactgtagaaactttgaaaactattttaaaaaaaggaagaaataagtcacccataattccaccagctggaggccaactgttaataaaatgtgatcattttttccaggtttctaaaagtacggtcagttaaaatcacatagtttatcatgaactcttatgtgagggcccacagaatacatggcagaaggattcaaggggttcatggactcccagaattgtaggggtgtttgtgtgtgtgcgtgtgtgtctgtgtgtgtgtgtgtgtgtgtatatatatatacattatttctgagaaaaggtctgcagtttttaggagattctcaaaggagtttatggtcaaaaaaggttaagaatcacaattttatatccttttgacatctatttgttgtaatagtaatagttaatacttattttgcatatttactttgtgtttacactgttcttagcaatttaactgtattgcattttccaaaatcagtaaaaatacttcctaaacatttaagtatattctattttatgtatgaattgtaat

SEQ ID NO: 9508 - DNA, 6000 bp, Homo sapiens
tgatatactgatttcctttcctttgtaaaaatacccaataatgggattgctggattgtaccttagttccatttttagctttttgatagatctccagttgtttttgttgagttgcttgaggtccttgtacatattctggatattagtacttgggtgaatggtttgcatagatttctcccattctacagattgtctcttcactccgttggttgtttcctttgctgtgcagaagctttttagtttaatactgtcccatttgtctatttttgtttttgttgcctgtgcatttgaagtgttagccacaagagctttgcctagattaatgtcttgaagcattttccctatgttttcatgtagtagttttatagttttaggttttatgtttacatttttaatccattataagtatatttttgtgaaagataggggtccagtttcattctgcatgtggctattcagttttcccagcagcatgtattgaagagggtgtcctttcctcaatgtatgtttttggcacctttgttgaaaataagttggctgtaactgtgtgaattatttctgggctctctattccattccattggtttatgtgtctgttttaataccaacgccatgctgtttgggttacaatgtaagctgctacattttaagatcatttgttatgaagctacagtaaccagaacactgtttttcataatccaggtgcctgattttgatcttcttaccaccttcaagtttgagagaataatttctacacatttgaaagaaatcaagatctgcttacatttcctagttggttaaacacatagtttcagatcttttctctatttcaattacatattcctgagaaccaaactgctttacttgaaagttgctccaatgttctgacagattgatacttttagttctttaaacaaataatgagctgctttgaattataatgcgttgtataataaactgccttattttcagagtggctatacaatttttctttcccactagctctgtatgagagttttagtgttctgtattcttgtcagcacttgatattgtcaatttaaaaaaaaaagttagtcattctagtaagtatgtagttgtatctcattgcaattttaatttacattttcctaatgactaacaatgttgacagtcttgtgtgcttatttgccatctatactttttttttatggaatatctattcagatcttttttattgggctggtttctcaatgtcgagtgcagtgcatttactagggaaacttaacaaagtgttgcagcagttctcatgacagtgagaaaaagagatgttttacctaggtatgtccaccacaaggggatcagggtatggagtttatatgaggatttacggaatttggctcagggctggggataacttctcttagtgctttagcaataacctgaatacctttattagtgcgtggaagtgttcaagtccctagcttgagttcaagccacaggagacaacacaaaacttgccaagtcacagcgtagtcaaggcactctctatttctcaggtgagacagagaaaaaagtggggggacctgagggaccctacaatcactgatacatggaataacacaaatgaatctcaaactcattatgctgagaaaaaagctagacacaggagtagatatggcatgatgccatttatatatgatattctagaacaagcaaaactaagctagagcaacataacgcagatcagcggttgcctgggacaggggataagggagtcattgattgaaatggggcataaggtactttttgaggtgtgaaaatgtcctgtatttgattatgatggtgattcagagaggtatgcaattgttgaatttgttgacctgtacccttaaaatgggtgcaagcaaatgacacttcaatatgttgttaactgaaaaactaatgagggaaatcgtagagattattacaagaatctgccttattgcaaaatgccagaaaaaaatgctgtcccgtcctctttgtttttctccaaggtgtagaaatggaagtgactgaatttttacaatctcttgcgaattagctattaaaaatcttatgcatgtagcttctttacagaaatctccaaatgctttttaaatctttgtaaccttctaggaaatactataatttgttgatttcagatgaagaatgctttgttatagttttaactctgcagagatgtcatttggtaattgtgattatttatcaagctcctaccatgtgcttcatcttagccaaaatttccactgtagatggtgaaattagggctcaggaaggctacatgactcatctatatgagccataaatgggcgaggtgaacccggtctgtgtggtgctaaatcccaggtgccttctatttcaccactggtgagaacacagagtgctaattaaggagactggagctggaatttccactccaccatttagtcatgtgtgagcttggacaggtcacttgatctcaattcccttatccacaggttaggtgattaccagcattgctcctcattctggtctactgcgtagtcccaggtggagcagtttgcattgattaccctgtgaatggcaccccatggaggcagctctgggatgacaatctccctattaagttaaaaggtcattgtgggatttccacccagaaaatttatgtggaatactctgaaaaccctcaaacactgatctcaaataaggtagtaccagtactataactcaaaatccttcaatagctcccacatttccatggaatctactgtgaactcgtcaactctttataatctagccaaaaccagcagtcaatcttatctccctccactctttgctccatgcccactacctctgccaggcccatgcctttcctgtcttcagatgtcattgaccgcctgttggcatgtcatgtgatctagggataaaactccccagataaagtgaaaggagtggaagccagatgcaccacaatgggcctgcaaaattccaccctctgccagagacctgcaggtggctctgaatgctctgcagggctggagcttctgaatgtgtgtcaccctaacagatgtatataatgtgttacacattttaaaatgtgtatgtgtgtatatatattaatctccctggctcttggttcctggcattaggatgcaagcatatctgttccctaatttcattcctgcctacccctgcacagggaccaagctcacctcacctcttggtcttggtagctctacttcctttttcctggaaactctccctaccccttccacatggccaaattctgttcatccctcgggccctttctcttccatgaagccgttcccagtcccttcagcccacatggtcctgttttctaaaccctgtagaacttgcatttgacatcccacatgctgaatcagagcacaatatattatactatatttcagaccaccctgagtggctgcctctttctcactgagagggtctgtcatgacaactatgataagtattttcatgacgctgtccacatgccacacactggcctccacgtagtcctaatttatttgctcctcacacagatcctacaagctaggcattgctacatcattttgcagtagagcacgctgaggcacacagaggttatgtagcttgcccacggtgatatccctattaagcggtaaaggtaggttttgcattcaggtgtccagcagcaaagtctgagatcttactatcagtcgaaaattttgttttagccaatttgaatatgctatattgaatatgctgtagattaaatagtgaaatgtttctttggttatgctttaactatatttgagcattcttgatattttatcaggtctctgttgtctctgatcaccaacaaggttatagactctttaaggtggaaactgagccccttcctccctttcttctctttctctcaaattctctccctattctttctctctctctctaatgcacatgtgtgtgcgctctctctctctctctgtctctcttatcctccttcctctttctttgtcttttgttcctatgttttctttatcatgaagcatacagcacagtcctacacacatatcaaacgtttgataaacactttggtgcattacactcatttgtcgagttagtcagtgtatcaaagatcacttcatgcttagtcagagttcttcccacaaatattgggtgaatacctgctctgtgcccagtgccatgctaggtcccaagggacacatcagcacatacagcaggcacatggctctgccctgtgacgctttgccctgagacatggctctgccctatgacgcttatgtcacagtggcattctacccacactttacatttccttagccctgtatattctgcagagacttttcacatatttatcttagttggttccacggcaatgctatgacttaaatatcattatttccagtttagagatgaaaaagctgaggtccagcaagtttaaattactacccccagcttatgtagctgtgtatgccacaactgaaactcaaactcaagtcttttagacttgtctaaacctttgcagccacattttgccccatccaagtgtctactggaccctgcagaataattagtttattcctttgccgggaaattcttatttcattcttcatcctgtctcccgatgagtcaaatcaatgcttattcaagaattataaatcccaggtctttaggaggccgagactcgcagatcacttgaggtcagaagtttgagaccagcctggccaacatggtgaaaccctgtctctactaaaaatacaaaaattagccaggcatggtggcatgtgcctctaataccaactattccagaggctgaggcaggaaaatcccttgaacccaggaggtggaggttgcagtgaactgagatcatgccactgtactccagcctgggtgacagaatgaaatcctgtcttaaaaaaaaaaaaaaaattataacaaccccccaccactaaaaatgagcaatgccaatgggtggagagcccctaaagcagcactaattgcaaggatttctcaggtgactggttagtatgtggtgtcaatcatgaaaaagaagaactgcacgaaagtatctttctgaaaacttgcaaaactgagaagctagtctgtttaaaacaggaagttatatacttacattgtttactactttactaatgtctgtgatctgatggtatctctgtttcaggagtggtgacgcctaagctatcactggacatatcaaggacttcactaaattagcaggtaccactggtcttcttgtgcttatccgggcaagaacttatcgaaatacaatagaagtttttacttagaagagattttcaggtaggtgtcgcttttccaggaaaagggaggtggaacaaggaggggtccaggcaggtggaagtagtaacttccagcagtgctcttggatctaggagggaggagaggaaggtacacagcaatttagaggtagtatggggccagagtgggagaaaatatggccacatatctccattttcttcttgctttttctaattttccctttctgtctcccatccacacaatgataagtttgcgtgtagcactcacccaaacttggccctttatacctctttagtcaacatctgtgcccatgttaccctcctatactttcacaaattctcaactatgtgcatatgactactccaaagagcttacacttaatagcttgtgtttatttatattgacttgtaagaaatagcaaaaatataattttacatatatatgtgtatatatatatatatacacatatatatatatatatatatacgcacacacacatacatttttatatatacaaagtcctccctcagtatctgtgagggatttgttccaggacccttgcagataccaaaattcatagatgctcaagttccttatataaaatgatgtagtatttgctgataacctacaaatatcctccagtaccctttaaatacaagtacctagattacttgtaata

SEQ ID NO: 9509 - DNA, 6000 bp, Homo sapiens
cagggaatatgctggtggggagtatgaatcttagcttctcactcccagactcggctcccaacctgctgttgccaagtcttggggacatctataaatgccttctaaatacctgtcttggcctatccccagccacagattcctccctagagcaggctacctctgaggcatctatactgagatcttaatcacagagacatttaaaacatctaggctacaaaagaattcctactatagggttcaaatgaatttctttccgtcacttgagacagctttttagcaagtacatgtattaaagattctgatttccccttttttctcctacagtttgtttggcctaaaggtatgacatctaatctgctgcatttacactctaagtcaaaattaccattttgttcttttaatttctatttctaatcatacattcttgtctactcctggttcatctggagacaaagttgaacttagaagatggaggagaaattcttatctgccctctgctagttgacacttcctttccaagaatcatttgcagttgctgggctttcttgctgtgactctatgccctgttgtgttactttttcatttgtgacaaaaacagtggtaatagtttgcttcatttttattatgaagacttgaccaggataggtaggaacataattactgctttttctgtgggcatcatattggtccagatcatgtttaaccagaattgaagatgtaaaatcctagaactcactaatctattttagtaggtcacaggaagcatgcaaaccataaaaaccgcaatgaaccaaaagcatctgtgttgacaagaggcaagaatttctctattttctaaaggcactaactgaacaaatctattgcccattacttaggaaattgctaagggcatcgttaaagtacttcaggctgttgaaaaaccttttctgtcttcttgccccaccaccaattctctctagctatgctttctctcacatgttcttgccatccatggagtggcagagaggttctgagtacaactctaactttcagtttcaatggcctaatccccaactcaactgctgaccttgagtgtaaaaataaacaagatcttaaacatcttagggccagcattctgggtcttcttttgttatttggggagcataaactattctcatatcattggcttgcagaaaaattgagcttctcctcttccttgccccatgtcaccttgaggtgaccacagccctgccttctatgtaatcctgcttggtcagcaggcacatcagagctcagtggcttgtgacatactttccttcaagcctgctcgaagggccatactcatcattgagactgggaaccttagaaaccatgaacccagtgccaatgggtagatacagaattctcaaactcatgaaaaaacatcctttttaactctctccgtgtgcataaagaattctaagatgtactgatcaagattcccaattttctaactatctattaatatatggacgaggtaagaagaaagttgcaagaaaaaaatttgtttgacttgacggttgtgtggttatttgccacactcccccagatccactctgagtcccaggatgctgattttaggggctacattgcctagactgtccattattccctcttcccatctggttcagtcactgggaagcactggtaggaggtcagagtgggagaaggaggttaggatactttctgcccctgctgtcctactgctttgctgaacttctagcagtggctgagccatcaacctgcagctctcaattccagctgtctgtagcactcaagtggtattgtttattcttttgatccttctagctgttaaggaagaaaaaaataattttttcctcaatgctcataagttcttggaatggacccctgtaacaaaagacagattaacacgagaaaagtttattaacgtacatattttatacgtacataggagctatccagggaatgaataattcttaaaaaggtgactttgaattccagctcatatagcatcttcaacaaagttcagtaacattttagagatatgacaagacaaagaaaatgaactttgagcctctagggacagtgacttgtaggaaggcaaaaggaataaatggaggtaaaggctggttagtaatacttgttaatgaagattcctctggtgccatctccaggtccacaaggatttaaatttgtcttcagtggtgaacctttgttcaccctggcagaaggtgtggaggggggtgcagatccgttttgtctttgtaagtctatatcctgcttttagacaaataaagggagggaaaagagctttccttcatctgcttcttaattgccttcagctcaacaatccttatgcaaaagaggtacattttagggtgtcaaattctggtctcccacaaagcatagggatgacagaccacctcaccatccctgttgcttcttttaagcctgctcacccctccaaaaatattttcattctatactgtctcttcaaaatctcagcggagggtgccctctgttatcctgccctctgtgtcagtataagccaaaggtttgaatcctggctctgcaactatctacctctgtgcctctccttgtttatgaaattacagggctggagacaaagatcacaatgtgaagacaaaattggagagcggtcctaatcagccagagcaaaatttctggctcttgctcttccccatcctgggttgaatcataggaacaggtggcaagatgccagggtcaggagattccagaagtggcagcaagctcagtgttaccaggtcagggatgacctgtcttattattgaaatctcagagatatgctccaattccggcccagagacacattgagagacaactggggaacttgctatgttcctgaacaggcaatgagctgtcttccaagaaaaaacctgagacccttcaagtctcaggtcttacttagcacatataccaggtcttacacaggacacatggttacaactgactgaaatctgggctgggtgtaggagctcacacctgtaatcccagcccttcaggaggctgaggcaggcagattgcctgagcccaggagttcgagaccagcccgggcaacatgacaaaaccccatctctacaaaaaatagtcaggcatggtggcatgcacctgtagtctcagctacttgggaggctgagatgagaggattgcttgaggttgagactgcagtgaagcatgatcatgccaccgcactccagcctaggcaacagagcaagatcttgtcgcaaaagaaagcaaaaacacaacataacacaacaacaacaacaacaacaacaacagcaaaaaagccaacttcttgaaatctggaaaggacacctggactgccctgagcatttgattgttgttggctctagcagtggatgcatccttcaacctctggcactctgcagggctcagactgttctgttctgtttgttacctgtggagtgcctgccagaccctgctctagctgctttaggtccatttaccctcatagacccccagtcttgttattcatatttcatatttgggaaatggaaacttagaaacttgccaagtccacagcatgagatcctgcctccggtgtctgctggattccagaaagtgccaggggccaacttagatgacaccatgttctctgcacaatcttaggaatgctcctagtctgatgtccccattgcaaaatttacattatcttttaacaaaacgtctttccaaggaggggcatttaaaataactgaggttcttcttgctaaggacgttcctgacacaagagataatttagcatttccttttcattaaaaagtttgaaatcctgtaatttgtgataatgtggatgaacctagaggatgttaagtgaaataagccacacacagatagacaaataccacgtgatctcactcttatgtggaatttttttttaaataagttgcttagccgggcatgatggcacacacctgtaatcctagctactcaggaggctgaggtgggaggatggcttgaactcagaaggtggaggtagcagtgagctgagactgtgccagtgcactccggtctgggtgacagaatgaaacccaatttaaaaaaaaaaaaaaagttgctatcttagaaaaagacagtagagcagtggttaccagagactggggaggaaagagaggaggtgagaatgggcagcagttgatcaacgggtacaaagttaccatgagataggagaaacaagtgctggtgctctgctccaagtagggtgacggtagttaataatgaattctgtatatataaatagctagaagagagggttttcaatatcattattatttcaaaagaaatgataaatgtttcagaggatggatatgtaattaccctgatttgatcattgcacaatgtatacatgtagcaaaacatcacattgtgtcccataaatatatacaattattatgtgaattaaataaaaaaaaattttaaagtcttatctaaatgaaatttctaaccagattctgaatccatgataccactgaaaccagcacacatgatcgcagtaaaacctcattatacttcctccactatcaccaataccctttattctctggaacatgaaacattctgttgtgctcatatcatgcaaattatcactagtaggagagcagagagtggaaatgttccaggtataaagacccacaagataaagaagctcagagtcgttagaaacaggagcagatgtacagggtttgcctgactcacactcaaggttgcataagcaagatttcaaaattaatcctattctggagacctcaacccaatgtacaatgttcctgactggaaaagaagaactatatttttctgattttttttttcaaatctttaccattagttgccctgtatctccgccttcactttctgcaggaaactttatttcctacttctgcatgccaagtttctacctctagatctgtttggttcagttgctgagaagcctgacataccaggactgcctgagacaagccacaagctggtgagttgtaggcattttttccattactttctgattcataggctcaacgcacctcaaagctggaaatgccgggtctgggtacaccctggggaactgcaaagcctgcacacttggggggaatgatcaagatgagaggcaggggtggggatggcatgtgcaccaggagatgttagagaaaccctgaggaagagcagcgtgcagcaggtgatgggggagagtgggcagcaagcgaggccaggacagccactctgctcagtcaccagtccacacacccaggggctcactctgcccctctgagcacccaaggacgttaaagagctggaactgttagtctaaatataggaccatccaagctctgaaccaaaatgtgtcccttgcctcaactcaggagatccacagaggcagaagtaaggaatttattttctgaaagatagatttctatcagttctgggtgacatgttctgacacttgaaatgacacctaggacagcacatttcaggcatcttgctcattgttcactgtagtagaagctacatgctagccagttgtaaaaatgaaattaagtaatgtgtgcacagcatttaacatagcatctgagcttcaggagcactcaattaatgaccacagttgtgattctttaggcagatgcatttttttccaactttgatcagaggtcttatttagcttctccagatttcaagaatctggctcagtgatatgaaatacaagacttgtgaaaagtgtcaattgcaagagaaatggaaggataaagtatacaggtgggtggaaaagaaattcacagtcactgccagaaaaaaaattcttgagaatcaagtcctgatgatgttagggcttatagttcttattataaagagttttatgtactcattcagtgaacatttattggtgcctcctttagccaggtactatcataagagctgaaaatagaagcataatccagtccttgatct

SEQ ID NO: 9510 - DNA, 6000 bp, Homo sapiens
tttgctctttttacagcccgtctcactgttgactgatattgaccaggagtcaactcaggccccagggattttcacaacagctgctgtatggcagggtttctgctcactgtgctcatgtagttggcccttgcacccaaagtgaataattaacattctccccatcctgttgacgatgctctgaaaatatggtccagaaatggtgtgagcaaggagacagcaaagcaatgcttggaacataggtgcagtgactagacatggggcagctgtttaaagacaaaaaggccccaaaaaggagggatggcacgaaacaccctccaatatgggcatggagtctagagtgacaaagtgatcaaaagttcatttcctatggggtgtccgaatgtacttaataataaaaagagaacaagagccatgcaaactgagagggacaaagtagaaagagtagcagacaccaagcaactaagtcacagcatgataagctgctagcttgttgtcattattgtatccagaacaacatttcatttaaatgctgaagaatttcccatgggtccccactttcttgtgaatccttgggctgaacccccctgtcctgagtggttactagaacacacctctggaccagaaacacaaaagtggagtaacgcacactgcaaagctgtgcttccttgtttcagcctgtgaatcctcaccttgtttcccatctagcctatatttttcaaactaacttggccatagaatcatgtagtatttagggtggaagctgccccaggtctagcacgtcatttaacagatgaggaaatggaagcttgggcagtggaagtatcttgccgaggtcacacagcaagtcagcagcacagcgtgtgtgactccgagcctgctccgctagcccacattgccctctgggggtgagtatgtcttcacatcctccaataccctaatgacagacaaacagaacatggcaaagcctcagctctgcatggtgaaagtaagaaccagcaattgccacaaacagaaatacagtgttggtccggcagcctccgggggttctgcacaagtggattaccagtgaatacaaggctatctatctttcgaaaaaccaaagttgtatttatgctatctattttctataaaattttatattaatttatttgttacctatttttgaactctttcaaaagcacactttatatttccctgcttaaacagtcccccgagggtgggtgcccaaaaggctctacacttgttatcattccctctccaccacaggcatattgagtaagtttgtatttgggtttttttaaaacctccactctacagttaagaaaactaaggcacagagcttcaataatttggtcagagccaagtagcagtaatgaagctggaggttaaacccagcagcatgactgcagttcttaatcaatgccttttgaattgcacatatgggatgaactagaacattttctcgatgattcgctgtccttgttatgattatgttactgagctctgttgtagcacagacatatgtccctatatggggcgggggtgggggtgtcttgatcgctgggctatttctatactgttctggcttttcccaagcagtcatttctttctattctccaagcaccagcaattagctttaccttttcagcttctagtttgctgaaactaatctgctatagacagagactccggtgaaccaattttattaggatttgatcaaataaactctctctgacaaaggactgctgaaagagtaactaagagtttgatgtttactgagtgcatagtatgtgctagatgctggccgtggatgcctcatagaatcctcccaacaactcatgaaatgactactgtcattcagcccaatacccagacgagaaagctgagggtaagacaggtttcaagcttggcagtctgactacagaggccactggcttagcccctgggttagtctgcctctgtaggattgggggcacgtaattttgctgtttggggtctcatttgccttcttagagatcacaagccaaagctttttattctagagccaaggtcacggaagcccagagggcatcttgtggctcgggagtagctctctgctgtcttctcagctctgctgacaatacttgagattttcagatgtcaccaaccgccaagagagcttgatatgactgtatatagtatagtcataaagaacctgaacttgaccatatacttatgtcatgtggaaaatttctcatagcttcagatagattatatctggagtgaagaatcctgccacctatgtatctggcatagtgtgagtcctcataaatgcttactggtttgaagggcaacaaaatagtgaacagagtgaaaatccccactaagatcctgggtccagaaaaagatgggaaacctgtttagctcacccgtgagcccatagttaaaactctttagacaacaggttgtttccgtttacagagaacaataatattgggtggtgagcatctgtgtgggggttggggtgggataggggatacggggagagtggagaaaaaggggacacagggttaatgtgaagtccaggatccccctctacatttaaagttggtttaagttggctttaattaatagcaactcttaagataatcagaattttcttaaccttttagccttactgttgaaaagccctgtgatcttgtacaaatcatttgcttcttggatagtaatttcttttactaaaatgtgggcttttgactagatgaatgtaaatgttcttctagctctgatatcctttattctttatattttctaacagattctgtgtagtgggatgagcagagaacaaaaacaaaataatccagtgagaaaagcccgtaaataaaccttcagaccagagatctattctctagcttattttaagctcaacttaaaaagaagaactgttctctgattcttttcgccttcaatacacttaatgatttaactccaccctccttcaaaagaaacagcatttcctacttttatactgtctatatgattgatttgcacagctcatctggccagaagagctgagacatccgttcccctacaagaaactctccccggtaagtaacctctcagctgcttggcctgttagttagcttctgagatgagtaaaagactttacaggaaacccatagaagacatttggcaaacaccaagtgctcatacaattatcttaaaatataatctttaagataaggaaagggtcacagtttggaatgagtttcagacggttataacatcaaagatacaaaacatgattgtgagtgaaagactttaaagggagcaatagtattttaataactaacaatccttacctctcaaaagaaagatttgcagagagatgagtcttagctgaaatcttgaaatcttatcttctgctaaggagaactaaaccctctccagtgagatgccttctgaatatgtgcccacaagaagttgtgtctaagtctggttctcttttttctttttcctccagacaagagggaagcctaaaaatggtcaaaattaatattaaattacaaacgccaaataaaattttcctctaatatatcagtttcatggcacagttagtatataattctttatggttcaaaattaaaaatgagcttttctaggggcttctctcagctgcctagtctaaggtgcagggagtttgagactcacagggtttaataagagaaaattctcagctagagcagctgaacttaaatagactaggcaagacagctggttataagactaaactacccagaatgcatgacattcatctgtggtggcagacgaaacattttttattatattatttcttgggtatgtatgacaactcttaattgtggcaactcagaaactacaaacacaaacttcacagaaaatgtgaggattttacaattggctgttgtcatctatgaccttccctgggacttgggcacccggccatttcactctgactacatcatgtcaccaaacatctgatggtcttgccttttaattctcttttcgaggactgagagggagggtagcatggtagttaagagtgcaggcttcccgcattcaaaatcggttgcttactagctgtgtggctttgagcaagttactcaccctctctgtgcttcaaggtccttgtctgcaaaatgtgaaaaatatttcctgcctcataaggttgccctaaggattaaatgaatgaatgggtatgatgcttagaacagtgattggcatccagtatgtgccctcgaggcctcttaattattactggcttgctcatagtgcatgttctttgtgggctaactctagcgtcaataaaaatgttaagactgagttgcagccgggcatggtggctcatgcctgtaatcccagcattctaggaggctgaggcaggaggatcgcttgagcccaggagttcgagaccagcctgggcaacatagtgtgatcttgtatctataaaaataaacaaaattagcttggtgtggtggcgcctgtagtccccagccacttggaggggtgaggtgagaggattgcttgagcccgggatggtccaggctgcagtgagccatgatcgtgccactgcactccagcctgggcgacagagtgagaccctgtctcacaacaacaacaacaacaacaaaaaggctgagctgcaccatgcttgacccagtttcttaaaattgttgtcaaagcttcattcactccatggtgctatagagcacaagattttatttggtgagatggtgctttcatgaattcccccaacagagccaagctctccatctagtggacagggaagctagcagcaaaccttcccttcactacaaaacttcattgcttggccaaaaagagagttaattcaatgtagacatctatgtaggcaattaaaaacctattgatgtataaaacagtttgcattcatggagggcaactaaatacattctaggactttataaaagatcactttttatttatgcacagggtggaacaagatggattatcaagtgtcaagtccaatctatgacatcaattattatacatcggagccctgccaaaaaatcaatgtgaagcaaatcgcagcccgcctcctgcctccgctctactcactggtgttcatctttggttttgtgggcaacatgctggtcatcctcatcctgataaactgcaaaaggctgaagagcatgactgacatctacctgctcaacctggccatctctgacctgtttttccttcttactgtccccttctgggctcactatgctgccgcccagtgggactttggaaatacaatgtgtcaactcttgacagggctctattttataggcttcttctctggaatcttcttcatcatcctcctgacaatcgataggtacctggctgtcgtccatgctgtgtttgctttaaaagccaggacggtcacctttggggtggtgacaagtgtgatcacttgggtggtggctgtgtttgcgtctctcccaggaatcatctttaccagatctcaaaaagaaggtcttcattacacctgcagctctcattttccatacagtcagtatcaattctggaagaatttccagacattaaagatagtcatcttggggctggtcctgccgctgcttgtcatggtcatctgctactcgggaatcctaaaaactctgcttcggtgtcgaaatgagaagaagaggcacagggctgtgaggcttatcttcaccatcatgattgtttattttctcttctgggctccctacaacattgtccttctcctgaacaccttccaggaattctttggcctgaataattgcagtagctctaacaggttggaccaagctatgcaggtgacagagactcttgggatgacgcactgctgcatcaaccccatcatctatgcctttgtcggggagaagttcagaaactacctcttagtcttcttccaaaagcacattgccaaacgcttctgcaaatgctgttctattttccagcaagaggctcccgagc

SEQ ID NO: 9511 - DNA, 6000 bp, Homo sapiens
tttatttgctaataaaaattagatagatggattgactaattgataatctaagaaagattatatttgaagaagccatagtaagggacagattaaattatcatcagtctaaacattctaatacctatttctctttttttgaaattttccaaatttgttattatgcatttaaacaataattttttgaacttttattttaggttctggggtacatgtgaaagcttgttacgtaggtaaccttttgtcatgagggtttgttgtacaaattatttcatcactcagctatcaagcccagtactcaataggtatcttttctgctcctctccctcctcccgccctccagtctcaagtagaccccggtgtctgttgttcccttctttgagttcatgtgttctcatcatttagctcccacttataagtgagaatacaaggtatttggttttctgttcctgtgttagtttgctaagggtaatagcctccagctccattcgtgtttccacaaaaaaacatgatctcgttcttttcatggctgcatagtattccatggtgtatatgtaccacactttctttatctaatctgtcattgatgggcatttaggtttattccatgtctttgctactgtgaatagtgctgcaatgaacattcacatgcgtgtgtcttcatggtagaatgatttatattcctctgggtgtatacccagtaatgggatttctgtttttagctctttgatctaatacctatttctcaagatcaagttagatctctaaaaaaggcatcatcctagcatttccccatcccttccctgaactaaatttaatgttgtgtgtatcaatcagcatacagtcaagacagaaaccacacatgaacattaaatataatgagttattaacttataaaagggtatgaactactaaagggggtaaggagaatgctgaagaatgcaggaatggcagatgtagagagcagccataacctctaagctaaggcacagcagccaaggaaggggcgaactcaaaaaatgccctccctccccagctgatccacccttgttggagggggtgtggctgcaacccaatggatgcccaagaagtttgcagagttgtggcaggttggggctgctgagcaggaaactgcccgaaggggtaccagtgagattcccaagaatgtgggcatgcctctggcgaggaagacgctcttggagtgccagcaaaatttactaggaagctacccagtagggtgccagcaaaagtcagcaggaagccactgtcgtggtgtcggcaaaattcactgaggagtgggcactgcagggtctccacccagcactggcaaatcagccaaaagaacaaaaacaaaataaaaacaaatcccagaaccagaaagaaaaaactctgcctcttactgcgaccctcttatgccttctacagcaactggcaaaggagaaatgtttatggggtccagctctagactcacaaagcagaacacagaagagtgaatgaagagctgaaaggcgataaatcagtaactggagcctcacatcctttgccttttttattgagggtcaatatattaagaagaatatgtctgcgtcttcggtaaaattattgctaaggttatcacccagtgtgtgttttcaacctccctgatataagaacttagtgacaagaaagaatgagacaatgatcatgaactattggacccaaccatttgtggctttagtgcccatcttctcagcaaggctttctctctctctctctctctctctctctctctttttttttttttttttttttttttaagatggagtctcactctgtcacccaggccggagtgcagtggcacaatcttggctcacggcaacctccacctcctgggttcgagtgattctcctgcttcagcctcccgagtagctgggattacgggcacccatcgccacccctcctggctaatttttgtatttttagtagagatgaagttttgccatgtcggccaggctgttctcaaactcctgacctcaagtgatccacccacctcagcctcccaaagtgctgggattacaggcatgagccaccacagccagctctcagcaaggctttttctgactacactatttaaaatgtgatccctgagccaccttggcctctcttgctgtccttccctgcttcgccttctccatagcacttctctcctactaatctacaatttacttgagctctgtgaaggtcaggatttttgcctattttgtccattggtgcatccccagcacctggaacagagctaggcacaggctaggcactctagaaatacttgctgaataattgaattaagtaaatgagtgatctacacgtagtggggaatgagagtatacagtgatagttccttcgactaaaactggggtcaaattatagtgataaagaggaactcagaccttcagaggtaagctttgtggaccacttgccaaggctgcagaatgtgatgtcgtttcacaaacaaggaggccctattatggcttcagatatgagaataataaagagaactttcctttcgcctcaactgcagccttctaaactcttccttccttcctatgtagaagtttcaaggacctcatggcctgagtgtggataggcagaatgctgggaatcaggcaaaaataaaataatactgaaagtgaaggtcatgctaatattagtaagccagggtgatcctgaatttacaaaacatttttctttgggaaatttcacacctcacatgattctgtgtttttacttgggaaatttcacatctcacatgactctgtgacatgcggtacatgaggtgcctgactgctgtttttgtcctctactaatgaggaagagtgtgcgtactcccagcgttttgcaagtttcaaagtctgacttgactttccttccttttcctggaactgatccatgagtatcgagagtaaagctgcccgcacctactcattcaagatcctgagtgtcctgcccagctgcaggaggtggagagacccaggaggaggggccactgctgatcccaggctgtagggggtgggaagagtgtcccagggcaccatgacccccactcactcactcacaggagacccacacaagagaggagagggcacttacagcttaggttcccaccagcaccaactcctctgccatcaaacatcattgtgtttctctttctgccttgtctgtcggcacacgtggagttaaatttaatgctcaatcacatatttgtctgggctctttctgtgtttatttttctcttaatagttctctctcctcccttcctctccccgcccctcctcctccttcttcttttttttttccagagacagtgtctcgctctgccacccaggccagagtgcagagtggcatgatcatggctcaccgcagcctccaactcctgggctcacgtgaacatcccaccttggcctctggaatgtctgggattacaggcacttgccactgcatctggctaatttttatattgtttatagatccgggatctcactatgttgcccaggctggcctcaaactcctgggctcaagcgaccctcccacctcatacttctgagtagctggggctgtaggaatgcgcctcagtgccaggctagtttcttaattttctatttctattttgacaggtacaaattttgtattcaatcctacctcagacacatctttggtgggaaaaggatgtcatttaatcaatatataaattctaagcaaataggtctgatccccaaattaggttagtcacagctgctgagtcgttgacccaagagaagctcatctagattttttcattattttcaagttcctcttctcggttcgtccttcttccagaccgtgccctccccgtcccactctcttcccacagcctcccctccccacagcctcctcccaccattccaaatctgggctgttctctcaatttccttctctctggactcaaacctaccctagcccccagcctcagtttggggttaaacttgtcctcctcacattctctcccacccaacttgatgtcgcctctgtgtcatcaccacgggattttcctcctctgggttctccttttccgagtggggtcagctcccccatgagtcacagcaccaatcacttctggctgcttgcaaacccctttgctttcctcagtgttgacacccagggcagccctatgctcactgccgctgagaccccacctctgcccctggccttttcccagctgacatcaccctgtggcttccattttcctaaaattctcttttgaggcctcagtcttaaccaaagcacacagtgcccctcaaaaatgacaataaaaacccaaacacaccgtgactgtcatggcaggttcctggtccccgtattgaatcagcgggtgggtttctgcgaacactggtgagaggccgcattagagggtcaggaccctcaggtctggactcgtggtcaccacataccttcctccctgctgacagtagctggtacctgttacctactcagagtgtcacatgccacaagccagagcgtcttggcagttctcagcaccttgacatcacttccttgctaccactcagagcggcagtgacacagttcccttatctcagaaggccagaagacggctgtcaaaggtcacagggaaatcaaaggcggggtacagggccagagggaggaggaaacaacttcccggttgctttcagacgcttcagagatcctctggaggcctgggggagcttttgagtactttatttcagttggtccctgagctcggtgagtggggcgggtagagccaccaggggaatcaacagtggtttctcgtgcccctcagggtcaggagcagtctgatcaaaaggagggcatccactgtccggggccattcccacagctcccggatgctgggtctggaggctgcgcccttcccctgcaggagctcagcccagtggtaagtcatctgtgtgtcatctatgtatttaaccccttatggccatgttgatgctgagcatggtttcacttttgcaaacatttatttatacccttcgagagaaaaacgtctcagctgtcacaggaagctgcttcggggggtgagcaaactttttaaaatgcagaaattatgatctacacccgtttcttaaaagtaagccatcgtacttggttctctttaattatatattttcttacatattgtgttcatgtaggcaagtcctgtttctgctaaaagaaggtaagttctaccaaggcggtgtcatgccagctttatttcccgtggcacctggcacactgctaagcacttacatgcttaacaactagattgggaatggtgctgctctggggaagtgggcacacgttaaagaaatgtttatttcagtcttctgaaatagggaattactctggctaaaatgtagctccagaaagggaaagtggggctgtatgaatccaggtccagtttgttgtttcctccaggataaggcagctgtcggaggggaaaatcatctcccatttctccacagggcagtctgaagatggccaattacacgctggcaccagaggatgaatatgatgtcctcatagaaggtgaactggagagcgatgaggcagagcaatgtgacaagtatgacgcccaggcactctcagcccagctggtgccatcactctgctctgctgtgtttgtgatcggtgtcctggacaatctcctggttgtgcttatcctggtaaaatataaaggactcaaacgcgtggaaaatatctatcttctaaacttggcagtttctaacttgtgtttcttgcttaccctgcccttctgggctcatgctgggggcgatcccatgtgtaaaattctcattggactgtacttcgtgggcctgtacagtgagacatttttcaattgccttctgactgtgcaaaggtacctagtgtttttgcacaagggaaactttttctcagccaggaggagggtgccctgtggcatcattacaagtgtcctggcatgggtaacagccattc

SEQ ID NO: 9512 - DNA, 6000 bp, Homo sapiens
cctggtgaccggcgccgagaggtgagttcctgcgcccggtgctgcaccgtggatgtgagtccttgcacagtggtgaaatgtagtagaggagtgatctggagcaactctcatgctgtgaaaccccttccaagctcccttccctacatgcaaatcctttgagtgaaaacagttacatggaaactccctgggattggcctcattctatggaaagtgtttctgggtatgcctgttcacatgaaaattccatatgcataccacattgggggtgtaccttctacaaaaacatcatgtgagtgagctccagtatgtggaaattctatggggccctcattttatgaaaatgccctacaggtgtccctgtttatgtggaaattctatgtggttatcccaattggatattctcgttaaatggaaattctggctggacgtggtggctcacacctgtaaccccaacactttgggaagccaagacaggcaaattgcttgaggtcaggggttcgagaccagcctgggcaacatggtgaaaccctctctctaccaaaaatacaaaaattagctgggcatagtcatgcatgtggtcccagctacttgggaggctaaggtgggaggatggcttgagcctgggaggcagaggttgcagtaaaccgagatcattcaactgcattctagcctaggcgacagagccagaccttgtctcaaaaaaaaaaaaaaaaaaaaaaaaggaattctgtgtgtgcttcaaattttcctcattgtacagaacctccttatggtcatcactcctgaaatggaaatctgtacagatgccttattcaaatatctctcattatgtagaaacttcatgtggtttttctggcatatggaaatcccacatgggtgcctctacacggaatggccacaaaggtggtctgatctggttgctggctagggccatagggtggtcacagagcctctgaaccccctctccttgcccctgcagattcgtgcagaggaccgcttcctgcgcacagagcagggcttgttgctccgtgcactgcagctcagcgatcgtggcctctactcctgcacagccactgagaacaactttaagcacgtcgtcacacgagtgcagctgcatgtactgggccgggacgccgtccatgctgccctcttcccaccactgtccatgagcgccccgccacccccaggcgcaggccccccaacgcctccttaccaggagttagcccagctgctggcccagccagaagtgggcctcatccaccagtactgccagggttactggcgccatgtgccccccagccccagggaggctccaggggcaccccggtctcctgagccccaggaccagaaaaagccccggaaccgccggcaccaccctccggacacatgaggccagctgcctgtgcctgccatgggccagcctagcccttgtcccttttaatataaaagatatatatatatatatatatatataaaatatctatattctatacacaccctgcccctgcaaagacagtatttattggtgggttgaatatagcctgcctcagtggcagcatcctccaaaacttagacccatgctggtcagagacggcagaaaacagagcctgcctaaccaggcccagccagttggtggggccaggccaggaccacacagtccccagactcagctggaagtctacctgctggacagcctccgccaagatctacaggacaaagggagggagcaagccctactcggatggggcacggactgtccaccttttctgatgtgtgttgtcagcctgtgctgtggcatagacatggatgcgaggaccactttggagactggggtggcctcaagagcacacagagaagggaagaaggggccatcacaggatgccagcccctgcctgggttgggggcactcagccacgaccagccccttcctgggtatttattctctatttattggggataggagaagaggcatcctgcctgggtgggacagcctcttcagccccttctcccctccccgcctggccagggcagggccaccccactctacctccttagctttccctgtgccactttgactcagaggctgggagcatagcagaggggccaggcccaggcagagctgacgggaggccccagctctgaggggagggggtccgtggtagaggcctggggccggtagaggctccccagggctcccttatgtccaccacttcaggggatgggtgtggatgtaattagctctggggggcagttgggtagatgggtgggggctcctggtggccttctgctgcccaggccacagccgcctttgggttccatcttgctaataaacactggctctgggactagactttggcttctctccttggtcaggggatttagagccacacgtggtgggcctggggagccaggtggggggctgggaagggagtagattggctccatttaaagaaacccaacatgtagaaaccacatttagtttgacaaacctgggctgctgcaccaccccaaacacttgggtagtgcgaagggctgtagagacccctcagggcccactcactcctcagggtcagggagggtgggtggagcctgaaggctgaaagtggcagaaatgcaacggcctcactcctggacagatccccatcatccaacagggtgggtgtagaagctgccagcctgtggtaggagccagcattcacttcccacgcatactatttagagacagccgttagtgctcagtgtctggtgccccggcacccccttgtggtctcttgagtctgtggcagagttgagtgctgaaaggcagccaggttccagggaagagtccagccaggaggctcagggtgcctggaggagcctttgagagcccaagatttgggttttcctatggaagttgagggtgggaagtctctagaacctgggagctcaacctgaacaatttctgcccggcagtgagccctgcacctgaacagagcaccagaccccctaagctgaggcaggcaggccctggagataatcttaggcaggcctcagagcacccacagcagacagagcaggagcaggataggtgagccccattcctccataccccagggaacactacacctgctctgggatgcaatttctccacctggcaacaggcctgcaaaacattctctggaagagcctggccacttctgcagattagagactttgttgcacccaaattcaagtgtacatataggcacaggcgcctgcaagcatgcatgcacacacacagtcatacacaggcagagatggacatgcacaggcacacatatgctcaggtacaaacaggcatgtttacacccctgcgtataagcaagtgcacacatgcaaacctacacaaactgcaaaacacacaagcctatgtgtgcatgaagagaatacacaaagcatattcacacatgcatacacatgtgtatacatgtgcacacatacataagcatgcgcacaggcacgtgattcctataagagcacatgcactcacaaaggcataaacatgcaggcacacatgtacacacaggtattcatgcacaaatgtgtcaagttattgctcgcttggtgccagcaaaagacacacccatggccgggcgaggtggctcacacctgaatcccagcactttgggaggccgaggtgggtggatcacaaggtcaggagatcgagaccatcctgaccaacatggtgaaaccccgtctctactaaaaatacacaaaaaattagctgggtatggtggcacatgcccgtaatcccagctacttgggaggctgaggtgggagaagcttaaaccagggagttgaaggttgcagtgagccaagatcgtgtcacagcactcaagcctggcaacagagtgaaactctgtctcaaaaaaaaaaaaaaaaaaaaaaaaaaaaggccaggcacggtggctcatgcctgtaatcccagcactttgggaggccgaggcgggcagatcacgaggtcaggagactgagaccatcctggctaacacggtgaaaccctgtctttactaaaatacaaaaaaagtagcccgacgtagtggcgggcacctgttgtcccagctactcaggaggctgaggcaggagaatggcgtgaacctgggaggtggagcttgcagtgagctgagattgcgccactgcactccagcctgagcaacagagcgagactccatctcagaaaaaaaaaaaaaaaagacacatacaccgaggcacacagagcagatatgcatgcccaccacagtccgctggaagcagaggacctccttggggcagctccagcctgtgatatgggatgaatgcaatgcccactgtttccctctctctggattccctgcaggtcataaaatcccagtccagagtcaccagcccttcttaaccacttcctactgtgtgaccctttcagcctttacttcctcatcagtaaaatgaggctgatgatatgggcatccatactccagggccagtgtgagcttacaacaagataaggagtggtgctgagcctggtgccgggcaggcagcaggcatgtttctcccaattatgccctctcactgccagccccacctccattgtcctcacccccagggctcaaggttctgccttcccctttctcagccctgaccctactgaacatgtctccccactcccaggcagtgccagggcctctcctggagggttgcggggacagaaggacagccggagtgcagagtcagcggttgagggattggggctatgccagcccgattagaagggttgggggggctgagctggattcacctgtccttgtctctgattggctcttggacacccctagcccccaaatcccactaagcagccccaccagggattgcacaggtccgtagagagccagttgattgcaggtcctcctggggccagaagggtgcctgggaggccaggttctggggatcccctccatccagaagaaccacctgctcactctgtcccttcgcctgctgctgggaccatgggggctggggccagtgctgaggagaagcactccagggagctggaaaagaagctgaaagaggacgctgagaaggatgctcgaaccgtgaagctgctgcttctgggtaggggtgtgggcccaggtggggccactgccaccaggtcattggtctggaggcaggcaggcagcccttctgtgaagcaaggattccctgggaagcagtatgagcctgtgacagagtagggcacagggtgggagccctggccaagcaaggccaggcctgacaggtggtgtcctagtcccccagggctggacatcccacaaagcccctctccagacggctctgcctcaggtgacccaccctccccagaagtgcgtgccaaccacactcttgcacgggtgtgtgatgccgacttttccgtggctgggttcccgcaagcttcatgcagcctttggtttgatacgcctgctaggcaatgctcagaagccaggagcctcactgggagcccgttattgggctgctactttgggaaggggatggccatagtcctcctgggagtggggagcctctaggaccacccagatccacaacgaatggccctcaggtgccagagggctgtggctgatagacctacaaagcagccagaggggctggcgggtactgaggcccagtgggagtagataaagccgcgtccactggaccatgggcactgaggagagatggggctgatccaggcctgcctcaaggtcactgcctgacctctcaaggggaaaaagcagcttcaagaggggctccacccaagctccccagggtctggtcaaccagctggaggtgggtgagggaccaagccagtcccactttcccccaaggcagagaggctaagccggaaatctcattaactgtgcccaacgccctcgcaggggcaagctcagaaaggatgtcaactctgccctccctcctacccaaaagagctaattccctctgagcctcctggagacacctgcaccccttcaggtg

SEQ ID NO: 9513 - DNA, 6000 bp, Homo sapiens
attgattgatggattgattgattgattttgagacagagtctacctctgttgccgggctggagggcaatggtgcgatctcagctcactgcaacctctgcctcttgggttcaagcgattgtcctgcctcagcctcgcaagtagccgggattacaggcatgcgctgccacgcccagctaatttttgtatttttagtagagatggggtttcaccatgttggccaggatagtcgatctcttgacctcatgatctgcccacctcagccttccaaagtgctgggattacaggctcgagccaccgcacccggccttattcatttaagttgatacatatttacctgccaccctgcaaggggcctggaattagggatatgagtgggagagacccacgaccagaatagtgggatctggctggggaaggggaagcccgaggacaatgggactcagagaagcccagctcacagccagggaatgaaaggtggggaggagggattaatttaacagggtagggggatgggagggaagatcgagggatggagagagcaaggcaagccagatggttggagtgccagtgtgttgcaagtggagggacatgaggtggacccttgagtggggacaatcataaagccttacagaaatcgctactattgggccaggcacagtggttcatgcctgtaatcccagcactttgggaggccaagacgggaggattgcctgagcccaggagtttgagaccagcctggacaacatggtgagacttcatctctattaaaaaaaaaaaaagggccgtgcacggtggctcacacctgcaatccagcactttgggaggccgaggcaggcagatcatctgaggtcaggagtttgagaccagcctggccaacatggcaaaaccccatctctactaaaaatacaaaaattagccgggtgtggtggcaggcgcctgtaatcccagctacttggggagctgaggcacaagaatcacttgaacccaggaggcggaggttgcagtgagccaagatcatgccactgcgctccagcttgggtgatagagtcagactcagtctcaaaaaaaaagaaatcactactataacacctcacccttattgagggctttctatgtgccatgcacattctgcatgttttacatgtttcctcctggagtcctgacctctgcctgtgctttgggtatgtataaccgttaggcccattttactgataagaaaaccgaggtacagggagtttctggtacttgtccaaagtaacaagtagctggcaagtttgcaaactgctcctcagagtctttgcttccaactgccagcctacagcctccaactgctgcagagtccaaaccagtgtgtgtgggggcttcatctattctcagggcattggggaaccacagaaagtttccgagcaagggggtgatgtgatttctttcagtaggatgcccttggctgccatgtggaggataaattgtagggaaacaggagagccaaggaagacgttagaatcctaggctgggagatagtggggacagagaacaaatacagattggaggggaaattgaggtagggaagaggctgatggcatataggggtaggggagggggtcattgctgtggctggtggggggatcatgaagtggtggagagcctgggaacaggggccagtgggatgggatgtacccagttctggacagtgtggatttgaggtgcctgggtgtctcggggaggcttcagagcagtggtggacatggggctggcaatcaaagaagtcaggctggagaggaccttgtggggttctgagcccccagagtgggaggtgtatgagtggagtggcaagcagaggcctggccatagccctggggaccccatggagatggagaaggagcagctagcagggtggaagcaagggttgctggactccctgggaagagcataggactggaaaggagcagctgactggcgggaagggtgccataaccacaggacctggcctggggctggggaaggccatgccttccagtagccccatcttgccctgcctccatagattggggtctgtgttgcgcccacctactgagagctgggcctccaaggggctgacaggttctccctgttgcctggcaactgtgagagctgttggctgttgctaggagcaggctagagaggccagaggagcgaggatcagctctcaagcctggggcagggtgacaggtagagggaaggggagggtcccaccttggaagccagtttgtagtctgtgcgtggacagattgtattcttggccatgtgtacccatttttgtagagtgtgttctgtggatctgaggcatgttggagactgacctatgtgtgggtgtctacagcatatctgtggccctggtggacattatgtgtcctcaacatgttgcatgcccatggcagggcctgcttgagcttcagagcagtggtggacatgggacatcatatcctatgtctcaggacaggaggggggcctgagggagtcattggaggacttccaggccaatgacccctcaacaagagagacattcagatagggatatgcagacactccagggagaacagccagcctggggattgggagctggaacaaaatgtgtaacaaggttctttttttttttttttttttttgagacggagtcctgctctgttgcccagggtagagtgcagtggtgtgatctcagctcactgcaatctccagttcccaggttcaagtgattctcctgtttcagcctcctgagtaaccaggattacaggcacgtgccaccacgcccagctgattttttttttttttttttttttgagacggagtcttgctctgtcacccagggtggagtgcagagacagaatctcagctcactgcaagctccgcctcctgggttcacaccattctcctgcctcagcctcctgagtagctggtactacaggcgcccgccaccacgccggctaattttttgtatttttagtacaaaatacaccgtgttagccaggatggtctccatctcctgacctcgtgatctgccgcctcggcctcccagtactgggattacaggcgtgagccaccgtgcccggtctttttttttttttttgaaatggagtttcactcttgcccaggctagagtgcaatggcatgatctcagctcactgcaacctccgcctcctgggttcaagtgattctcctgcctcagtctcccaagtagctgggattacatgtgcccaccaccacaccccgctaattttttgtattttagtagagacagggtttctccatgttggtcaggctggtctcgaactcctgacctcaagagatctgcctgcttcagcctcccagagttgctgggattataggcatgagcaaccatgcccagccaaaatgtgtaccaaggttctaaggaaggggtttatgctaaacaccgggctgttggtggcaagcaccctgtcttgcttcaggggccttccctttgggctggggcctcctagcctcatggcactggggtcacacaaaatgccttcgtggttaatttttggcagacccttcaaatgtccaatcgagggtggggctctgggctgctcctggagcacaggatcagaaagacttgaaatgttcagctagaaacactgctgcttccaccccacctttgcctggccatagggttgcagccattgcccagtggggacaggccacaggagggtgggatgtgggatcatggccacctccagacgtggacaggccatggaagagacaggtcataagatcatggccacttttgtttctagaagtccagtggcaacttcttcctctttcttccctcccaaccccctcaccctgcctgcccgccctcctctcttcctccctctccaccctctcatcctctctccctttctcccttgggtcctgattgcctggtcccagattggagtccaggatggctgcctgccgaagaatgcctcccggtagattggggaaggatggatatgagaagccacccagctaaaggagacagcctaggcaaaggtgtaaagatggaaaccaatttttttttttttttttgagacggagtcttgctctgtcgcccaagctggagtgcaatgaatggcgcgatctcggctcactgcaacctccgccacccgggttgaagcagttctcccgcctcagcctcctgagcaggtgggattacaggcgcccacgaccacgcccgggtaatttttgtatttttagtagagatggggtttcaccatgttggccaggctggtctagaactcctgacctcaagtgatctgcccgcctcggcctcctaaagtgctgggattactggcgtgagccactgcgcccggcctttttttttcctttttcgactagctgcaacccagagggagaaggcggtaaacccgccttaagactgagaaaaccgcagtccagaaaggctcccgagttcgtagatcccaaaacaagtttactggactcattaactttaacaaatgacaaagacacgcctcctccacctaactcgcccaactcgcagaagctcagagggctggttcctgctctgccctcgagggcaccggatccccaccctcgggttaacagatccgccctcccggctgtccagcaacagagctcccggcgctccgcacccaatcacagcccggtcccgcctgcagcccgcccagtgccgggtcccggggtttggaaccacccctattgccttttctccgcgtggccccgcctgcagcccaggcccgagcctgggctgcgcctaacttcccccttcgctccgccctcgagccaatcaacagcctctaatctcctctggccccgcctgcaagcccgccccggcccagtcacaggcttggttcgcccaggccccacccccggcccgccccgccgtcggtgcgcggcggtagggaaggcgcctcccgcagtcgctcggaactgccgacccgagtgcttcccgcagagggctggtggtgggagcggagtgggtcgggcggggccgagccgggccgtgggccgtgtgggggccgggcggcggccgggccggcggacggcgggatgggctgcaccgtgagcgccgaggacaaggcggcggccgagcgctctaagatgatcgacaagaacctgcgggaggacggagagaaggcggcgcgggaggtgaagttgctgctgttgggtgaggccgcgtcccgcactgggatccttgattcccagctcgaatccccagacaaggactttgacctcccagactagggcttcaaactcccagacccgggctgtctgggaccccacacctgggccaggaccagggttgaaaactctagattggactagacctttgatcctgcccagactctagaccagacccctgtctcatcccagaccccagacctccaaatccagtcaacagtgccccaacacccgcggtccagtgccctgcttggccatccccccttgctaactagcttcacagaacttcagagccccgccatccttccctacactttgcccaaacccccaggatgcccgccacttgttccccaaccctcaggctccgcttgttttcctcacctgcgccttttattcctattgggcatgagcatcccgcggggcccctgccaggccccccacccactccctccttctccttctgtgccccatccctagtctggaatctgtatcctccacctgtgcactctgacccaaggaacctctcgagtgggaaactgctcttgagccccatctccagctggaaccccttcagcgagccctgctccctgcttcctgccctccagatccttctctgcaggcatcactcccgaaaccctctgctgatcctcccctaagtcctcttacactctggccttccccagatccctccacccttcctgcaccaagtgggctgggctaggaggcgggagccctgggttggagagggcctaggctgccttatgcagaacccccacggggctggattgaggctccactggt

SEQ ID NO: 9514 - DNA, 6000 bp, Homo sapiens
gcacattcctatacctggggtcccaagagagccattgggtgggtgggcagacagaacatacagtttaatagggccagggagaaactgtctccctcctttgctcttttcaggcctgcggtccctggggcactgatcattatttaaggagcagtgagggcctggcatcctgtcccctggtcagaagaaactacccaaaacttaaagctcccccagctccctgaccacctcattcacaggcttctgtcctgggagccacacctggggcctcagcaagaggagggccctgggccagcagcctgggcttctagggctcacctcacctctgccagtagcgcccagagggcatattctgggggctgagtgggtggtgggggtagggagagaccccaaattcccccctctcctaattctcccacccccaacctaggccccatttgaggctcaaggaaagccccaggctgagtccaggcgccaagcagaccccagctgcacctggcttggctccaacaccatggagacagtggctggggaagctggctaacccctcaccttctgtgatgtttgacagctgaccctctccccatcatacaggaagggtagcagatccactttctcccagtctggattcctgcacacagcgagcctgagccatgtgttcctccttgccaccccagcctgcattcagtgcctctgatccagggagatgaacccaggggttgctcctggacagggcagatgaaggggctgcttgcttggaggatgtattgggggtggaaggagcaggttagaaggagtttgggccatcaacctggctcagcactggtttggggcaccccaaccaccagcagagtgctctcatcatccccttttgctatcttgtggctcaggaagcaccagtcattgggggtggggtgggtaagggtttctcagggtcgacccaggcatagggagagaaaacccttaacatgtttcatcccagcaccctcctccttgcagctggttgagtatttctcaggccttctccatcctcctcgtacttcagctccctcctcaactgggacttggtgtgtaccagaggcaggggcctgctgactccctggatgctgctcctgggagccctgcacgggggagggctgcagaggggcctcctgctgcattctgcagtcctcgtgccctgtgggtgatgttctgtagctggccctggacacatctctttccaagcttgaagtgggggtgggggaaggtggagaggacactacttgtgtctctttgttctacctcagctcctcacctcagggctgagtggcccttaataaatgtggggggagggcagcaggctttgtggaagtgcagggagctgaggctaatttagagtggggagaagagtgcacagctgcctcctcccaccctctctccctccctccctccttccctccctcccttcctcccagctctttccctctgccctgtctgtgcagccccagtcagggtagagggcagagggcagctggagcaagccccctgagcccgggaggctgcattattcatgagtgcactgcgtgctgagttgcctctccctggaggagggggtggggtggtcctagctaacctgtgctcccttttcctggtcataggagctgacacaatgagtgacacgagttctgtaagcttggaagtgagccctggcagccgggagacttcagctgccacactgtcacctggggcgagcagccgtggctgggatgacggtgacacccgcagcgagcacagctacagcgagtcaggtgccagcggctcctcttttgaggagctggacttggagggcgaggggcccttaggggagtcacggctggaccctgggactgagcccctggggactaccaagtggctctgggagcccactgcccctgagaagggcaaggagtaacccatggcctgcaccctcctgcagtgcagttgctgaggaactgagcagactctccagcagactctccagccctcttcctccttcctctgggggaggaggggttcctgagggacctgacttcccctgctccaggcctcttgctaagccttctcctcactgccctttaggctcccagggccagaggagccagggactattttctgcaccagcccccagggctgccacccctgttgtgtctttttttcagactcacagtggagcttccaggacccagaataaagccaatgatttacttgtttcacctggatttgggttgtgtatttgtttgttctgccttggttgggggcggtggggggatggctgtacagataggctgggagtgggaaggagcctcccctccccaggacaaagaatggaaggaacatggcaggtaccctggggttgggggaggaggggagttagagatcctccacgtcctgctctgtgaccccagtggccagctgcccctccattgcagctgccagagagcaagcagagcctggcttgggtgagagctgagtatggggtgcccttcagggctcaggaatggggagctcacagcctgtcttcatctgcctccaagggatgcctttgtgtctgtgactagtgtgcctgcacgctggtacttccccagtaggcgaggctcccccactgtgcctgccagtggctgtgtacctgtgtgtgtgcatgtgcacccacgctcatgcatttggctctgtgtaaccacggatggatggggctgcttgggtaaagctgtgcccaggtgagcatcagggtatgattgtacctgagcatggctgagtctgtgtggatggctgtgtgcctgtgtgagtgtgtgtgtgtgtgtgtgtgtgtgtgtgtattgctgtgctttgtgtctgtgtatggttgtattataggagcatgtgaggctggctaacagcatctctatgggggctttgttcatgtacaactgtgtgtggctgtgtctgtacaactgtgtgtatggtgatgttcatgacgttcatgtataaagctatgtgttttgctatgtgtccacatataaaaacacacatttgctatgtgtcctgcagccgtatatccataattatggccatgtatgtgtggacatgtcttggtggacagctatttgtggcatgtccttgtgtgagcagctgtatatatgtggctgtgtccacatgtgcagccgtgtgtagacatggtcacatgttcttaggggcaggggtgtgcccatgtgtattatggctgtctacaagtatagctgtgtgtggttgcatgtttatgtgtactatgcatgtggccatgtccacatttacaactgtgtaaggctaagtgtatgtcctcatccgtgtgcacacagctgggagtggtggctgcctagctgtgtgtaactgtgtgtccatgtgctgcgactgtgcagcttgtttgctgcaggccacatcatgggcttttctggctgatgctgtacacagccatatctgtgtttacagccctgtgccttttgtgaggctgacttgttgagcaggttgggagtgtggctagaaggagtgtgtgactcctcacctcagcaccctcctgctgtcaacccctctgctccagaggcctggcccattgctcacctaccccagggagctgttgctctgaggcagccagagagggtgagagcagccggtggcagagttggaggtggaagacagcatgtctgtctcccactgccaccttgtctcctgttagtgatggggcttgtgtttgtttgggttttatgtgtctgtttcgtttcaaagctgtattctttccacagcagcaggacatcaggtttctgtgtccagggaaaaagctcgtccttggtgatcacccccgcacccctacggactgccacacgcacatgtgggtgtgtgtgcctgaggggtctgggcttggcatgttcattagcatgtatctgagctggccttgcttccactgacacctgtggaagaaagggcagtgtcgggaatgtgtgtagggatgccatgccccttggcacttgttagtgtgtgcacatgttaggggcagatagcacaggctctctaatccccattccttcagcacagtctggcactacagcttatccactaccctctacccaggggcgtccttccccatcctgctgtgggagggaagagtcaagagaatcttctcagagctgtcctccctctgcttgggctccagctctcactccctcctacgcagcagccagttccagaagcctttccctaggcccctcccctcccagatgcccctgccatccctaacactccctcagggttgaccctagtacttggttctgcagcccttcctgcaggttgctctctccttgcttaaataccctttttacatgggagtgggtggcaggtttaaagggcatctgcaggaaggaaggggaggccccattctcctctgacctctcccttcccccaatcttttcctcatagtgactctggctccaggtctcaaaagtggcagaggacacatgcctccaactcaggcctgggatgtggacccagctgaaatcgctgagtggggagaatagactccacccgtctcccacgcgcccctttacctatcccccagaggcaccccttgcactaaggccagctcctccactctgcagtagcactatgggcacctgtcggggcgcagtgaccttccccaccccgtgccccgtggcatccccccgccccccacctatgctctctaggtggtagtctgactatggggcggagtgggccacgaagcacccgctccagcgcagagcgagagcgctcggggattcagcaccacgaggcggacagctccaggccctgaggtccccagaaaagctggagcgcggagtgtccagaggaggcggaggctgggttgggagcaggagacctggcgtctggaggaacggaggaggggctgggggcgggccggggccgggggcggggcggggcgggccgcgattgaaagcggcggggcgagcgggcgggcggagagcgcagagccagcgagccagcgagcgagcgagcgggagccggagcctcgcgccccccgctccactccgattctctccgcgccagagccagcgcgccaggtagggtgagccggtggtggtggtgccgctgccgctgccgacctttttggcccttacctcacgtcccagggtcctgcgggccctcaagttgtggggcgcccgcgctgctgtgtccagacagcgttccctgagagctccgggaagcgggaagacagccccgggcgtcccgcctttcttctccagaaaacgcacgccccacatcgcactcccccgttcctcctgctccagcgtcctctggtccttctttctgtctgtgcctccgtctttgtctcaacctctcaggcttgctcgctccctgcccagattttgtggcccaggctcctggctgtctgactccgggtttctgtccccttcctgcctctgagcttccgtctgggcctcccctctgggagacttgcgacttgaccagttttggcttcagcccccatctgggtccctgtctccatctgtgctggtcttcctccctgcttctccctcgcttgcctgggtaagctgctgctttcctgatccccagaggagcccagtgcccctgccctggggagctgagggggcaaaatgaagaggctcagcctccgtggccagcacatggggtccttgagttagttgctgcccttcttcaaactcagtttcctttcctgttctgaggaaagaggtatgtccctctcccagcctttccaagcctgtgtgattgtgagagcctttgtggggtgtgtgtttgggaaggcaactggggtacaaatgattggacgcagtggggaagagacagggagggggtctctgagggccatggctagggtgggcagggccctgaagctgaggatggggagattggaaatggtgactttctctgctgggtcgggagtgaagagaaaacagaggcacaaaatctcaagcagtgttctacacagagctagagagtccc

SEQ ID NO: 9515 - DNA, 6000 bp, Homo sapiens
cctcatcacctttcacccactagctttatccatcgatgataacttaactgaaatcaactacctgaatcaatttttgctaagatagttgcaaatggtagttatctaactccatcatttcttttatctgtattagtttctgtctttattatcagtgtagactcatggatttttattttattcagtgagttataatccattactgtcctcaattattttgatcctcaaattgtcccagatttggccagcagaaggtcccttccgtgtcccgatcattttttgagcacatcctttctctctggcatcacaagatgttccaggttcatctcgtacgaaccgggaatcagccatttctccaaggagccctggtttcctggagcaggaaatgtttagaatccaagatctgggcaatagatgtgctccttggtactgaggtgtcattgcttttaagtccttccagcaaagagagctaaggaatgtgtctatgtggctgggcgcaggagctctcacctgtaatcccagcactttgggaggtcaaagccggaggatctcttgagcccaagagttcaaggctgcagtgagttatgattgcaacactacattccagcctggatgacagactgagaccctgtctctaaaaaaataaaaaaggaaaaaaaaggggggagacagaatatgtatgtgtgaataaatagcaaacacatctctctatatctatttctccagttccagtcaaacaccacagagttcttccattcttccccaattccctatttcctcgattcttaaacagtaagaacctgggtttctatcaacatcaatatatctacttatttgctcaatcctgcacaaaaaggagtttcagaattgccatacccataccctgtgaaaaacaaacattctaaatagagctcaagatgtatctgatcttactcagtattttttttttttgtcgttagattgagggtccatggtcaaagtaacagtttgaatacacgttcagatgttacttggattggttctttctcttcagtgtggttattttattcgtctgaaatacaggtaggctcagtcatttctgtctacattcttctttgttactttattgttttcaatatgtagaacattaacatagttccaaaaggtccactctatgcaagctgtgctcagaagagtccttctatcccccacactccattcctactcacctgctggagggagccagtttcattagtttctggcatatccttcctgtgttttttttttttattttgttttgttttttggaaattttgcaatacacatacacacatacacatgctaaggaagtgttttaattttttatttatattaatgatgtcgaagggagcatgaactctgcaacccaccacagtccccacccctccctatcgcgttccccagtccacttttctcatttgctgttcccacttggccccaccgagctctctccaggctctggtaactcaggggctgccccaggcctacagggctgcctgggtaaggaccaaaacttcaaaaatccatcttcacctcctagaggcaaatgcccaaattcaagttgtagccaaggacaggaagggacagctgtgtggacagagctctaggaagcaaaactcagctgtgtgacctgggacccatttctccactctacttttctcatctgaataatggagaactgcgctggagccctttgaattccagcacaaaatcagttaaaccaggaggtccatgtcctgtcttcaccatctagatctgcagcaatgctgaccgtgtgtctgtgaggggtgctagggccacaggcacaagtgaggctcagatgaggtccctgctgtcatggagcttacattctagtaaagcaggctctaagcaaatgtatgcataaatatgaaataccacagcaggtagggaaagtgccgggaagaaaaataaagcaggataaaaggatttgagtgatgggaaggtggaacaattttagaaaagatggtcgcaagctgggcgcgatggctcatgcctgtaatcccagcactttgggaggccgaggcgggcggatcacgatgtcaggagatcgagaccatcctggctaacacgatgaaaccccgtctctactaaaaatacaaaaaaaaaaaaaaaaattagccgagcgtggtggcgggcacctgtagtgccaactactcgggacgctgaggcaggagaatggcatgaacccgggaggtggagcttgcagtgagctgagatcgtgccactgcactccagcctgggcgacagagcgagaccccgtcccaaaaaaaaaaaaaaaaagaaggccgggcatggtggctcatgcctgtaatcccagcactttgggaggctgaggcgggtggatcatgagatcaggagatcaagaccatcctggctaacacggtgaaaccccatctctactaaaaaaaaatacaaaaaattagccagggtggtggcaggtgcctgtagtcccacctatgcgggaggctgaggcaggagaatggtgtgaacttgggaggtggggcttgcagtgagccgagatgtgccactgcactccagcctgggagacagagcaagactccgtctcaaaaaaaaaaaaagatggtcgctgaaggtccctctagagcagagacctgaatcatgtgagggagcaagccatggacagatctgcagcaagggtgttcttgcaatggaaacagcaaatgcaaagaaactggcttgatgggcggaaggaacagcaagcagactgctgtggctagaaatactgtgggcaaggaggagggtgagctcagaaagggatggaaaaggtagataaaagggcctagctcccttttatctgccttttttttttttagttccagaggagctgagattctattctcatctattctgatgatgggaagctcttggagggatgagagctgggtcatgcccccatctgctttgtttttagcgggatccacttcagcccctgtgtagagagtggactatagagtatacgtcagttaacaaccagtcagcaaaacagaaattaccctaggtatttcagacaagggaaatttgatacagggaaagaattgaatgaccaaatgggggatgatgaggcaatccaaagatgagcaacagccggaagtcactactactcttaagactggagagataaaggaagtgaatggtgctctgatgccaagaggctaggatcaccctgcaggagccagaaccacagagggggccacctgaagggagcccctggctgagcttcagagggaaataaatcctggcttcttccctcctcccatctgccagtcttctgctggtaactttcattggctgaacatacccaaagtcagttgacaaaggagcctgggaaatacagttcccaggaaggcagtatagcactggggaagaagggaatgaatctgagggcaaacaggcagatggccagcacaaggtgcaggagctgaggccgggagaccagttagaaggatgctgaaatggtccaggtgagaggtggtggtagctgggaccagcttgatggtgatggtgagaaatggcaggattccagagacctcagcggactggatatagggcgtgggggagagggaatcatcctgagatggacactaagatggagaagattctgggaggagcaggttgtcggggagggatcaagagtcatggttctgttttggacataggaagtttgagatacccattagtgaaagtcctggtggggaaatgttgaaaaggcagctggatacccgtgaaaagaggaagaggcttcagatacaaatgcaagctatcagactatagatagggttttgccatgaaactgggtgactttgcctgggggcatatgccccacgggagttacatggctttccatgagccaacgacattggggtggggaaccctgacattcactgattagtcaagactgggttttgtgcctaatcaggaaaatagagtgtggggatcttgttcacccaaatttcctgtcctgagaattggggaggggtggtttcctaaagaaaattcagggtgtttagccaggtgtggtggctcgtgcctgtagttccagctactcaggaggctgaggtgggaggatcgtttgagcctgggaggcagagattacagtgagccaagattgtgccactgcattccagcctgggcaacagagaccctgtctcaaaaaaaaaaaaaaaggaaagaaaattcagggtgctgttaccaaaaggggacctgtttgctagcagcaaaaacaaaagcaaacaacagcaacaaaaaaccaaacagcatctgcctgctaaggcctcctctcactcatctcacacactatcatggagcacctattctctatgaagttaatattagctgagcacctactatgtgccacgttctatgcttttctctcacttttccagcctcctttctttctgagagaactagccctcttggggggccagggcatgcctaagggtcctcctgcttcagcttttgtctcactggtacctcagtttccctttaatatgagagctaaatgctcatcccattgatgaggatggggcaggacaggagatggggggggcacttctcaccactgagaaaggtagagcaggctctggctgactccaaagcccacactctaaccctctcaagtctaggctccaagtctgtgcctgctctgtcctccacccctccaccctagaggcacccccaagcacttccacagcagagcctccagccttcagctggcagctgctaggacccagggggctggcgccaggccctgcccctcccttgccagccgtgtgtggcaacatcagagtgacagccagtaccatctccgacaggggctgagttgctggagctgggctggggcaggggagaaagacagcagactcatccttgcacccctccatgggcctggccaagcccccaagaggatggcagcctgggcgtcggagccacctcctgggcagccaatgaggtgaggggccggaggagcaagggacaagaggagcagaggacaggtgatggaaatcctgcagctttaggctccattctgccatctacatcccagcgcagggtgaagcctgagagcccaaatggccaactccacagggctgaacgcctcagaagtcgcaggctcgttggggttgatcctggcagctgtcgtggaggtgggggcactgctgggcaacggcgcgctgctggtcgtggtgctgcgcacgccgggactgcgcgacgcgctctacctggcgcacctgtgcgtcgtggacctgctggcggccgcctccatcatgccgctgggcctgctggccgcaccgccgcccgggctgggccgcgtgcgcctgggccccgcgccatgccgcgccgctcgcttcctctccgccgctctgctgccggcctgcacgctcggggtggccgcacttggcctggcacgctaccgcctcatcgtgcacccgctgcggccaggctcgcggccgccgcctgtgctcgtgctcaccgccgtgtgggccgcggcgggactgctgggcgcgctctccctgctcggcacgccgcccgcaccgccccctgctcctgctcgctgctcggtcctggctgggggcctcgggcccttccggccgctctgggccctgctggccttcgcgctgcccgccctcctgctgctcggcgcctacggcggcatcttcgtggtggcgcgtcgcgctgccctgaggcccccacggccggcgcgcgggtcccgactccactcggactctctggatagccgcctttccatcttgccgccgctccggcctcgcctgcccgggggcaaggcggccctggccccagcgctggccgtgggccaatttgcagcctgctggctgccttatggctgcgcgtgcctggcgcccgcagcgcgggccgcggaagccgaagcggctgtcacctgggtcgcctactcggccttcgcggctcaccccttcctgtacgggctgc

SEQ ID NO: 9516 - DNA, 6000 bp, Homo sapiens
gtcaggtaagagcaaatatgcataagtgtagttaaccatttattgcacacgacttgtgtgcacaccttgtgctacactctttgtaaatgaatctcatttaattgaatcttcccacaatgggcttttgatattcagacgttcagagcaggcaagagacttgcccaatgagccaaagtctgggctctttacagttaggtacaatctggttcatgtacaactaccactaatgcacagctagtcagtggtggaaactggacatgaaccagagtggtcctcaccgcaaggcccactttcattgtcaaagttatgacttcgtcccatggggaggtcaacttgagtgctgccctttgataatccaacatccactgggcctagactttggctcactttttctaagagttgggatggagttaagtcaaaccaaccttctctaacttggtgtttaatgtacctattggcaggtgactggccagaagcctgaggttaaacaggatacactggccagactggacctcatgattagggaacccatgaccttgactgtatctgccaaagggtgccaaccagttcctctgaacagtcaggatttctagtaccattcacaccatctatacgtacatcaaagaagtgacataaatgatttggggagtgggggtgggaaatacttttgtttctatgtccaaaaggaataatttgattatacaagaataatggaaattttcttataggaaaaaaatgtcatagagctgttttgctttgagatgaaggcatgcaatttggtgcctaagaaagcatttaaaattcttgcctgcagcttcctagaaacagtaaaaggaaaatacgttgatcctggccaatgaaatgtgaacagtttttccttaagtattaatctactgaacaaatgttgataatgaaagaagtaggcatataaatgctgtgagagaaccatgatttatgtattttctactgctgcttctgctatttgagcctgggaaaatgactaaaccaaatctcaagagcagcattttgcaccgtagatagaaacagaaaacagaaaattttaagttataaggaattaataatgtctcttcttttgtgtccttttctgaaaaataaatctctccccatttgggagacataatcacttaacttccatttccttatacctaaactcaacttcagagcccaggaccctcagaaatcatttggtccaacgtcccatttcataaatggacacatttgagattccaagaggttaagtgacttgtcgaacaccatgtgctcattagaataaaaaatatgaagatttaaagtggaaggtagtgacctaggagtgggaggacctgggttctccctcccactcagctattcatgagcttctctgtttgtaaaattcaagtgttaggattagatggttttgaaaaatccttccctctcgaaaggggttataattctgtgcccgggagcatcagtagtttgtgtatgttagtttactgcttttataaactcaaaagctttcttcacagttataacaaagaggcagtgtttgtggagatcatgaggatggactctaaacacagagttcctcagctgggtgtggtggctcacgcctgtaatcccagcactttgggaggctgaggtgggaggatcacttgagcccaggagttctagaccagcctgggaaacatagggagaccccatctctacaaataattggtttttttttttttttgagacggagtctcgctctgttgcccaggctgaagtgcagtgacacgatttcggctcactgcaagctccgcctcccgggttcatgccattctcctgcctcagcctcctgagtagctgggactacaggcgcctgccaccatgcccagctaattttttgcattttaatagagacggggtttcaccgtgttagccaggatagtctcgatctcctgacctcatgatccacccgcctcggcctcccaaagtgctgggattacaggtgtgagccaccgcatccggcctctacaaataattttttaaaaattagcggggcatggtggtataagcctgtggtcccagctactcaggaggctgagataggaggacggcctgagcctgggaggttgaggctgcagtgagccatgatgatgccactgactccagcctaggtgacagagtgagaccctgtttcaaaataaataaagtcagacttccagctcttacacttacttgaaagtaagtgtaaagtaagtgtaagtggtgaaagcgtgaacaaattaacccttctgcctcctctgcaaaatgaagacagtaacagcacataccacatctggccattacaatgattacattaaataacacatgtcgagaatttagcacaatgcttggcatacggcaagtgctcagtaaaaggtggctgccattagtattaccataaagcaaccagagttggtgaatttgtgtgggttattaagaaggcattccctcctctgggcagaggcagcccaagcgctaagggccacagcaaggcaggatcgaattctctacagccatgggtctaactttaaacaaagaaataagaaaccatttcctaccctcccttgctcaagtgctcactctcaattgatagccaatgatatgtttaagtgtttgtttataatgtagggcttctagaaagctcttcctacttagatggctggaatattgctgctcttttcccttttcttctttctgcctggaatgaagaaatgatggctggggcgtcggcagcctactgtgatcatgagggaagggctaaaagattttcagagattcagtccttgagccaataaatcaatgtcagcaactactgacctccaaacttcttctttcacgaggaaaataaactcatgtacacgttttttgctactagtatcaaactgcaattcctaacccatacaccctccaaaatctattttctatcaacatacatttacagatgtgcctggtcagccacttgctgctggccacttaggagtcccaagtcaggtgctcaatagttgattttcttgaaaaatcacttagatttttaaaaaaatatccaaactgtccccaagggccttactattcaaagtaaggtcagcagaccaacagcattagtctcaccccggagcttgttagaaatgcagaacctccggccccattccagaactactaaatcagaatcttcattttaacagggtccccagtgatttctgcacatagtgaagtttgaggctctggactaggtttaccggctctgctctgtcatccctcctcaacactgctgccagaataatgttcctggagcacacctagtcatgtcgctccccttctcaaaagatttcaagggctcctgactgcctgcagactaaagtttcgacttcttagcctgatcattaaggccctctatgatcttgcactatcctgaaaatgcccatcaaggtgcctgccttgcatgtaatcagtaggcaacaaataattttctgcacagaagaaaaaacaaatgagtgtgggtgagaaacaatgcgttgcttaattctggctttaccatgctaagcactggggatgcagtggtaccaaaaaccaggcatgatcccttgccttcaaagagcttagagcctagttagaagagcatgatttttaaaaagaaatgaaagtatataatgacaaattataagtgctaagaaggaaatgactagagggcagggatacagagtaaaacagacgggttagaaggaggccctacggagagggagcctgttgtggggctggtccaggcagaggtaccagcacatgcaaggtcctgcgagacaaatgcggtgtgtctgagaatcataacaggggctgccctttcaggcttacccagaaaatagatatcctgggaggaaggtggcatagggttcaccttccaagtcacttaaagatgaaatgctgcatttcttttccctgatataggtccttcaccgggatcacggatgagttagcgagcaggggatgctgcggagtcgctgtgagtccagcactggaaatcagaccaagcgaaatttgaatcccagctccgctacttcccggctctcaactcccttgacctccaagcctctgcttcctgaggtataaagtgggattaaggatggcaacaacttcgtgattactgttgagggagataatgcttgccaagctccccagcacactgccacccacatcagtgcgcacctgagtatcagcggttttaggattacgatgactattactatcgtaaattactcccagctttcgggcagaaggctcattccagatattcctgtcccctctgaggcctcccgaccctgccagcccaggcaacctcccccgcgcacggccaccgtgaccccagcgcgggcgccgccgccggacccccgttacctggggccaaacgcgacttgtcgccaccttgcgtcctgggccctgcctccctcccggccgcctcccgaccccgcggctgctgcggaggcgcccccagcccagccgggcccaggcggtgcgggatgcctcggcggggctggcggcggcggccgcgctgcgcgctccggcggaggggagggggctccgcggcggcggcggcggcggcggcagcggcggcagcggcggcggcgggcccggcggggggcagagccaagaggcgcggcggcagcagcggaggagtaggaggagacggaggaggatgcggggggctgcggacggtggcgaggccctgtccgcagtgaagcccgcggcgcctagggcgcagggagtggccgcctcctcctgcgcgcaccattcctgagatggcggcggcggcacagcggcggctcggggagcccaggaggggccggccgggagcgggctgagccccgcaggacggggagctcgcccagggccggcggagcggcggagctcgggccgggcggcctgcgggagcggcgaggcaggggacggccccggggcggagcgcacggcctggtgaggccgcgatggcgaacgcgagcgagccgggtggcagcggcggcggcgaggcggccgccctgggcctcaagctggccacgctcagcctgctgctgtgcgtgagcctagcgggcaacgtgctgttcgcgctgctgatcgtgcgggagcgcagcctgcaccgcgccccgtactacctgctgctcgacctgtgcctggccgacgggctgcgcgcgctcgcctgcctcccggccgtcatgctggcggcgcggcgtgcggcggccgcggcgggggcgccgccgggcgcgctgggctgcaagctgctcgccttcctggccgcgctcttctgcttccacgccgccttcctgctgctgggcgtgggcgtcacccgctacctggccatcgcgcaccaccgcttctatgcagagcgcctggccggctggccgtgcgccgccatgctggtgtgcgccgcctgggcgctggcgctggccgcggccttcccgccagtgctggacggcggtggcgacgacgaggacgcgccgtgcgccctggagcagcggcccgacggcgcccccggcgcgctgggcttcctgctgctgctggccgtggtggtgggcgccacgcacctcgtctacctccgcctgctcttcttcatccacgaccgccgcaagatgcggcccgcgcgcctggtgcccgccgtcagccacgactggaccttccacggcccgggcgccaccggccaggcggccgccaactggacggcgggcttcggccgcgggcccacgccgcccgcgcttgtgggcatccggcccgcagggccgggccgcggcgcgcgccgcctcctcgtgctggaagaattcaagacggagaagaggctgtgcaagatgttctacgccgtcacgctgctcttcctgctcctctgggggccctacgtcgtggccagctacctgcgggtcctggtgcggcccggcgccgtcccccaggcctacctgacggcctccgtgtggctgaccttcgcgcaggccggcatca

SEQ ID NO: 9517 - DNA, 6000 bp, Homo sapiens
cttattagtatagagttatgagtatgaattgtgggcctcccaaaaataacttttcaaaaaaaaatcttattgcagataagaaactaatataatcaattaatttaattattaataaacttaagagtcttcattgagagagtcctcttctcatcactatccgtcatacttattatgaggccatgataatgatatttttcacatttattggtttgcaagttgcttctgattcaacaagatgtgccaagtgaaaacataagcataagttgacaaaaaatgtgctgcattaacttagaaacatctcttcatattagtttatgatgtgacaaagatcccaggactgaatagaaaatggaagctgtctaagaagtttgtgaaaagtccctactctgcggaaataactcaaaattcaagcatgattcatcccagatctataatcatttattgaccatctattgcttgccagacactctgctggatgccaaggacaccaacataaataaacataatttttgttatgcacaacctaaattcagattaaatctgctatttcgaagaaatctaaagtatatattcctagaatagtaacatcatttctatctatatattagttaccaatggaaataagccagtaaattaagtggggggccctcataataatgaatacgtgccacttagtttggcatgatgtgatattacattatatagtactaaattctccaagtaactgagaatttaaaaataaaaataaactcctagagtataaacagtataatcgtttttcttaaacttaactatttgactttgcactttaagaaatggacaagataatgtatctaacaagtgaatatataatgacaccgtttgactgatgagattaatgagaaataattagttgcttcatgctctttgccatttattctgggacatatcagcagagcatgtgtgaatcaaaggcttcgtatccagggatttctttcttctgtgctatatgcatgtaatctgatgagtctccacctgatatggtggttgacagggaagaggccgaagtaatataatcataagttcaataagcctaataggggtggctctattattaaatcttcagcctgcttgtgaagcagaggctgcaagccacagcaaataataatggattcactcaagcagatgtttcagtagagaaaacctttctctgtcttcatcttcaacacctgaaccagttctgagcataactcaggaattggaacatagaataagcagggcctagaaatctaaattaattcctcaaattttgtgatattcagactaaaagacttccacaaatttcaaattctgaggtaacttttaagccttttttaaaaattagtcaaaataataacaaagcataatatataatgttggttaacttatataaattagaacagtgattctaaactttagtgtgtataagaatcacctcgaatgcttgttaaatataaagtcctagacttcttccccaatgattctgactgaggacatctagaatagggtctggcaatctacagctcagcaggtgtccctgatgactctaatctgggtaaaacgatctggcatccacaggttcaaaacaatggctttaagagtcctaaaagaactttagttgggtaacttctgtatgctagaggccagtccagagataatgaatggactctgtcttcaggttgctcattatcagctccaggggtcagatacaaagacaactaacagtgtgaaaagagacaagtactttgtaaccagtatttttaaagttcttaggaaatacaaaggaagaagcagttatttctgccaggagtcatggaggaaagttgagtgttattttctgagaaaaagaattccaaagatgtggcatatatgctctaattcagttactaatacttatatattattctttttttttttgccatcattctgtttacattgacttttcatatgtttatggaacccagtgttgcttttgagttttgatctatgtgtaggtttctattttattgttagtatcttcatgtttattttaaagaaaactcaaagtcctaaaattgaccgttgcaccagcttatttacaaccccactttagccagctttattgtggattctgtcttgtactagcattgtactctgaggtactaaaagactggcactatgctatgtgaacgtttttggcttaaaacatttaatttgttttctgatttgggtacaaagatgctgttgatccaaggtgggtattctcacattgtaacattctaccattaaatatcatacttcaaggtggccacataatgataaagcaaactattttatctacaactgcttcaatagtttgctgaggaaattggatttgagatagtttacatcagcggtccagcaacttttgaaatttgaaaaaaaaaatttaagggatacagaatgaatgtgcagccaaatattttcctctacagtatgagcatgaactctttttccattttataatacctttatgttgaattcttgagacatatcaaaggattaaaaaaaagaagaaaaaccgtagacccagaatcaaccttattttctcaaatgccaaaagaacttatgattgtagggtacaaaattctaatattaaaatttcagtacacttaaagaatatatatgattagtactttaacacacaggcacacagatatagatgatatgtttaaatattctatattaccctattaatcttttttgagtaaatattgtcctacttcaatttttgacaaaatgaattattctattaaataattaaagcttacccagtgggaaagatttctgtcccagaaatgtcaaagcggttaattagtttctctgatctgtagtctatatttagtaaagaatatgccctccatgaaattaaatgaattgcgcacagcagccagggacacaggagaaggcaggctcaggcccacaaatcaactccagagtgacttctgggactgtcccaggtcagaggagcctttatccttccctgacctcagcttacttgcctaagactcaggtgacactagaccatatcaggaggaagagggaaggaggaagtacaaccggcaggatgattctttttaatatactaattactgaagaaataacaattcagtagggccaggcttggtggcccatgcctgtaatcccagcattctgggaagccaaggcggatagattgctcgagctcaggggttcctgaccagcctgggcaacatggcgaaaacccgtctctacaaagaatacaaaaattagtcgggcatggtggtgcatgcctgtagtcttagctagtcaggaggctggggtgggaggattgcatgggcctggcagtgagctgtgttcaagacactgcactccagcctgggtgacaaagtgagaccctagtgagaccctgtctcaaaaattaaacaaacaaacaaatgaaaaaacaacttaagaaaggacttcaaatgtttaatgactatattttcatctacaaacatacatttttctatgaatagcaatatcaacctgaaactagaattctgaagattaaatcagataggagagaagaatagtgcaagagagccttgagtcactttgaccagtaaagagctgaaataaatggagtccgtttcaaaatgtgttatattttactatggtcatcataatataaaaggaaacatatgagagaaaaatgtgatagaattctttctgttttagcctgttccccaagtgttttaaatgtactaaaaaatcttcccttttatagtgtccatgctggcacctccatcatgatgtcacttataggtatatctgttgccagatcagcaatcagcaattccaaaagtgatgttcacccatgtgtggaggtaccagaaggccatggctcagaagctaaaaaaatcagtgctacacaggtgtggtataatgaagagaagatcagaggggatccagagtctgatgaagcgtatttgagggttaatagggagaaaatctcctaatcaatgatgttaactcttaacaaaagagaacttcactggttgaattacaatagcagataggagggtaaaaatagcaacttgagattgttaaacctgtgtttgtaagttacataaataacaacaatacctgaagttagaccccaatgaattcatttctactagatatgctggataacaaaaagaattttctgaatcaaacctaataaactacaatttccaaagcaccaactatatgcaagatgctatgcaagttgtagtggaaaacttaaaataataagagcagaaaacgtggtcccagtctttggggggggatttttaaaaacttatgaaacaggattgactacatgtcaaatgaaagagccacatagatggggagactctcatgccctaaatggaatcatgttgtttgacctagttgtatactggtatgatttgggaaacttttcattcactctttacacaatgaaagactagttttcttcctagttcgccaacaaagtaaataaaaagaatacattatcattgccttacaattctaaaagcagaacaatatcttctatgtgaaacagaaggctagatcaaaataaatttcagtgtcaaaagcaaaggaggtctttaaaggaagtgaaaaaatcaagttaattcacttcttaattactggccttaaagaaataaattgaatatcttgaaaaaataactcaaaaagcacctcagtttcacgagcaaatgcaaattaaaaaaaccacaaccacaaccaaccaacaccaatcagagtggtgctccttgtgtgccctttctgaggattggtagaaactgcattttttaatctcggctttcatgtttgtccaagatctttaaagggaggggaaaaaagagagagagaggcaggcactgtataaaagaagcttccttgaggtttctaaaatttatacaaaaacatcatatgtaagtaaactcaccagatttggcatctgctctttggtgatggacccagaagaaacttcagtttatttggattattactatgctacgagcccaaactctgacatcagggagacccactcccatgttccttacacctctgtcttccttccagtcttttacacagctgtgttcctgactggagtgctggggaaccttgttctcatgggagcgttgcatttcaaacccggcagccgaagactgatcgacatctttatcatcaatctggctgcctctgacttcatttttcttgtcacattgcctctctgggtggataaagaagcatctctaggactgtggaggacgggctccttcctgtgcaaagggagctcctacatgatctccgtcaatatgcactgcagtgtcctcctgctcacttgcatgagtgttgaccgctacctggccattgtgtggccagtcgtatccaggaaattcagaaggacagactgtgcatatgtagtctgtgccagcatctggtttatctcctgcctgctggggttgcctactcttctgtccagggagctcacgctgattgatgataagccatactgtgcagagaaaaaggcaactccaattaaactcatatggtccctggtggccttaattttcaccttttttgtccctttgttgagcattgtgacctgctactgttgcattgcaaggaagctgtgtgcccattaccagcaatcaggaaagcacaacaaaaagctgaagaaatctataaagatcatctttattgtcgtggcagcctttcttgtctcctggctgcccttcaatactttcaagttcctggccattgtctctgggttgcggcaagaacactatttaccctcagctattcttcagcttggtatggaggtgagtggacccttggcatttgccaacagctgtgtcaaccctttcatttactatatcttcgacagctacatccgccgggccattgtccactgcttgtgcccttgcctgaaaaactatgactttgggagtagcactgagacatcag

SEQ ID NO: 9518 - DNA, 6000 bp, Homo sapiens
ggaaacttgtatttacaaatcaagttctgggttttgggtgtgctcattgttaacagggtatcactgcttccaggccagagctagagaataggtgtatgtaaatatgtgatatatataaaaaatatgtacaaatgttcatgtgtgtttatataaacacacttttgtgtctacatttatttattgtttatatataatatatattattagatatatttaaaatatataaaatattctctttctctttgtatgtgtgtgtatatatatgtatatacatatacatatatgtatatgtatatacacgtgtatgtatatatgagaatacatatatatatattatgattcatgtggtacattcagttccaacgcaacactataggtttttatgctaaaggcacaataaaaattatttacttcaagtattggcaaaagaaataatatcacatcccttcctttgaaatacttgaatttgttgtattcgtcgtaacagttttcctcctttgcatgagaagttcctgacttcattcatgcatttgtctgacagccctctttcctggaggtattgcttccttcagaattaacggcacgtagcttttctttctctttatttctgatgacctgttttgaaattctcatggaactcccattatctccccttccatgtttgtaatgtccttccccttctcatctatacaggtgggcaatgcagcatgggaagtcagagccagagctctgaaggagaaatttggctcccggcatcctcctgtgcttgcctgtttgatccgtcatcctctttgtagccagtctctgagctccactagctccactaccactgcccatccatgcggggacccccttggttctgtgtctgggctctgactccctgtttcaggcggccactccgtgtggacaccctccccactcagctccggctcgggcttcctgcactgcattgctggcctgcctagatgccctcctgactgctcttggtccctgaaggccaccctcctctccctgctctggctttgattttctacccagggtgctctcctgccctgcttggttgggctctgtctctccgtgacaggtcaccctcccctccccccaccctcatcctattgatgccttctttatcctgcctgggctctggcatctcatgctaggtctccctcttatcaatgcttgcctgcctgcctgcctgcctgcctgcctgccttccttccttccttctttccttccttccttccttccttccttccttccttcctttctttccttccttccttctttctctctctctctctctctctctctttctttctttctttctttctttctttctttctttctttctttctttctttctttctttctttctttcttttttgagacggactctctgtctgtcgccaggctggagtgtaatggcgccatctcggctcactgcaacctccgcctcctggatttaagcaattctcctgcctcagcctcccgagtagctgggattacaggcatgcgccaccacacccagctaatttttgtatttttagtagagatggggtttcgccatgttggccagggtggtcttgaactcctgacctcaggtgatccgcccaccttggcctcccaaagtgctgggattacaggtgtgagccactggccctggcctatcaatgctttctttaccgcactggggctctgacacctactctgggccactgccccactctacccctaccacagacacctgccttgttcttcctcagctaatgactttagaactgaaatgttcaggaagggaaggcctcaactggattgtttaaaatataaagaaatggaagccccacggtttgcccagagtcacacagcaaattagtggcagcatcggtacaaatccagttctccctgagtgtaagttgggtgaagacacggatcttgtcttttgttcactactttatccccagtgcctagcacaatgtctgcattgagtagaatgaaagaataaatgaattatttcctgtttaactcttttccttttcttctttgtcatcttggtatgtgtgtattgtatgtatgtgtaaatactggtgaccctttacacatttgtctcttatcagtagtaattaatgcccttacataaatgtcaacatcttaatttctgtgcctaggaatttcttcaattccatgaatttctggagtttctagctggatagatggcaagccttataaaccttgtcatgtggctaaggacatggaagccctataaagcagcagtcattacagcatcccaggactccaggacttccaccaactgtggaagagaggatgtgtgatcaccatcaaaattagttttctagtcattagactataatcccttcaaaagattcagaaccctacaagagaaaaacaccatcaccagatggcaaacttgagacccaggatcccttccttcagtcacactgttcaactaagaccattctgcagatgaccacacagggcagtgtttctaaagcatgtgttgaagaaccctgtctctgagagatccttcttgagaagaggattctgagttcaaataacattgagaacatacttgcatacatgtcttctctagcagttcacaatggacatgaacattgtgaatgctctaagaaatgctagagtggagaaaactgtttaactttgtgttacctggcttcatccaaaggtacttaaccataaagctcctgtgtagaataataccagtttcagtctcatttcctcattcatgcaaagggcaaacacattatgttacctggggcttttacacagagtgaatgagataaacatgtgtaaagtataaagcaccatccttggtatacactacacatatgataggtgttaattccttttcttagatttatttattatttattgaaaaccattgttttattattgaaaaagttatatatatttatttataataatagaaagaatacacaaggctaaaacttcaaactataaaagggatataaaattttaaaactctctcctacctcagattcctcagattcccaagaggaactttttcatgtacctttccagacattttctgtgcatgtgtatgcagacatatcagaaacagatttttaaagatctattcccagtaaatgaggtaatgggtttgcattcatttgtgttgtacttctgcagcagtacttctaagttcttccattttgtgctacctcaatttgtttttctgaaattcttgggaggggtaaagttagggccttatgtttatagcaaaacatttataaagtgaatgtcacagagaattggaaacccccatagtgtttgggggttaactaaaggtcagtttaagtgtaaagccttttttggtaaagccttgctgaatacttcctgaaggaattaatgggctggtatgtaggtagtaacgggctagtacataggtttccaatttatgatggtttttttcacttctgatttttcaacttcaccatggtgcaaaagcaatatgcattcagtagaaaccatgtttggggtacccatacaaccattctgtttttcactttcactacagtattcaatatatcacatgggatattcgccactttattataaaataggctttgtgatagatgattttgcccaattttatgctattgtatgtgttttgggcacatttaaggtaggctagcctaagcaaggatgttcagcaggttaggtgtatatttaatgcgttttgacttaagatattttttaacttaaggtggatttattgggatgtaatcttattgtaagtcaaggagcacctgcactccataataattaaatatgatgatcttttattttagcagttatgacttgccttataggtggctatatctaggtatctcacccctgagaaattatgagttctttgaggaccctgttcatgtcttgtaccaattcaaacacattaaaggcatttaatatggatttgatgaagcaagggagtgtccagagaagaccagagcatctgttctctctaccaaaacaaaactgtgattgaggaggtgaatgttcatgtatctgttcttccctgtaagggtagagggtagggaaggagaacatgggagcctgggcaggagagggtcagagctgcatctatagagagacaccagtttgtagttactctgatgatgtattagtttcccagggctgctctaataaagtaccacaaactgggtggcttaaacaacataaatttgttgtcttacagtttgggtggctagaagtcaagtcaaggtgtcagcagagccagttccttctgaggactctctcttgtagatggccgtcttctctctctgtctcttcagatcatctttctgtattcatgtctgtgttcagatttcttcttcttatgaggacaccagccatattgattagtgaccaccctaacaaactcgttttaactcgatcacctctgcagtaaccacatctccatgtgaggcctcattctgaggtaccgaaggttaggactccaacatatgaatgttggaggggacacaattcagcccatagcaggtgggttatcatgctgggctttagtgcttgtcaagacccagcctgtgccagtatgcacactcaccaactgcatctgtcaaaatgtaggctccttaaagaaatgcaagcgctaaaaaccatgtgtggtgattgccatttatcctcttattgacaacctagttcatttccccgagagagtgttttgtgtggtctgaagcacctgccagtctatctctgctgtaccctcccaagacaaaaatacaggaagccgagccataggtgactactggcaaccactgcctttgtgatttcctctttggtttcttctattttgttcccttccttcactctgtggcttgtctgggcattcactctttgacccttgtggctagtccctccccttcttctttattgccctgagttatctccctattcccataactctaatcacttttttcatgttctccttgagtgaaggatgaggaaattgaaagcagagtatgcaccttttattaggagattcaaactgcatcctactggattagcctcaaaagtcctaaaatacaaagacatccatctgacagatcactgaggggaggacttgtttttctgttttagaatagtttccgattaaactttttagctcaagaagaaaagaagctagttatttctcacccaggagtggatttgtggtttggcttcaccatggcttcctgccgtgcctggaaccttagggtgctggtggctgtcgtgtgtggactactgactggcatcattttgggactgggcatctggaggattgtgatcaggatccaaagaggtaatgttgtcctgctatgtttaactcagagtaagagaaggtatgggacctctgtccctgccacctggtgcacaagtactgggaggtaccttgtccagtctgaggcattccaccaaggtgccatttatgggatataaaagaccaagtcagttaagcctagcagatggttgaatagaaatgaataggtgtgggtgtgagtgggcagggggaagagtgacataattgaattggcctctttatgctcttttaactccagactgaattggtagaagagtaataattaaaacgattagtaacacacatttaggtctgtttggctaaattcaggaaagggtaaatcgttatgaacaaggacacacacatgcatcaaacacatacacacacatgcataacacacatacaatcaaacatacacagaatggaatttcattttaagagagaagttaaagaaactcatcactaaggtttaagtgaaatgatctcatggtttgcatacaaatttcccactttccagatgtaggaaactaatcaaaaatttaaaaaccatttttaaatgactttcctgattattcaacgaacatttgttagtcccccgctgtgtgccagagctggcctggaaaaggaggacgtgggaggggaag

SEQ ID NO: 9519 - DNA, 6000 bp, Homo sapiens
atgcataccttttgacccagtaattctactgccatatattgctcaacagaaatgcaagcacaggcacaccaagaagtagctacaagaatgttgatagcagcattgttcgtaatagcttataactggaagcaaacttgaatgtccatcaagagtaaaatggttcaataaattgtgatagtcatacaacagaatattatatagcaatgaaaaggaaaaaaactactgcaaaatatggttgaatctcacaaacattgttgaaagaagctagaccaaatgattatttaataaatagttctattaatacaaatataaatgatatatagtgttataaatcaggttagtggttactctgtgggtttcacagaatgaaaaaggctatggagggtttctatagtgctattcaagttgtacagatttctaaatgtgtgctatatttcaataaaataagtaaattaaaacaaaaccgaaaataggctggcacctgagtttcttagagtaatccaagacgagttagggctgtgggtgaaagattgagaaaacactacacttatgagacaagagactgggaatccaggaggaaagatagtcaaggagaaattcacagtagctggattgcctaaaggtttttaaagaacagagtatttaatgttcactttaaaattgtgttctattatgcctgtaatcccagcactttgggatgccgaggcgggtggatcacgaagtcaggagatcgagaccatcctggctaacacggtgaaatcccgtctctactaaaaatataaaacattagccgggcgtggtggcgggcacctgtagtcccagctactcaggaggctaaggcaggagaatggcgtgaacccgagaggcagagcttgcagtgagccgagattacgccactgcactccagcctgggcaacagagcaagactccatctcaaaaaaagaaatacaaaaaaatagccgggcatggtggtgcgtgcctgtaatcccagttactcaggaggctgaggcaggataatagcttgaacccaggaggtggaggttgcagtgagccaagattgtgccactgcactccagcctgggccacagagtgagactccatctaaaaaaaaataacaaaacaaaatttaaaaattaaataaaattgttttcgatgctacaatttgctctaaccactctgtgactccatctccaccaccaattttattgttctcaagccatcagtaaagtttacaacaccccaaaaacgcagggtaaggaaacagtgatggagtaagatgaaagaggggctatgtcatttatgagataggaaagccaaaggaatacctctctgaatagagagcaaaagaagggagggatcacaaggttaggagttcgagacaagcctgaccaacatggtgaaaccccatctctactaaaaatacaaaaattaaccaggcatagtggcatgcacctgtaatcccagctactcaggaggctgaggcaggagaatcgcttgaacctgggagtcagaggttgcagttagccgagattgtgtcactgcactccagcctgggtgacagaacaagactcagtctccaaaaaaaaaaaaaaaaagagggagaagagagctccagactgagagaaggaaatgcaaaggtccaacacagggtatgctgggcacatccaaagaccagcaaggaaaccagtatgtgtgaagacaaggaagctggtagagagatcagagacacagccaggacccacatgatgatggccttaatgggccatgaaatttactgaatttcactctgagacaggaatccattacagacatggttttgagcagggaaatgaccgaatccaattttatttttaaatgtgtcattgcagttgctttgggaagaacagcctgtaggaaggcaaggtcagtgcaggaaaaccagataggaggttttctaagagaaagatgatgccagcttggatagggctggtagtggtggaggtaggaaaaagaggttgagtctggatgtattttgaaagtcaatccatcaggacttgtagatgggttggagatagtaagtgaggaaaagagaggcatcagaggtgtctcagtaaagaatttcctaatccaattgaacaagcttcccctgatgtagctcctccagtggaagcatttagtcctttcactggactgtctgaatggtcttttccctacagcttatctgccctatatgttcccaagtggctttctgttcttagcagtcaggggcccaggtgatgtctactcaccaaatattcttgaaccataaggcaatcagattatggttttgtacattatggattttcagactttatggtttcaaaataaatttcctataccaaagatactttttaactgctggggaccctataaacccttttttccccacacatccattttaatactagtccaaagggttaaaaaaatagcaaggggagctgccttaggggaaacagaggccacacgatatggaatttggggatgggaaatgctggaacatgaaaggaaggaggaacagccccaccatcttggccctcggggatgttaggaatagagggtataccaaaagaaggtgtaagggagtaaatgattgaagtgtaaacctcccaaatgttgtctctttcaaaagttaccttagagagaatctgctagtgctctgttaattataccatggtcacagaggtgctgctattgttctgagcttacttggaaccctttttttggatctgtccaaaaggagtgaatgtaacttgctccaaaatctgtgtttctagaggttagatacctgagaagccctgctgtcaagaatcccagattctcctggttggcaggaactttaaagcttctagccacagcgtttgagctcccaaggctgtccttcagcatcttcccaggcagccctgattcattgtggactgaaacctttctgtcattccttctatccactggtcataatagagtatgggcttgtatttccaaaatttaaacatcactggtcctattagttcttttagatctttctttcaagttgctcatttttctcatataagaaaatttaccttaaatggaaaccacatcactttgtcagtggaaaactatgtcaattggaacttaactgcataaggaataataacagatggaagagaaaacaatgatattaaattctacttaggagctgttgcctagcaaaggttctgagtgagaggcaacctctgtctttgttaaaacaggagattagcaagtgttacagaggggtgcaaagacaaatactacaaaaatgatactccttccttgacataatccataggaacaaaagaagtaaaaagggcatatcttttttcaccttgtgatccactgttatctaattgtattgtctgtgtaccacccaataccatgcttccaatctctactggaagatgtacacactgggacacactggtaaagtgatcaagcaccaggactgtaagtcaagctgatcaggttcagctcttggctctgccaactcctagccacccaaccctaaatacctgaaactgtatgcatcagtttcttcgtctttaaaatggaagcaataatagatcttcagagtaatactttcttaaagatagtgcccaaatttggacattatgcccaggtgtaatccgaccagtgaagagcatcagttcagcctaagattgcagcctcattcgggttttgaactgaactcgttcagcctttgggtgttcacaaagctgtgcttgtagccaactaaaataaaatctaaggtattttgataggcaccactactgagccacatcctccattacttacattgctgggtgtttcggcctgagggaggacttcacatttattcctattaaccagattttgcccccttcactggtgctttagcatttgctcagctccttctcctaccctgtatttgagggaaaggaagccaaatgggcagaacttggccataatgaggatgtgtttgacatgctggatttgagtctgtgttccattgaagaaaagaaatggaaactttgttgagtatccattctatacagggcactttccttgactatttcatttaacactccaaggaccccctgaggtagatgttatcgccattttgcagagaagaaatctgcatttttatttgaagttcttaaacatggtaaacgacccaattttctgctttttgcttaacagtattttgcaaacattttatcatgttacttcatgttttcctattttttttttgctttataaataaatacatactccctccttattctaaaaagaatttgaagcacttctgtcttgatgtttatcattttaatggttgtataatgtcccattaagtcaccctaatttattcaacaaatttcctactgttgacagtttggctctgtttgctttttgtggtttttaaaattattttctgtaacaaatgatcctgctaaaaaaaaaatctccgcacgaatattattttgttctggaaatttccgcaagggtggaatactgcattaaaggggataatatttttggtgtttctttatagagcctagcaaattgcccacccaaaggagtatgctttatttgagagtaaaaagccaaaaacaaacaaacacatacaaaaaaactggttttctacaaaagaaattaattttccacttattcataaaatattctagtgctgtgatgggtggcaggcaccgtgccaggggctagggacaaggataagcaaggccaggtccgggcctccaagcagcgcgctgtggagtcgggtagagtagaccaagtgcaacaggcacctggctgcagccaggaaggaccgcacgccctttcgcgcaggagagtggaaggagggagctgtttgccagcaccgaggtcttgcggcacaggcaacgcttgacctgagtcttgcagaatgagtaagagtttgggcacgcgatttgtatttattttactgtgaatctctggccttatatcagaaaaaaaaaaattgtgccaccctcggcacagagaacgttggtggcgtcgtaagcgccctaagcttctttccatcgccaaggagtaggggtcagggaagaggacagcgggaacaggatttgagagccgggaacccctggctcggcacgggagagggcaggagaggacctaagcgcggggctcgccgtctgctggggacccgagccggcctgtggccctcggggaaccgaagacgcgccctcagcgaccctgaagagtcagctaagctctctgcgggctaaggagacggtgaaggaaccgggactaactggggtaggggttagaaggcagcccgcgagtgggctacgaggggagctgggctcggcagttggggaccccgagggggcaagcgggcggggagcaggagaggggcggagctccggggccggggccggggccgcagcggccgcccagagggtctgcgggggctgctgtggccggacccgaaggcgggcgccgggagcgcagcgagccagacgcgcctctccaagaccgtgaccttggcatagggagcggggctgcgcgcagtcctgagatcagaccagagctcatcctcgtggagacccacggccgaggggccggagctgcctctgtgcgagggagccctggccgcggcgcaggtaggaccggggaacccaaggagggcgggaggaaagcgcccctggtgggggaggggccgtggcggggtctgggggccaagggctccgggccgaacgaggggcacacgccggagcagctccagcctgggagcattgggcgtgaacgtgggggaaagtagggaccagattacaggatcaaggctttccccggctcagaactggattgttcagtgcccctagaaggggcagcgggtcgcccacgcgaatgaacgggagcgcgcaccaaaacgcctgctgttggtagtttcttgtgcctctgccttgtttctgcctgtgatatagtcagaaaggactcgcttgccacgtg

SEQ ID NO: 9520 - DNA, 6000 bp, Homo sapiens
tgggggaccaggagaaagaaagccaaggaagaggaggaggaggaggagaaggaggagaaggatgctgacctagcagctcctctcacagcagctcctctcttgcagaggctgaagagcgatttgtgccctgcaagctaagcccctaatccaccgaggcaaaggcaaagcccctagccgggctcccgagggctgggactcgggtgccccaagatggctgcatccagccatcttggcttagaaagccccccacatgccagcttggccaacacccacaccatgggtttctctggactgcccgacacaaggtgtgggtgctggccaggcctgtgttcaaatcccagctctgcagaggaactttgaccctgcataccccagattcctcagtggtcagtggggagttagaccctcttcatagggggcaggaggagttgttcattcattcaacaaatgtttattgaacacctcctatgggttgtgagctcagaggcagcgatgaacaggccaggctggtcctgcattctagaaatagatgggaagtcagtcaataagtagacaaatgaggccaggtgtggtggcatgcctgtagacccagttactcgggatgctgaggtaggaggatcacttgagcctaggacaggaattcaaggctgcagtaagctatgattgcgccactgcactccagcctgggcaacagagcaagactcatctctaaaaaacatttaaaaattgttttaagaagacaaatgagatagtcgctgatggtaatgactgtgtaaaaactgaacatggctgggtgtggttgctcacacctataatctcagcactttgggaggctgagattacagcctcccaagtggctcccaaggcaggaggatcacttgagcctgggagttagagaacagcttggacaatatagggagagcccaactctacaaaaatgaaaataaattagccaggcatggtggcacacaccaatggtcccagctactcaggggttgaggtggtggaccgcttgagcccaggaggttgaggctgcagtgagccatgatcatgccgctgcactccaacctgagtcacagagtgataccctgtctcaaaaaacaataggccaggtgtggtggctcacgcctgtaaccccagcactttgggaggccgaggcggatggatcacttgagatcaggagttagagaccagcctggctaacatggcaaaatcctgtctgtactaaaaatataaaaattagccaggcatggcagtacatgcctgtagtcctggttacttgggaggctaaggcaggagaatcgcttgaacccaggaagaggaggttgcagtgagccaagatcacaccactgcactccagcttgggtgacagagtgagaccctgtctcaaaacagctaaacctggtgggggtgcctggtgtgtaggatggtcaggggtggtctctccaaggacatgagtgtgagcggagacctgaaggagactcaggaagagattaatactgtcagcaacaaatatattgatcacttacaagcactcccaataatcctattaggtaggcactattatcattcccattttacagagtggagaaccgaagcacactctcgggagggcggggtagctggctgcacccaggctgtgtagcctcagtccagatgtaagggtgggtggaaaagagccttgcccaatgagggagaacagtgaaaccaaggccatagggtctaaagattcacgaaccaggctctcatggagaaagcaggtgaggtttactgtatagatgggtgtgcccctaccccacactgaggcttcctcgtctgagcaaactgaggcccagagaggggaaggaagcaggactaccatggtgactcaaagaccagctagaatccagcctcctctcctcgaggcttccactgccccacgccaggcctgtgtgactcagtctagggcctttccattaccccagctaaacctttctttagtcatttataccatggtgtgaatggctggctggtctttcctgagagctatctttgatgaggggagggaggcatagccaggtttgggaagctgataccccaggaagcccagttgactgtgtgggttatagcccaggctgtcactgatttgtaacgggacctgagcaactctgcagagctaggcctcagtcttttcatctgcaaaatggatatagcagagatggtcagagtaggtgacttcgaatgacccttccagctcactatgagtctgttttcctgaacaaagagcattttttgtttaaaaaaaaatttcttgggccggacacggtggttcactcctataatcctggcactttgggaggccgaggagggtggatcgcttgagccaggagttcaggaccagcctgggcaacatagcgagactccacccctacaaaaaatacaaaaactagtggtgtgcacttgtggtcccagctactcaggaggctgaggtgagaggatcgcttgagcccaggaggcagaggctacagtgagctatgattgtggcactgcactccagcctgggcgacagagaccttgtctcaaaactttttttttcttcgtcaagctttacagaataaagagcactgtcacctcagtgatggctgttagttccccatcaccagggctccatgaggttgcaattgtgaaactcacaaaggaggaacctgagacagagaggggaagtactgagatcatctaggtccattcccccactcactcgttcattcaacaaatattcaggagcaccttctaggtgccaggccctggagacacatcagtgaacaaaacagacatcatcccacctctttccactacaggccaagcaccatgctggtctctgggaaccctgttgtgagcaagacagacccaggcttacccttgtggactcatgttacaggcagggagacgggcacaaaacacaaataaaaagcttccatgctgtcagaagcactatgcaaaaagcaagatgctgaggtactgctaagctgtgtgggatgggggctcagcccggccagggaggggccagttgtgggtcagtcttgacccaaggcatccaggacaccctccttctggccatgagggtccacgtcagaatcaaaccctcaccttaacctcattagcgttgggcataatcaccaggccaagcgccttaaactacgagaggccccatcccacccgccctgccttagccctgccacgtgtgccaaacgctgttagacccaacaccacccaggccaggtagggggctggagcccaggtgggctgcagggaagggggcactcttctgagcagacagatctgggaatcctgggtgggaagagagacagtgagagagagattaagggatatttcccaggcatcagggctttgcactctcaggggtccttccgcctggatgtccttcccctgaagcttcctcctgttgttccgttctcagctcaagctccagcttctcagagaagcctcctgtgttgggagtggctgcgactgaactgtccctactgttattcgctcttctatttgtttgtggtccctgtgccccctcaccccacaaaaacactggcttcttgtgagcaggagcttgctctttcgtgtaccctgtgtgtccccaaggaccaagcaccttgtctgggccacagtaggtgctcaatacacatgttggctggacagtggtcactgagcggccgcacgtcgggcactctcagcacttgcacaggccgccccagacaccccacttcattcctgggaggtgtcatcatgttgcttggacgacggggagagggggacctgccagtgttggcctccattttcccccagtcatctgcccccaaggctctgactactttctttctcacggtacatcctgctattctggaatcggccctcgtggggccacctggtacatggcatttgaggccctcgtggctgattaggcctcccccaacagtgccctgtctgctgcctccagggccagcctccccttcagactggagtcccctgaagggttctgcccctcccctgctctggtagccccctccatcctccctccctccactccatctttgggggcatttgagtcacctttctacaccagtgatctgcccaagccactgctcactttcctctggataaagccaggttccccggcctagcgttcaagacccattacaactgcccccagcccagatcttccccacctagccacctggcaaactgctccttctctcaaaggcccaaacatggcctcccagactgcaacccccaggcagtcaggccctgtctccacaacctcacagccaccctggacggaatctgcttcttcccacatttgagtcctcctcagcccctgagctcctctgggcagggctgtttctttccatctttgtattcccaggggcctgcaaataaatgtttaatgaacgaacaagagagtgaattccaattccatgcaacaaggattgggctcctgggccctaggctatgtgtctggcaccagaaacggaagctgcaggttgcagcccctgccctcatggagctcctcctgtcagaggagtgtggggactggatgactccagaggtaacttgtgggggaacgaacaggtaaggggctgtgtgacgagatgagagactgggagaataaaccagaaagtctctagctgtccagaggacatagcacagaggcccatggtccctatttcaaacccaggccaccagactgagctgggaccttgggacagacaagtcatgcagaagttaggggaccttctcctcccttttcctggatcctgagtacctctcctccctgacctcaggcttcctcctagtgtcaccttggcccctcttagaagccaattaggccctcagtttctgcagcggggattaatatgattatgaacacccccaatctcccagatgctgattcagccaggagcttaggagggggaggtcactttataagggtctgggggggtcagaacccagagtcatccagctggagccctgagtggctgagctcaggccttcgcagcattcttgggtgggagcagccacgggtcagccacaagggccacagccatgaatggcacagaaggccctaacttctacgtgcccttctccaatgcgacgggtgtggtacgcagccccttcgagtacccacagtactacctggctgagccatggcagttctccatgctggccgcctacatgtttctgctgatcgtgctgggcttccccatcaacttcctcacgctctacgtcaccgtccagcacaagaagctgcgcacgcctctcaactacatcctgctcaacctagccgtggctgacctcttcatggtcctaggtggcttcaccagcaccctctacacctctctgcatggatacttcgtcttcgggcccacaggatgcaatttggagggcttctttgccaccctgggcggtatgagccgggtgtgggtggggtgtgcaggagcccgggagcatggaggggtctgggagagtcccgggcttggcggtggtggctgagaggccttctcccttctcctgtcctgtcaatgttatccaaagccctcatatattcagtcaacaaacaccattcatggtgatagccgggctgctgtttgtgcagggctggcactgaacactgccttgatcttatttggagcaatatgcgcttgtctaatttcacagcaagaaaactgagctgaggctcaaagaagtcaagcgccctgctggggcgtcacacagggacgggtgcagagttgagttggaagcccgcatctatctcgggccatgtttgcagcaccaagcctctgtttcccttggagcagctgtgctgagtcagacccaggctgggcactgagggagagctgggcaagccagacccctcctctctgggggcccaagctcagggtgggaagtggattttccattctccagtcattgggtcttccctgtgctgggcaatgggctcggtcccctctg

SEQ ID NO: 9521 - DNA, 6000 bp, Homo sapiens
agatacccaatgtcataaataaaatatattagaggaaatctgaatagaacagagaacatttaaacatatatgctgtgtcacaggccttcatgaatgaaaacagatggcttagataaagtaattttgtttttaatccagacactgtggtatttcaaggctgttcaagtgccaggattaagtcaggctaaaaattacatctccctgatgttagttgatgatttttaatttcttaggcttttacccacaaaatcattttctaacaaaaggagagatgataggtggataaaaaaacatgacctttgagtatagtgtggtttgtaacaattaagaaagtgatgtaaacaattacatactatgaagcatagatagccatccacaaattctcaaggccgtttcttctaccaacatagaatttctgaggtagaacacctgaacttcatttggttttagctttaatactaacaattcaaattggagtaagtactattttacaataaaatttcccttatatgaaaaaagatgttcattgtacaatcccacagttaaagaaaaaaaatcccatgtgttctcttagagtgtgtgttatttttaacagggaaatcttcaaaattcactgaatccatctctaggtttacatctaaataataagaattaagtaataatgttacaagctgctgctattactgttgttactatagaaaatggttagatcaaaataaatcccaaatagagcagagttgaaaattaaaaaaaaccaagacataaaaaaactagaagaaaaataatataatatttattaaatctctgggtgagaaaggattttaaaacttaaaaatgataaatgaaatcaaaatcagacaaagatcaattggtttgtctatataaaactgctgtacattagaaaataaaatttaaaagcaaaaaaaaattgggggggaatgtttcaacatttatgacaaaatgtatgcaatacttagctccctaaattataaagaacacctaaaaatcagtatacagatgggcaaagaacacaattgcaaaaagaggaaataagaataataaaagagatttttaaaattgcttaactttaccactaatcaaataaacgtggagtacagcaataatgaaaacattcaaaagcagtttattatccagtattccacacatgcctggcaagggtaggtaaggggtgctgaatttgttacaagtcatttagaaagcaaagtggtagtaaaacaacacattctattgacaatattttagaaaaacagacatttctatacattattggtagagaacaaagtaataccatccctatggaatacaatttggcaatattcatcaaaattacagattcatcccagcacttttgttggccaggatgggtggattgtttgagtctaggagttggaggccaggctgggcaacatagcaaaatgacagtacaagaggagggatgagaagagggtgtggggagagagattcttcaagaacaagggacattgctatgttagggaggttaagagtaggagccaatttatggtaagcagcaaaatggaatcatagtcagttctaaggaatatgagaagtagaagagagctaaagaagcatcaagtaagtactttgaaaagttgcctaaggtgagtgatgcttctgcctaccctctaagctacatgattatttcacgtattttgtcaaatttccctattaccactgtctctcctagttctatcaggagaaaagggaaaatacaggaaaaggccagccagtcagctagtttcaccatgattcatacactatgatttatacacagcattcatacacacgctaccagaggaagctgctcaatcctgagatcccctatgcctcaagggctttgtatgtgtctgaattagcaaaaacaatgtgtaaattcaaaagatgtaaagattatagcattacaaccgatttgcaataaaggaatcccatttacaaaaaagcttatggttgttgggggtggggtaaataaaggaaagggatagatacttttgaatctataaaagagtatcaagattctataatagatggcatcataaaataaagagatataagagataagatgataaaatagactaaagatctgaatttagaactccagctccattgctaaactttatgtctgtggaggataagttacttaaatatcagttgattgattcatgaatttaatcattattcattaagctggtaccatgagtaaggtaccaagccaaatgctgaggatacagcagggtataagatagctatggaagatagaaaatttaaataagtaccaacaatacagtgaaaagactggtatatctgatctaatctgaaagagttatggaaggcttcctggattaatgttaaggtcagacctaaatctgaattgtaaataggagttagggaactaaaatagggtgggaagagtgctctagacaggaataatagtacttgcaaatgcctaaaagtcagtattgtgtatcatatagaaagatcaaagagattattatctgataattatggaggctgcagttgcagaccagttgttagataataatcaaaatggacagtagaatgtttttattaattcaaaatatttttgagtagtcattatgtgtcaggtattattcttggtactcgggatatatcaatgaacaaagcaaacaaaagtccctgttctgatgaagcttatgttctaatacagggtgaaagacaaattacagcaatcacagcataaatgatatggtgcattagaacatgttaagtgctatgggtctggtggactgggagtccagatggatgagggttattttaagtagagtagtgaagaattgcctcagtgagctggtggtgattgggcaaagacttgaaagagaagaggaagtgagctttgcaattactaagacagagcacattccagcagacagaagagccagcacaaaagccctgataggattgtgactggtatgctctcaaacagcaagaagctgggtatggcagaacaagtaggcaaaggggtgagtagtgtgaaatgaggtcagagagacaatgagggatggaggcagaccttgtgggatcttgtagactactatgagagttcatgatgaagcaattgcaatagaagcaaaaattgacaaatgggacctaattaaactgaagagcttctgcacagcaaaagaaactatcaacagagtaaagagacaacttacagaatgggagaaaatctttgcaaactatgcatctgacaaaggtctaatatccagcatctataagaaatttaaatttacaattaaaaacaaccctattaaaaagtgggcaaaggatgtgaacagacagttctcaaaagaagacatacataccgccaacaatcatatgaaaaaaagctaaacatcactgatcattagagaaatgcaaatcaaaatcacaatgagataccatctcacaccagtcaaaatggctattattaaaaactcaaaaaattacagctgctggtgaggttgtgaagaaaaaggagcacttacaaactgttggtgggagtgtagaaaacagtgtggcaattcctcaaagacctaaagacagaaatatcattcgagccaacaattccattactgggtatatacccaaaggaatataaattattctattataaagacacatgcatgcatatgtccattgcagcactatgcacaatagcaaagacatggaatcaacctaaatatttgcccatcaatgatagactggacaaagaaaatgtggtacatatacagcatggaatactatgtagccataaaaaagaatgagatcatgttctttgcaggcacgtggatggagctggagaccattatccttagcaaactaacaaagggacagaaagctaaatactgcatgttctcacttataagtgggagctaagatgagaacacatggacacatggagggaaacacactggggcctatcaaagggtagagggtggtagagaaagaggatcaggaaaaataactaatgggtactaggctcaatacctgggtgataaaataatctgcacaacaaacccccatgatacatgtttacctgtgtaacaaacttgcatgtgtacccctgaacttaaaagtttttttttaaaaaagagaaaaatagaaaaaatggcatgggtctgaaataatttctgcaggtggagactgagcctggccttgcatgaaaaaatagataactgccatgcaaatttgaggaaagccaagttcaaatagaccatgagggccaaatcagcataaatttctcttctttctctaacttacttgtgtggaaatgtggaaaaaataaacagcctcccagactgaaggattttgaaggttcatattctagctttgggaaaaaaggtaacaagaaagcaagagagtttaaagccatgggaaaatactctgggacaaggatagagaaagtacagtgaagccaggaagactctagtagtttaaataaatattaaatgatgtggcataaaaatgttaaattctattgcaaatacctaatgattacttataatttaatctttgataatttagtcttcaaaaagatattttccttggttaaaatcatatttgctttcttccttaggcaaaataactttagagagtatttctctagatgctacctacaagtgctgcctagatgccctcaggtggattctccttctggttcagcagtcagtagctcagctgcaggcactttcttgtcccctttgactaagtggaaactatgaaaggtctatagtttttgaaaaaagatggattttctcaaatttgtaacctaaaccacttaagaagttgaatttaacttcacagatggttttacaggaaataaaatatcaagtgctcacaaggttaaatttcaggaaagccttcttggatacaagataaaggcggggtgtaaagtgaaaacaaaagtagctggagttaggtcatttgattttatactctgtactcaagactgctcctctctgccgactacaacaggttggtactttatttcttttcttattctgacttgaatatttttttaagcccaaagatcttgtatatttacttatatagatggagtcttgatgcataaaagtttaaatgcttacttgtaaaaaaaaaaaaaagggttacttgaaaatagctgtacagtttaaccttaaatgaaaatcttaatatagcaagaagaaaatacgattttaaatgccattacttgtcggtaaaactttgttaaggagaaaataggttttattataccactttttttcactttcttttacaagtactgattttttttttattctcatggtaattataaagacacttaaaagcgtgtctatatatctgccggaaggatcatttctgcaaataattccatttctactcttttttactcacatttttagtaagattaattcttacttaaaaattcccttccttaatatattataatatttggccatattatttcttatcatcaggttcaagattttctgatgaaagagaaaggaagaacaaggttcatactgtgttaataattaatgcataagaacatgaagaccagagtagtcttccagattggaactttttaagtaactttaatgataaaaagagtcatttaaaaaagttggcacccggtttttacataatgaaagcaattcttctatgtggtgtctttcttcagagccttcttttctttgctatattcattcaaaaaaagttagcaaacataagaacatttcttttgaaaatgtactataagttggcacactgttttaaaaataatattttcattattgattctataagaatatttgagatacttcagaggacaaaaagaacccaaggaaaatagaaaggataagaaaaaggaaaacaaaattcagcactataataaaaacactgaaagtcattattttatacattccaaaacttacgaattctgtgcaagcttatcttaatact

SEQ ID NO: 9522 - DNA, 6000 bp, Homo sapiens
tgcatggggcatcacagttttccgaggtcatgtgcaaatgctgaattggctgctctatactagatgtgcatgggacacaggaacccatcttcttctacatcgcttaggcctttctcccctcgaatctgcatattagaaaagcagaattttggactaaattttgatgattgatggtcatgatttattatgatgattattatttattgttattatttttttgagacggagtcttgctctgtcgcccaggctggagtgcagtggcactatctcggctcactgcaagctccacctcccggggtttcaccgtgttagccaggatggtctcgatctcctgaccttgtgatctgcccaccttggcctcccaaagtgctgggattacaggcatgagccaccgcgcccggcctgatggtcgtgatttaaaagctaatactttttgatcacttctttgtgccaggcatttggcatttaattctctcaaagcttacccaagaatcaacatttattacctgttttataaatgatgaaactaaggctcagagaagttaagtaacttgctgaaagtcacacagctaggacttgctaaagccaggattcagatttcccaagcagtgctggacttagtgctcttaactgttgggccacatccccaaccccaggtttctggtacgtttccccacttggcgcaagggatgctgactgtgcccagcacttttggcaaagtgtgtgctctgcttctaatataagaattcaatgctgttctttaattgaacctataattactgtttcattaagttgggaaaatctctggatcctattgttagcaatcacagaaagtgttccagccgggcatggtagctcatacctgtaatctcagcactttcagaagccgaagcagatggattacatgaggccaggagttcgagaccagcctgggcaacatgtctccactaaaaatacaaaaattagccaggtgtgatggtgcacaactgtagtcccagcaaatcgggaggctgaggtaggaggatcccttgagcccaggaggttgaggctgcagtgaactgagattgagccactgcacattagcctgggcaacagagtgagaccctgtctcaaaaaagaaaaaaaagaaaaaagaaagaaaaagaaaatgtttcattttaaatagaccttcaagaagttcatagcatacatgttcaccagtgaaagcatgtttttccccagtgataagcttaaatatctctgtgatatcaatgctaccattttctcaaggttctaccctgctaggctgccaccacattcctaagaaccacgggaaaaggcatttgctcctccgaagaaattctcagactgatttttcactgtattgtcaggtgagcaaaactttaaaaataatggtaggtaccatattatcattttataacttctatattttgtgtcaaatattatttaaacttgttgtcaccagtcagattattattattattattattattattattattattaattattattatatgttttgagacagagtctcactctgtcgatctcggttcactgcagcttccgcctcctgggttcaggcgattctcctgcctcagcctctcaagtagctggggctacaggagtccgccaccatgcccagcttatttttgtgtttttagcagagacggggtttcgccatgttgccaggctgatctcaaactcctggcttccagtgatccacccgcctcagcctcccacagtgctgggattacaggcaggagccactgcacccagccagattatttttaattaataagaaagtgaaccaggcacagtggctcacgcctgtaatttagcactttgggaggccaaggagggcggatcacttgaggtcaggagttcagaaccagcctgggcaacatggtgaaaccccatgtctactaaaaatatgaagattagctgggcctggtggcaggtgcctgtagtctcagctacttgggagactcgcttgagcccaggaggcagaggttgcagtgagctaagatcacgccactgcaccctagcctgggcgacgacagagtgacagagtgagaccctgtctaaaaaaaaagaaaagaaaagaaagtgagttatttattcagatctatttttattgattagaaaacagatgataagaaaaactccctctttttaagaatgacaaagttacataaataaaggtaagtctgtgctctccaataagtagccacatgtggctacttatttcaaatactaagtagaacatgtggctacttagcatttgaaatttgcctggtttgaattgaaatgtgttgtaagtgtaatgtacaaaccagattctgcgaactcaggacacatacacaaaaaagaatgtaaaatatcccattggcaacttttacatcaattacatgttgaaatgataatattttggatatactgagctaactaaaatataactattaaagttaatttcgcctgttttttttttatcatattaatgtagttgctagaaaatttttaattacatatgtggcttcatattttctactgggcagtattgggttaagtgattacttagggataaaagaaagtattagcatgagtggaatcaagcagttcatagcatacgtgtttaccagtgaaagcattttttttccccagtgataagcttaaatatctctgtgatatcggccaggcacggtggctcacatctgtaatcccagcactttgggaggccgagacgggcagatcatgaggtcaggagatcgagaccatcatggctatcacagtgaaaccccatctctactaaacaaaatacaaaaaattagccgggcgcggtggcgggcacctgtagtcctagctacttgggaggctgaggcaggagaatggcgtgaacccaggaggcggagtttgcagtgagccgagatcacgccactgcactccagcctgggtgatagagcgagactccgtctcaaaataaaaattaaaaaaaataaaaaatatatataaatatgtatatatctgtgatatcaatgctaccgttttctcaaggttctaccttgctaggctgccactacattcctaagaaccacgggaaaaggcatttgctcctccgaagaaattatcagaccaatttctcactactgaacaatgtggaccggggtaacatataaagaacagaaaagtatccaacatttcccgtgttggtttcaaagcagacagcatggttcagagcagcgggcaccggtgcagatcgcccatctccacggcagaggtgatcgtttccagcgcagcggtgcaaagccaaagggcacccacgagttcattacataattcctggtagcatgaggccaagtgtgtatgtgctctaggggaacagtcggaggctctgacaggcagagcaaggcgatcatgactatgttttcacaaagtgtatgctagcagttgtttggaaaaagactgaccagcttttttccccctccttctccctctctcttttttttgcttgtaaacactttggcataatactgaatgacttgtttttaagctgccttagccttgctttgtgaagaaaaagcctgagtatcctttccctgtggggcacaggttgttatttttggagcagaagttcttagcctgatctctgtctagatcaatttctgtcttgatgaggccgaggtctgtgacagctccgagcgtcctccgtggaaggaagcttcctcgcttggtggggcgcatgggcaaagatgttgaggggccacgtctgaaacttcactgctcttggctccacgcgaaggctccttggcattcagagtctgctcgttagattgtgcccttggaacagtcgcgaccgcatgccgtgagtggcgtgctttctgtctttgggatcatggaaaattcttgtctcattcagagcccagacactccaggccaagtcccttcatttcaggaatatggctttttctgcttatactgcttcatggtatgttttgggtggagatggcccctcttttttttttttttttttttgagacggagtctcgctctgtggcccagacgggagtgcagtggcgcaatctcggctcactgcaagctccgcctcccgggttcacgccattctcctgcctcagcctcccgagtagctgggactacaggcgcccgccatcaagcccggctaatttttttttttttttgtattttttttagtagagacggggtttcaccgtgttagccaggatggtctcgatctcctgacctcgtgatccgcccggagatggcccctcttttaacccaaggtactccaggtcacagactcctcagagctaagacagctgcaggatttctgcaagctattcagggtgcatctgccctggccaacactggagtccttagggcctctgggaacacatctcgggactcaaagctcacaacatcccctctgtaacctgctcttcgtgtcaggctgctagaacctgggaggaaactgctctgacttctcacagttcctctgcctgacctgctattcctaggagtttacatagcttgaggctgataggaaacaagtaaaattagaaacagattaaactactgcatcagcaacaaattagatgacaacggtatgatcacttccttggaacacagttctagctagatattcagggtacagggctatgtggagaaagaccctaagatgaagggaccagtgggggaggtggccccggcaggtgtcccagcagctttcgccttggcaggtgggagcatgacctatcgtgtgcagttcctggcgggctatacatagccagtcaaagcttcttacaagagaaacctctttcacaccctccacgggtcccacccacaggccacaggactcactgtaaatcccttggacgttgtctcacccgggaagggaaagcagccagcagccctccagccctcttgtgctttccctgggagtgcgccccgtgctcagccatggtggacatgggggccctggacaacctgatcgccaacaccgcctacctgcaggcccggaagccctcggactgcgacagcaaagagctgcagcggcggcggcgtagcctggccctgcccgggctgcagggctgcgcggagctccgccagaagctgtccctgaacttccacagcctgtgtgagcagcagcccatcggtcgccgcctcttccgtgacttcctagccacagtgcccacgttccgcaaggcggcaaccttcctagaggacgtgcagaactgggagctggccgaggagggacccaccaaagacagcgcgctgcaggggctggtggccacttgtgcgagtgcccctgccccggggaacccgcaacccttcctcagccaggccgtggccaccaagtgccaagcagccaccactgaggaagagcgagtggctgcagtgacgctggccaaggctgaggccatggctttcttgcaagagcagccctttaaggatttcgtgaccagcgccttctacgacaagtttctgcagtggaaactcttcgagatgcaaccagtgtcagacaagtacttcactgagttcagagtgctggggaaaggtggttttggggaggtaagtgtctcccagtagccaggctagaaggtgaagcatagagcatgaaagggggtaatgttgcctttctttttttaaatctcagttacttagaactaatttcagcaccatatgtggaggatttctagccccgtctccccagcccccttctttgtgtgtgccatggtgtgaaataaaacacaaatggcatgagagagacaagcaaaatttatacttggccaagactctgtcatgggtctccattaggaacgtgctgagatgcctggacacttcagagaatgatagcaatgtgtgacagaagatctccgtttcccctaaattgtgataatgaaggcacttcaagaaaaatggatatttaagaaaatactctaactagctgggtgtggtgacatgcctgtaatcccagctacttgg

SEQ ID NO: 9523 - DNA, 6000 bp, Homo sapiens
gttcagcacatattatcaaaaatgaattagctgtggaatttgcatataaactgaaagataaaaggtgaatttgctgtgtttctaggttaattgttagtacttcaaggaacttagaatattttagctgtagtcagatgcttttaacaaataatgtgttttaatttagcagaacaattcctttgagttatgcccagtaccaatagatatgacacatatttttcttaactgtataatcagaaaaaagtcagtaatgcaaaaatttccattaataatgtagctcttaaatgacaaggattttcataggaaaaggaagtagattgcttgagtgcctattttgaatagaccattttccgtggtaaagtaaatttggttaatataatttattgatttctagaagccggaagaattttgagacatgcacaaataccttctgctgtgtttttccttttgctgtttgtcctttattattttgctacatgaaaccattcattgaaaaaggaagtaaccatgtaatcttgcttatatctatccagaaacaccaaaatatcctccccaataatcttgatttgtttcaacttctgggggttgttattattattattgtttctccttacgggtttagaagaaagtcctcgaattagattaattgccctcttctttctctgcttgtgacccttgaagattagcatgacccttaaaccagttttgttttccacacagactttttgggctgttaaatgtggcttgtaaacattcccagagacgttgctaggagaatctttctataaatactttaactatttatttttaacatgtttgatttttatctaaaatgttctattctttttggaagttggaagatttaaattattaaatttgataatcaataagttttataactaataattaaatttagtgttagttttaaatttattttactaaactatataaaattgccatatataaggtaaaaatgttccaatatcaataattttatgtttcaatctaatattttcatctttaccatgagtgactcaggagaataatggagaagagtttggattcaggagtcaaacagataaggcttcaaattatacagccaaatcatgtattagctgtgtatttgtggatcatttatttaatctttattaggccttgatttcttcaactgaaaatgagtgatattaataatatccactgcattaaattattgtgaatattaaaagaatcactgcatacactgtgttattatagagtgaatgctgaaaaaatgttagtagaagttattattaattttttttagacaggatcccactctgccacccaggctggagtaaagtgatgccatcataattcattacagtcttgacatcctgggctcaagtgatcctcccacctcagccacctgagtagctgggactacaggtgtgttccaccactcccagccaattttttcgatttttagtagaggaggtcttgctatgttgcccaggttggttttgaattcctgagctcaagtgaccctcctgctttggcctcccaaagtgctgggattataggtgtgagccaccggacccagcagaagttattactagcattggatttaattaatatttatattatatttcccaccattttctttttcctcttgaatttcctgattagtttgcctggtttacatgaactgctcttcaatttcaagcccattgcattttcaaacattatataatttgatactatgaacattatgagtttgatgggtaggaattattattccccttttccaaacaaggaaatcaggttatgtgattttttttcaaagatcacacaaactagtaaaaggcaaagccaggattagaactcactaatctttttatcatgttggcttttataaggaccttttaaatggatatttctgggcagcaagtattctaacatcaatggcactgaattaccattattattttagagaaagtcttctctcattcattataaatttctgtaatagccaacaattatttagcaactaatatgtacctcatattatacagtgtacgtatatactagtacctcatactatgtagcatatgtacttctgctatatacataacaattcataagattggtaactctcattatccctgttttacaaatacaaaaactgaaagctagtgagtagtgaagccaatatttgaaacaaagcagtttgcctccaggacctatgctcttaaacactgtgttatactacctcttagcaaacagtactacaagcttttaaaaaatatatattttaaaaagtgttcattgttgtacttaactttttttttttttgagacagggtctcactctgtctcccaggttggagggcagtggcacaatcatggctcactgcagcctcggcctccccaggttcaggccatcctcaagcctcccgagtagctgaaactaaaggcacgcaccaccatgccccagctaatttttgcattttttgtagagacagagttttgccactttgcccaggctggtctccaattcttggactcaagtgatccgcctgccttggtctcccaaagtactgaaattacaggtgtgagtcaccatgcccggccagtactgcaaactttcactgcctttcaaacttccattgattctcaagcagtgcatctcaacatgttatatgtaaaaaaaaaaaaaagacaaaacaaaaaaactttgccccctcaaaatttgatgtgctatactgaatagaaatagtttctgaggaggtttctactctcacaggcagaactggctacatatttagtagagcccagtgcaaaagaaatatatggggtcccttgttaagaagttatgaaacattttaattaagaatgtgacagtagagcattaactcaactgtgtgatcttttttgagtgtgaagcactgtgagactacacagtagcataccatgaaacccaccctgctcacagggtcataattctgaatccagccttgttcccgtgcagctatcattttgcagacctgcataaagctttgtagcagaaatactcgtgaccttttagtaagtctttcccagtaacactctagtatctcaactgagagcattcggaggaaacaggaagtaggacttgggagggaaacaaggctaccaggctacagtctagatgacgtgttctatgaaaaaggagaagcatagaccaatttttgtcttagcagccagagtgagatggtagtcaggaagtgggacgaagaaagaggaagctctcgggaactcccaccaccccacaaagggggaattactcttttcttccatcagaatggtggcagaaacctgtgaaatacatccatttgtctttgtttcttggaaggggttcatgttaatttatgtctaaaattaacaagcctggcattggttattcaaatgctttttgcccttttaaaaatatagacaaaaataatgttttaacctttcttccttctaaaagtagaaaagaattgcattactgaaaaatacctgttattaattcttagactttgttgtgcacaagggtattgtcattcaattctgtaggcagtcaagaatcagagtcggtgcttttagaatccaagtacataggcttaagctctggtccctcccgttattgattctgcaatcttgagaaagttaattgacctctctgaaccttagctttttaatctgcaaaatgagaaaaatcttaaataataacaacctcagaggattactatatgcatttgatgcataaaggtacttagtgtaatacctgcctgccacatcacaagaactcaacaaattatagatatttttatttcatgtaaatgcacatgtttgtatacataaatattcatacatgtataaatatattttacacatgtatataaagtgtgtaatatagacacatatgtatgtatatatgtatgtgtatatatacatacatatattttgagttcctgagtttttaagctgtcagatattggtgaggagaaatgcttagttaggaggatgcctgtaacagagcttctttttgggcttctgcctgtcattgctaactcaatattcaacttacatagcatttaaattgaattactgctgcctgcacaattatgggctttcttagtataatccctatgcttcacatcaagaagactgagtgtttacttgaatctaaacctaatataatgcttggaaaaagccaggtgtgcttcctgtctgaaatggtggtaatgtacttccagatgtttttcagagcattgattgggatatataaattgccatctattaaggttattttacttagcatctctctccctaatccctagctatctgatgtatcttttatgtgtttcttgattttaagcacagaaaataaaatggaaaataacttgaagctctagtatctttttgctagtacaccaacatagcatatatccaggtttccctttaaaatttcagttttatagttccctcaaagttattgaaaacagaggtttcgttattatattctcaatacagaattcactaagaaaattaattttaaaaaagaagaaaagcagaggcaactgtattcccaatataagcagtatttaccacttcttattgtgtaaatatgcaaataaaatgaaaataaggaatgcttctctgttgctttggtagtggataaaataagttcaacagtgtttttctaaaaatctatttggtaaatgtgtttcctgtgaaatgagttacttgttttttgtcattcaattgcaaaactgcatgtgaaaataaaataaatgtgaatgtgaaaataaaagcctcacaaaaattcctctgcatgaacatctctgactgggaggtttgactgaataaattattcctgggcttttgaattattaatcttggctgcaggatatgcaaataggatatgcaaataggacactgtaataaccatgtccagtggcacaacactgggtcagaagctatatccagctgctggcagagttcctgtcaagggatcaagtcttccaacagaatggtaagctacatggcaaattgtgcctctcagtgtataaagtaaggccagatttccttctaaaggtgacctgtgagcaattaaggttttcagtattaagtgtttaaattaattctttataaatagatgtaaaacagcaaaataattgaaaaaaaaaagtcatttttatctctacgtttatttttcaacaaattaactgtcttcttttagttgtcaaatactaattttattttatgtaaaaggatttattatatttgctaacatctcaacaacttatatttcaacaaaatagtaattggatttacctaaataaatataactacttatggggaaaaattaaagttcctaaatgatttgaaacaatcatgtatttgatacatacacacacacacacacacacacacacacacacatatacatacatatatatatatatatatatattttttttttttttttttttttttaagacagagtttcactcttgtcacccaggctagagtgtctgagtgccagagtgacacatttacagcatgtgttggctcactgcaacctccgcctctggggttcaagcaattctcctgcctcagcctgcagagtagctaggattacaagcgcccaccaccacgcccggctattttttttggattttttagtagagatggagtttcaccatgttggtcaggttggtctcaaactcctgacctcaggtgatccactcatctcggcctctccaagtgttgggattccaggcatgagccactgtgctggggcataatatttttatgtttagaaaataatgtatttgggggaattttcaggcatcctaaaaattaaatttaacatttatgtgtgtaaaaatgatattacccaataattaatttacttaggaaaaatgaaaaattgcagaaaccatttctattctaccttccataacttttcaaaatgtgtgtggtattcttaaagaag

SEQ ID NO: 9524 - DNA, 6000 bp, Homo sapiens
tattctgtcagccttatgatctctattttaacattaatgctggtcagttgtgtctaaaccataaaagggaggggtataatgagatgtggttgacctcccatcttgtcatggccaggaactcagtttaaggcttttctggggtccccttggccaagagaggttcttttcagtcggtggggggcttaggattttatttttaggtgacaaggcttttctttgggaacaatagtatatctagtgggattatattcaattccatggaacaaaccctgaccttaaacaagtaagggggttgcttttctcgtgtagtaagacatctggagctaggcacagctaggtgggtgcggctccacctttattgtgggctgtcccagagtctaagactactgctccacctccagcctcaaggcaacctcacagcaacctcaaagcaggaaggaaacaggaggctgagaaaaggggtagtacccgcaacaggaaagcaaaaaccttcccaggacttgccagctgacgtcctcctatatctcaatggccagaattgtgtcacgggaccatttcctcctacatctcattggccagaaccatgtcatgtgatcacccctgcgatgacctcgcgaaagtgggcatcttagcttggcacattgcctccctgtacaaaatctgggttctcttagaagttaagaaggcgagaatggatttgaggaggcagttagcagtgccccgtaaagaactgacggatcagggatgtcgggagaggagaagccgcctcggaagtaccactggactctggatttctaggagctctgggcaccactgttgatgcattttgctacaaggaggcagggaaagatagtctttgttccacgaagctctgggcttagcttcagttctattacagccccttaatgacagggatacattctgagaaatgcgtctttaggcaatttcattttgtgaacatggagtgtacttacacaaacttagatggtatagcctactacacacctaagttatatggtatagcctattgcttctaggctgcaaacttccacagcatgtgactgtactgaatactgtaggcaactgtactgaatactgtagacaacggtaagaatttatgtctctaaacatagaagaggcacagtaaaaatacaatataaaagataaaaacggtatacccgtatagagcacttaccatgaatggagcttgcagggctggaagttgctgtgggtgagtgaatgaaaaggcctaggatattactgtccactaccgcagactttataaacactacatttaggctacactaacaataagttaatcttggcttactgtaacttttttactttgtaaactttaaatttttttttaactttttgactcttttgtaataatacgccttaaaacacaaatacgtttcagctgtacaaaaatattttcttctattcttattctataagcttatttttcccattttgaaaatgcatttatttaccttttaaactttttttcttaaaaacaaaggtgcaggcctacacagggtcagtatcatcaagatatcactaggtgataggaatttgtcagctccattctaaccttgtgaggccactgttgtagatgtgatccattgttaaccagaatgtcattgcagcacatgactttattacagaagaaggaaagaatggacagtggggagcaaccaaggtctctgtctgccacagttcctccaccagcccctgagacagagttcccctcaggaggagtctggtatgcggacccatgtacacatcatctctagacagagagacttcagggcagttgttgacatcggcttaagaaatggtgggagagtggcaggcacttggggatgctgaaagtatttgaagataaatccagcctcccagatccgcctggagagaggcattgacagggcagcctggctgctcagagctaccctaccccagccttgtcactagcaatatgtctctccttcctgggtctcagtctcattttcctcttcttttttttttttttttttttttttgagacagagtctcgctcttgtcgcccaggctggagtgcaatggtgtgatctcagctcactgcaacctccgcttcccaggttcaagtgattctcctgcctcagcttcctgagtagctgggattacaggcgcccgccaccatgcctggctaatttttgtatttttagtagagacggggtttcaccatgttggccaggctggtctcaaacttctgacctcatgcagtctgcccacctcagcctcccaaagtgctgagattacaggtgtgagccactgtgcccggctctcattttcctcttctataaaggagagtaataaccctaccttgcagggttggcgtgaggctcgtttgaagttatgtatgtccagctcctgttctatactatccactccctagatgatggttatttttgttatgagtatgatttggcccccatgccctctgctctaactcaactcccatcctctccctctcaggtcttctgacccacttgccattcccttattagaacatgaactctctgcctggctttccacttcccactttgcacacgttggaatcttggcggaagcacctcacatcccgttgaacccggtactcctctgtgattcagttggcctctgcacttctccaggaagttctctctgccactccaggccaggtgaagctgctcctcagtctccctagcaacccacacttaattctatcagggttcttcttgcacccttgggcaattactgagttccttgcaaggctagtccagactctcagtgtataaaccacccttgaggtaactaattccatcttagaaaaaccctccattttatatttcatgggcactttgctaacaaggataagatgttttgcttgacgaacaaattttaaaaaagaacacaaacaagcacactcatccactataagttctcaccagaggaccctctgactgtaaaagagcgaagccttcagcttggctgtcttcactaacaccgtcttgcagtcactcatgataagaactcagaatttgccaccgaaagctctgccacatcaaagactcttccttgcaagaccaccaggcccagaccaggactccctttgtcttcttccctccctttggactggttcattaaccctttctcctcttcttcgtcttgatgttaaatattactttgttgtggaatgtttaatctacaacattcgtatagtgattaagtatactagtatgtatggtttgcaatatttactgacttatggagtggcttgaacctatgtgctctgactacagagtgaatgggaaggactaaggagaattgcctccttgggaactccatgtagctcctggattttgtgattgaaatagcatttaaaaaaaaaaaaagactgacattgtggagagatacaaacgtgtatggacatggtcatctttaatctctaactgctatgacactcagagaggttgagaggctcaggacactccccttgttcaaggctctgcgtgaagaggagaaggaagaaattgtgcaatattttattttattttatttgtttcagatgaagtctgtctctgttgcccaggctggagtgtaatggcgtgatcttggttcactgcaacctctgcctcctgggttcaagtcattctcctgcctcagcctcccaagtagctgggactacaggcatgtgccattacgcccaactaatttttgtatttttagtagaggcagggtttcaccatgttggccaggctggtcttgaactcgtgacctcaagtgatccacccgcctcggcctcccaaagtgctgggattacaggcttgagccactgcgctggcctaattgttcgatattttaaatgtttaaatgaccggcaagtcgtaggtgctcaacaaatatttgttgaatgacaacaaattagcactgttgacacaaaaaaggcaatgcaatatatgggctatttaatatttgcagatttttatttaaaaatctgaattcacagtacactgcaggcggttgcttagaagcatacaagtttcaagaagttctgtcaccctgtgtatactcttttttttttttttttttttttttttttttttttttgatacggagtcttgctgttgctgcccaggctggagtgcagtggtgcggtcttagctcactgcaacctccgcctcctgggttcaagcgattctcgtgcctcagcttcccaaatagctgggattacaggtgcgtgccaccaagcccggctaatttttgtatttttagtagacatggggaccaacgtggaccatgttggccaggctggtctcaaactcctgacctcaagtgatccgcccaccttgacctcccaaagtgctaggattacaggcatgagccaccgcctggccaccctgtgtaaactcttatctggagacaactgccaagtttacatttgcagaggtaagggaaggagaggccctgacccagtggcccccgctcgcccgcctgctggggagatggggagctcctaggacaggggccgggtcctcaagatgtggcatgaggaagggggtctcactgagcccccaagcggctcccgcactgcgcacccctggctgcgtccctctgccagcctcaactcagccctctcctagccggcggggggtgacagtctctgtgatatctttccgtcccgccggcaggcggcgccctccggcccttgtttcgttgggcccggacgggacgtgcgcgctcaaaggttgcccgtctctgacgcccgcatttcctggtctggagccggctgagccacagcagggtcgccgcggggtcccggggccgtgctcccctgcccctcccgggagcgcgcggggcggggcggggcggggcgggaccaggcgggcgagctgggccctcgcccctccctcgggcggtcacctgggcacgggcgctgcaggtgtcggggcctcaaccttgcggagccgacagccatcgatcctcgggtgagtgcgggcgcaggtggagggcgcccggcgctctcgccaccggcgtcccagcctcggggcggcgaacggtccccgcgccgctcccagcctccctggccgggcgttcagcgcgcctgggaggggaaggaatttcctttgcaggaactcaggggctgggggttctctgctacttaagagatccaggagtggagcccggacgcccgagccttcctgcttcgggatggggattaccgcggagccttagcaactggggtctgtcgtgggtttgagggcagggggtctggggaatgggcgtgtcccgcacccagagactcgccaccctctctccaggggagatgctttttaaacatgacaaacccagcaaggttatagaaatgggtgtatgcaactcttcgctctttcctggcgcccagaggtgaatagtctcacacacacgcgcgcgcgcgcgcgtgcgtgcattcattggggccgactttgcctcccctcccctggcctcgagcgttggggacggcgcccccgcccgcgcccgccactgggattaagccccagggccttgcccggctatttgttttccgaggccgttgcgtccgggtaggttcctggatgaccatcctggctggctcaaaattccctctagattacctgcgaccacccccaggaacccggagactgaaactccttttctcacctgcgcaggtggcctcgaggtggtggcagggccgccccctgcagtccggagacgaacgcacggaccgggcctccggaggcaggttcggctggaaggaaccgctctcgcttcgtcctacacttgcgcaaatgtctccggtaaggggaagtgtcgcttaaatcccagagataacccccaccgagaagcatcacaaaagacatgaacgagtgtttagctctcaggattgttattgcttcgagtgaaatggtttcttgtgtgcttttgtgcatttatatataaatataaacatatatgtataca

SEQ ID NO: 9525 - DNA, 6000 bp, Homo sapiens
cctgggatttagcaccttgaagcaattagcacccactgtctcggtgtctgtggatcagggatctggacacgatgccactgggtgcctcttcttcaaggtctttcaaggctgcaggcaaggtattggccagggctgctgtctcctctgaaggctcatcttcaggaggatccccttccaagcttcttcacatgataggattcaggtcctcataggctgttggactgaagacttagtttcccactggctcttgggtgggggcctctctacagagcagcttacaacctggcagctggtttctttcagagcaagcgaacaagagagagaggccatacaagacagatgccatgtcttggaagtgatattcctttacttttgccatattctcttagcgagaagtgagtcctgaggtccggcccacactgaaggagaggagatcctagcagggctggggattatcaggagccctcccaaaggccactgaagagagcagtcaagatggtggatggggtcagctggctgcccagaggtcatctgataaggactaggagctgttagtggccctggcgatagcagatctgggctggccggtgtgtctggagtcagacactacattgaagtgtgttgacaggtaggatgcagggaagtgagaagggtgaatgtgagttactagttggaggctggagtgcttttatgtcacccaaagatgtatgggtcagagaggcattcccaggtgtggaatggactgtgagagctgggacaggcactggagtgggatatggctttttctcagatgagaggttcttggacatgtttaaacactggttgggggcagggtaggagagacagaaaggtgggtggggtgagtaggcagcctctattatggccctgatggcccttgccttctggtattcacacccttgtgtgatctcctcccaacagcataggacagatgtggttggatgttactttggagattcagttacaaaaagactgcagctttgctcactctgagagaaggcagcatccatgtcttgaggacactcaggcagcctgggacaggcttggggagtgaggagctgggaccccagccaacagtcatgctggacttgctccaggacacatcaccttggggtttgctcttcccaggtcagtaggcatccagcgctggggcagctgcttcaggacatcgccgaggacaagtctcctccccattctggttccaccatctgtagcctgtggctttcatcctcaagggctccatgcgaccgctgcacatccaggtactacatctgacccatgtattgagccagctcagctgtgatcaagcgcagcctttttcctccgtaagaactgcccattggcgtagttgtgaactgaggcagaggagctgctgtggcagtggtaggtgatgtggatgtacaacggattgcttacagtctcagtggattgctgctaggcccacccacctgaatttacatattagagggcctgacagaacccagttcatgaggggcagctctggcctcatggtcacttgatgtcccctagtcatctctaccagggtccagtagcctggcagagctgctttgtgaatggtgtctagttctctactatagatgacctggtcttgctccagaaccctagggggtctactttgtggtttttcccaccagagcttgctgtaagcttcacacagcatatcttcccaccatgtatgcctctagtatcatggggtctgtgggtcccatagcctgagggacagcctttgatgtcatgtgacccagagatatgtgggtcagagcagcactcccaggtgtggaatctgctacctccagaacccaaagaggcctctaagcattgtgcttgctcttctgtgatggagtgtgcagggggatgttctggtgtgccccacaccaccagacccctacaaacctcactgatgtggcaagcccctaattcttcatagggtttaatcttctgcccgctggagcacatatgtctcatcaagttttccatgtacttgtcacctcctgctcatccatcctgattagcacattgtcattgacaccatgaaccagtgcagtgttctgcaagacgttcagatggcccagtctccttcagactgtgatgacaaaggatgggaaaggtatcattggcctggggcaagaccatatgtgtgtattgttggccgttcctatgagtgcaaatggtccctgatagggatgaaaaagtgtggtgatcagatggcccctgagaagcgggggccgtgctgatctgtctgtgctagcaatgcacctgcacagcacctgtggtcagggctaccacttggctgaatctgcaatagtccattgccactctgtttatttttataaggtcagactgatgaattaaataggtacatggtgggggataccctccacacgtctttggtcttcaagggtggcaccagtctccgccattttctctggtgtgtgatgttgtttatgtgcttgctctcttggccggggtgggtggtggtgatagtggggtctcagaggctttcacttgacttttactaccatcactctcaccccatagaccaaggaaccagtgcaggcattttgtttactacacaggatgtctatcccagtgatatattgagcttgatcttgatggtcctatgacagttgcacccactttgcttctcacgcctaagcactaccatctggcgtctgttatctggggattgctgtcatccccatggctatcagggagcccagttctgtagcagcatctcctactgtcagccgtggccacccctgagcctgctgtagggtgatgaagaacctgagagtcagatctgtttattaagctactattcatttaatgttgcagatgccacgctctgtcctgtgtgtagtggatactgcagtgaattagccactgcctcagctctcaaaggcagatacctttggttatttcacaaatacaacaaaatcccacagaaacttagatatggggttcaaaactcaagagaagaaaatgcagaattctccaagtctcaaaaggcagaaaaataaaaatagagggtttaagattcttcctggggcctgaaagcttaagatgaataactcctcccttctcaggcccagttccaaggtgcaaggctacttgtgccagcaagatagcagaagcaggacaagagctggctggaagacacctaccgtggtgggaagacatgtacccgtgaagatcgagaaagagtccatccgggtacaacgtagcagttacgtcagactaggacacttcctgtttacaggagactataaaacctttgccgcgtcctcacttggggctgatgccattttaggcctcagcccacctgcacccaggcgctcattaaaacagcatgttgcggccgggcgcggtggctcacgcctgtaatcccagcactttgggaggccgaggcgggtggatcatgaggtcaggagatcgagaccatcctggctaacaaggtgaaaccccgtctctactaaaaatacaaaaaattagccgggcgcggtggcgggcgcctgtagtcccagctactcgggaggctgaggcaggagaatggcgtgaacccgggaagcggagcttgcagtgagccgagattgcgccactgcagtccgcagtccgacctgggcgacagagcgagactccgtctcaaaaaaaaaaaaaaaaaaaaaaaaaaaaacagcatgttgctccacaccgcctcgtgttgtgtgtcggcgcgctcgcagggttcgaaccgatacaagaaccttacagagggtagttattaggcctggtcacacatgtcccatgacttctacttcctggcacatggtagggtggcagtttcctgccctctggaggctagaagcggtggccaattgaatgtgcgtgagagtgatgtgtataactttctgggaggaacttgaggagccactggattccccacggctcattgtggctgtggtcattcgtgattacgcaggccggcattgcccagcctctctggcgaatatagaagcctaaacttaggtatgcacatttgggtgtggtccaggctgggaaagtcccagaggatcacaaggtggtttcttccccaatctccctgtgtttttaggacaggagcaaggagaagaatgggacccaatctcattccagcccagcggtgctgtcgcaaggtgtgagtcttggggtgcctgtaataactgagtgcctacaatctgcacgaggctctgagtcagcctcaggatgctgcaggggacatcctgcagcttggctctcttggctccatcctcatgacgctggaattctataatagggtggggagactggacggggaggcaggtaaatgaaaacaatcaggtgagaattaagatgctcggaaggaaatgagactggacagccgctccagcgagggtgtccacaaaaccctctagaggacatgatgtggcaaggagccagctctgcgggggaacaggtgtagagccaggagcaggaacaagcttggaacagccgagggacagaaacagagacccgcatggcttgagtatggtgaatgcagcatcgatgccaggggataagacaggcgcaatcagggagggctttccagaggaacaggcgtgaagaactgtggaagttagagttggggagaggcgtcctggctgtgtcgcttcctcattgcgcggctttggtcaagttatttgacctctccaagcctcaggtggccctgtaaaaggtgactataatgactgcctagcagggttgctaagaggagtgcccgaggcatggcggcgccgcgtggagcagggcgctgggaggcggcggccctgcggcgtggcgcggctggagcgcgtggcgccggggagggtccccgacacgccttcccccaagctgaccccaggtcacccctgcagggcgcccgaagcgcccgcacgcgagggggcggtccccggaggctccgccccgacggtccggccgcggcccaggccgggaggtggagcgcggctgccgccagctggtccactgacaactgctgccagctggaaggcgcgtagggcgagaggtggcgcgtcctcagctttccagtcttcgattccgcccgctttccgagtgagaaacgcaggcctctctcttccgtgaagcagcgtcttgtctctgcacctcctctgtgctgtctctttaagaggtcagcgggctgctccgcctcttgggaatttgattggtctctcccacttttttttttttttcccccagtgatgacttattcctataggctgctggaggttagagggcgggcctgagtgataacagggactctgggactctgggacttgtgggactgtggccgttttcgcaatttgggctggacgaaaaagacggtcttgctttcccggtcgccgctgtcgggaagggctgcagggtgtccgcgagacccgcggcccggcgagctgaccccgcctcgcctttcctgcctagccctcattccacggagccggtcgcgcccggtccttgcgcgacgcttcccggcccaggccgcctggtctggcgctggaggccggagtcccgcggcctgtgctggatccgcgcacacccagtggcggcggatgggcggccggggcggccggggcggccggtcctgagcgcggcccgggctgtcaggtaaggaggggccttctccccgtctcctgccgcagctagagggggagccccgtccctcgccccggcgggaagcccagccgccgttcccctccttgctccgcgagcggcccatttccgctcgggcgcagctcggacggccaaggcggcgtttgggagggaaggccctggatgtgggaacccacgggaggggtgccgggcagtcgggagtcgctcggggcgcgggggcacgcgaggcccgggagggagccgcacgtagcggcgtcgggctcggccccggctggaggcagtgcgggtggagatccggacctcggcgacccggtccggcgcggg

SEQ ID NO: 9526 - DNA, 6000 bp, Homo sapiens
aattctctgcctcagcctcctgagtagctgggattacgggcacctgccaccatgcctggctaattttcttatttttagtagagacggggtttcaccatcttggccaggctggtcttgaactcctgacctcatgatccactcatcttggcctcctaaagtgctaggattacaggtgtgagccaccatgcctggccaagaatcccactcttaattgaacaataaattggtacaatctttctggaaaactatttgaaaatattatttaacattttgacaaataactttttcctagaaggactgaaccaataatccttcttctaggaaacttcctacaaacatgctagaaaaaatgctcaaaaatatatggacacatacatgctctatagcattgtttttaatagagaaaaactattatcgtaaactaactacatgcccatcagtcgcagcttaactatggtaaatttatgtagcataactgattttaaatttgattggcatgttgttagagaaatgcagatcaaaaccacaatgagacatcatctcacaccagttaaaatggctattacttaaaagtcaaaaaataacagatactggtgaggttgtggagagaagggaacacttacacactactggtgggaaagtaaattagttcagccactgtggaaagcagtttggcttttctcaaaggacttaaaacagaattaccgttcaacccagcaatcccatgactgggtatatacataaaggaataggcgttattctatcatagagacacatgcatgtgtgtgttcatcacagcactattcacaaaagcaaagacacagaagcaacctaaattcttatcattggtatactggataaagaaaatgtggtacatatacaccatgagatactatgcagccacacaaaagaaagagatcgtgtcctttgcaacaacatggatgaagctggaggccattattctaagcaaactaacacaggaacaggaaaccaaacaccagatgttgtcacttgttagtgggagctaaacattgaattcatatggacacaaagaaggaaacaacaaacaccagggcctacattgagggtagtgggtgggaggagggtaaggactgaaaaactacctatccggtaccatgcttatcacctgggtgacaaaataatctgtacaccaaacccctacaaaacacaatttacctatgtaacaaacctgcacatgtacccctgaacctaaaataaagttaaaaaaaaaatcacgtcagtctacatgtactaacatggaatgaaacaaaaatccaatacataaataaatgtaaatatatttgtacacatatattggtatgtatatgtattaactttcactttctactatatatgtttgtatttcaatttttaaacatagtgtgaaatattaaatgttccaaatagcagtgaatttattgcctatctctagctacatgtagatattttctactattgttcttactcagaaaaacagattgttacattaataaaaagtataacttatttcagcttattattaccacttttagtttaccacttttagttactcttgtatggaatttttaaaacaatttcacataatctgagaaagtaccatggtatactttgatgggaagtaaaagtcttttctaagagtatagaagtataggagttcctacttcaattttcatcccaaatgaaagcaaatacttcctcatcttttcacatattatttatatggtactgggccttggactgtcaattttgatgcaactgagaaatcccaaataagactacaaatggaaatagtagtttattcctatctggctagagactgatttctgtgacttttcattttatcttctttgtatcccttctgatcacactgctttcactcaatttacattggcataaagtttcacaagtccattaaacattgtggctgattgtttccttctcacacatcaggaactttcagctcaagaactccagaatttggcaaacaattccactgtcaccctatctatggcttaatcggaggcaagagagtgaggcaggttccaagcatgggctctggaaccagaccaactgtgtgactttacggcagatttgggttgcatgatatggggaaaatggcttaacttctgcatttccttttttctcaactctaaaaatgggaccaatctctggggattgttaaggattaaataagataatataatcacttaaaacagtatagctagtgtgactttactgatttttaactacatttccttagagccctataggatcttaaatgtttagtttattcccatttgataggctcctagcctctgggatctttcactgtatcttctttgattcttctctcctttcgtgagacatcaccatatgtatgcacaacattccaattttctttcaatttcatttaacaagaaacctacatgatacctaccacatgacagacattattctaagcactggtgaatgttcactcattttattcttttaacaacactgtaaagcaaatactattatttatttttattgtaaagataaggcaaccatttcatagtgggcataagcagcttgcctaaggtcataagaaaagaaagaattggaaaaaggaattgagcccaggcactctggcgcctaaacattctgctgagcagcttctcagctgtgtcttcaagggcaaaaggcctccccagcaggcaatagtgctgctgtaaactaaggaaaaatcagctaatacataagaagcacaaacacatagaaatgaatgatctattggatatttactatagtcaaacactttgacatctaccacatttaagagactctatttccataactctagaaacaggcactgtaagtcagttcctctttggaaagtttcccacacttcagtgttttgaaatttgaccaagaagtgatttccagttttcagattatgaaattatcctgcacagaatttatcttgcttaaagaaaaactattccagatcttcctttagattatggatttggggctataggaaaatttacaattaattttgtaggttaaatttctctacttaagaaataaaggattttttttcctctgctgaagcaaacaaaaagatatacatttatgtttaagacatacatgtatgttctattaatgaaatcttgaatctatactcccaaggattaatttatttcagtcaaagagaaatttttcaaactgtgccgttattgggtagtctaatcaaaactattagacactgtattgcctcatattttaaaatgtccagggggatattaagtttttcttctcagaattcaaagccaagtcacccaaaactttgtgatcaactaacactagtctcgtctaactccatggtaacacttgtggcaagaaacatgaaatgaaactcaccatgaactccacatcctccgtaagatctcctaatttccgcttttcctatgcctacctggcaagtagatttctgccatggacaacaactttctctatgcaaaagcaccattacatctttcaaacttgaagagaattaaagcaaaaaaaatgcacagatattggcccaatgttgattgatgaaattcctgaagtcctctgcactcgaaatacaccaaatacaaaaaagatttctaaaaatggccctctactaagtgaaagagtataatatctctatctggatttgcaattcattcccatggcaatgggactaaaagccactaaaagtggctaacattttttagtgcctcctatatgtcaagcactattccaggcaaccaattcattcttaataacacagtgtgttagatactattttcaaacccattacacagatgaggaaattgagacacagagctgttgaatcatttatctataatctaatcccaattaattggtggaactgggattctaactccaaaaatctggatctaatagtcttcacctctcagaaaacatcatgttaactctcagagatccccaaaccagaagactaagtcaaatacctacaaaaataaacataccgtcttcctgaacacaaattactggaaaatccagtttacaaggatacagaagattattctgtctgattttaggtagtcttattctcctacttgattgtaatttgggactattttcttcatctttctactttccactatatacaagaggcactcaaaaagttcactgaacatgcagatcaagaagataaacttcaagaaagttatgaagaaatttaaagataattgcaaataagcttctttattcaagtcacagattaacagtatgaaagtttgaactaaaatagagtattagcaaatgtcccaaaggtctaaatatgaagaggttctaatgggtcacattacataagtaaaaataaggaaggaaatccactataagaaagcagaacatttgcttcacatgctcatttgtaggctgaactaatgactgccgccataagaagacagagagaactgagtatcctcccaaaggtgaatttcaatttttgttattatgagtgtgcttgcttatataaaagaatatgcttaagggaaaaaaggtgctttaaagttaatattctacaaaccatagtttatgagcataagaaattacataatttacagcaatctgatgtattagtaataataatgtattattatctcttaaacagtgttttgttttatggctaacagtagcacctgtgaatgaggcagaacctgttatttggatttcacaaggatgtgaaagtaatggtactgttaaaagtaccaaaaatgtattatatgctttaaaaattctagccagaaaacagtattttccttttcaacacatctattgaaagtgttggataaatgcaggatgttaatatgctataaacataaagtctgtttttaaaaaatagcatttgaaaatcatgaagggctttttgttttcttttgtttgtatatatgtttattggtaacaggtgacactggaagcaatgaacaccacagtgatgcaaggcttcaacagatctgagcggtgccccagagacactcggatagtacagctggtattcccagccctctacacagtggttttcttgaccggcatcctgctgaatactttggctctgtgggtgtttgttcacatccccagctcctccaccttcatcatctacctcaaaaacactttggtggccgacttgataatgacactcatgcttcctttcaaaatcctctctgactcacacctggcaccctggcagctcagagcttttgtgtgtcgtttttcttcggtgatattttatgagaccatgtatgtgggcatcgtgctgttagggctcatagcctttgacagattcctcaagatcatcagacctttgagaaatatttttctaaaaaaacctgtttttgcaaaaacggtctcaatcttcatctggttctttttgttcttcatctccctgccaaatacgatcttgagcaacaaggaagcaacaccatcgtctgtgaaaaagtgtgcttccttaaaggggcctctggggctgaaatggcatcaaatggtaaataacatatgccagtttattttctggactgtttttatcctaatgcttgtgttttatgtggttattgcaaaaaaagtatatgattcttatagaaagtccaaaagtaaggacagaaaaaacaacaaaaagctggaaggcaaagtatttgttgtcgtggctgtcttctttgtgtgttttgctccatttcattttgccagagttccatatactcacagtcaaaccaacaataagactgactgtagactgcaaaatcaactgtttattgctaaagaaacaactctctttttggcagcaactaacatttgtatggatcccttaatatacatattcttatgtaaaaaattcacagaaaagctaccatgtatgcaagggagaaagaccacagcatcaagccaagaaaatcatagcagtcagacagacaacataaccttaggctg

SEQ ID NO: 9527 - DNA, 6000 bp, Homo sapiens
atggaaaaggatctcttctgaattctatttcaaaagactacaagtgtgtcaggaataccaatactgaacgacactcatcactgaaaaagcaccttcagttgctaagactcatgatcatttcatcttagaaggcctttccaatatcttgggtctggagaattacgccagagagccctacagtgcttcagaaccactctttggccaagatggtatttcacttgcaattttccagacatcgttctaaagaagtagacactcccctcatcccccatgcttcctcttccttatagtagctgcaaagcctgtaaggatcacacctgaaggtctcaatttccctaccttccctcatctagtctagccctagaggatggaagagaaacaaaatctcatttccctgcaattttactgaagagcatatctcattgaaaagagggagcttcaggaagaatagaggaagaggggacatgaccagactgacctggggagcaggattggtttcagggctttttcatcagaaaagaacaaaagcccatccacgtggactgacaggctggaaaccccaaatttgagggagtgtcagtctggaccattttaaacttcccttcaagacaaaggaatactggtaggaagactgaatgagaagggggcactgatgctcaagtggcatcctaaagtggtggtggtcatttctaaaatagtattaatcaccaagctatcagctaggaaaagatgtattttagttctcacataggtaaacaataaccaatcatgaatatctgaatgaaatggtgaatatttcttccactgtgcagcaagaatgctgtggaatttcattaaaaatgtctcaaatcctctatcaaatattttccaggttttaatttaatttaaatagaaaaacattttatgcattacttctcaaggtttataaaattatttctaaatcaccatcaaatagatttctgttgtaatgaaaagattattatacgtggggaacactaatagagaaacaagaagtaaaactattttaaattaggcttattttcatcttttataaagtctgaaaacatggtaaagaaggaaaatatatgagggtaagatggaatagtaaaacataaaatctcaggaacatcctattggctatgctaactccaagttttatcaaagaaaaaccaaatagagctttttatgttaatttactgaagatatcaaccacttaaaatacaataaatattttagacatattaaaaatatgtgagagaatgggattgtatagttctaaaaatttcaagtttcaaacccgaggaaattaggaggcactgaaatattaattaaatattacaatggaagcctacaattaaaataaaattattaaaagtggaggacggaaaatcaaaagctttaatcttttgtctgtgacaagtcattgtgtgccattcagttaatgcagaaacctgttaggagaactgtcataacaaaacttatcctgctcttggtaatgtttcgagggatatgatttgggcacgagtaaatctcatactaaatgctaatgagccaaggttctccttcctttccccacttacatcaactcttgagctagatttcgtcttgcgcttccttccttttgttttcttttcttcatctgttgtggtttttccctgatctgacagctcagcggacttcctttctggttcctgagaaactggagatgtgggctcttcctcttcctcctcaggaggcaggggcagtggctggaggtagtaactgcggggcttgggcatggggtgtgtgtgatacagcaggaggtgatgctgctcctcgtacttgatcactcttcggtccactcggactgtcccaaaccaggcccaggacaaaggagctgggttcttctgaccctcaaacaagtcccacggggacaccttctgcttcgtagagacctggagaccctgtgggaaaatagcgctctaagatagcacactcagatcttttccttattcataggccaggcttgtatgggacatggagtcagagaacactttggctggcatgagccctagagaacccgagaatacagcagagagggttacacagctacatcaccggagagcagtggctagaattcagacctttgtaagcccggttctacagttctttaaccacatgatgctctgtttaggcaacagaggcagtctagcatattttattgttaatgtgtatttcctctttttgctaaaaaaattctaaaaatttgttgctaaaaattctaacactgcaaagttaatcttactaaattataaccagttctaaatctctgtaatctatttataattttgaagataatatcaaatttaagagtcaagttatagtcaacctgtaattgggttagtattaacttcaatccaaatctgcatgaacttggttcaatatgtgggccctgtacttaataagccatactctgaatataatattattattagagaattaaattgtagcagcaggaataagtaaagtctttcaactcaagcttatatttactgactctagaaaaaaaaaaacggttaccctctttttattcttaacattaattggtgacatctcttggcacttgccttaaaatgtcaatttaaaaatatttttccttaaatggcccccaaataactactcagtcattccctaagatgtaagtgttactgttgttatctatatgcattcttttatgagtagcttcatctaaaactaaggttcaggccaggcacagtggctcgtgtctgtaatcccaacacttggtgaggctgaggcgggtgggatcacctgaggtaaggactttgagaccagcctggccaacatggtgaaaccccgtctctactaagaatacaaaaaaaggctaggtgtggtggctcacacctgtaatctcagcaatttgggaggctgaggcaggtggatcacgaggtcaggagttcaagaccagcctggccaagatggtgaaactccgtctccactaaaaatacaaaaattagccaggcatgatggcaggcacctgtaatctcagctactcaggaggctgaggcagagaattgcttgaacccgggaggtggaggttgcagtgagccgagatcacgccactgcactccagcctgggtgacagagcaagactctgtcttgaaaaaaaaaaaaaaacaaagacaaaaacaaaaaaaaattagctgggcctggtggtgcatgtctgtaatcccaggtactcaggaggctgagacaggagaatcgtttgaacccgagagacagaggttgcagtgagcaaagatcgcactactgcactccagcctgggcgacagagcgagattccatctcaaaaaatataaataaacaaagtaaaacaaaataaaaccaaggttcaattgccacctgtaaattgactgtttcctaatatttgtcttgagatgagaactttttccttggtgtaaaaaccacacatccaaatggattccagatgtcttactaccaggaagtccgctgacactgcaaactcaaacttgaccatgactttagctttttttctttacacaaactggtattagattctcaggctactctaaattccctggtaaatctgattctttcatgtcttcatataaactctccctttatttgtaccacaattttccctacctcccagctaactcttaatccttcaaaatgactcgtgtcaattttcctggggaccctctattctatcccctaatactctctctgtaccatgtcacacaaatctcattacactgtaattgtctgtctacttcccccttgagggtaggaactctgtctttcatcttggtgattgtggaatgtcggtggttgcttactgttcattaaaagagtaactgaccaattttctcatattttagagaaccatctttaatatcttatataaaacaaatgtccattaaatactgcttgataggaatagagaatatcctaacaattaaaataatttttatttgaaatagcttactacaggaaggtttttttttttttttccccccccagagacagggtctcactttgttgcccaggctagggtgtagtggctattcacaggcatgagcctagcacattgcagccttaaactcctggcttcaagcaatcctcctgcctcagcctcccaagtagctggaactaaagacatgtgccaccatgctcagcttacaagaaatttttcattgataaatatattctgcttctaaatctgaagtataatcagaacttatttatgcaattttttttttacactaagcttttacttagttttctcttggtaggtttccaaaaatttacttaaattcagggaaacattttaagtcctttaaacatataaaacgtagatcttcaaagatatgacctctttatatgataatgccaatgactaagtacacttagaagacaagcatatgccttaaaaacatcaacagcaaaattaatatattttatatatcctatggtaagacaaaaaaaagtatttcatcttttgtaaataaatttatatataagaaaaaacattcactcttgcctgttttttatctatagagtcaaatccagcaattttgtttccttttgtgtcaatcaaggaacccataggttcacaagtgatgacatcacatgtctgtttcggcaaaggtagtaactgtcgaactttgtcaatactttctgatcgcttgtctcctagctctttctaaagaaaaaagagagagagagagagtgagaagtgggacagaaattacaatgaaggcaaaagttaaccagaaggaagttcccctatgaaacatttccctttttatagcttagcgcatgttctttaaccctgaacatgttctacaaggcagttccaaatagagcaatgagtgtttcatttcttctatttaagtagaaaatagaacacatacaaaggcactgttgttacacaacaaacatcatagtgctgaaatgacaaaaatccagggtagtgatcacaatcagaagacaggagctgcagaacagaacactttctcatgtccagggtcagattacaaggtaaccattgatttatttgattggtaatgcatcagatttatttggtttcttttttgcactgttttcttacaatttttttttaaaggagtctgttagtggtcggtcaaatgaatcgatttataaatttcaatgcagatggctattttttcaattacacgtgccagtccaagcatagagttatcctaaatctatctaatgttagtattctggttatatatttaacagtggatttctaaagttctttaaaaaattaaacatgttttataatgtaattgttttcaataaaaaataatcaaggttatgtgcatgtaacttctgggtactaataaggttaggtgaaacaaatagcaaataatcacattaaattaagttgaatacaattaataacatttaatgagtaataaattaaaatgcactagataataaatccataaacaacttgagctcataatacaggctgatctcaaacttactttcagtttctttactaaattcatgtatgcacgcttgttctcttcagatcccccaggggatgcatttgataggtcagaggctaacgttccattgattaaaacacccagcatgtcaagaactgttgtgaataattcactaagaaagaaaataattattttcatcttaaagtgaaactgaaatacacttatttaactgagtatttttattcaaggcacagaatttttaatagcatccaagtaaataagatgtggcagaaatcgccatcagtatatcaaagcttataccatgcatacatgtagcaaaatcaatgtgaagtgataaaaacatacttgttagtgtgcatgtcaacagttcctgaagtaatgatctgaaggagtagcagggcccagtctgtagtccactgggtgctcctctgcaccgtgtcaaacattcctcctacctagcagacaaaatacagtaagatat

SEQ ID NO: 9528 - DNA, 6000 bp, Homo sapiens
aatttcaaatccattatatctttcattttccatatcttttttatcctaataatttgctgatacattttaactaaggcatatattctgagggagcagtatgctgaatgggcaaattaaacaggtctttcaaagaaaagatcttccccatagcatgaccattagaaattctgagagtgaaagaatttatgggttattcttgtgtaatgcaactgacaatttattcaacagaaggttaaaagagtgtgccttttaaagataaatactggactctgggtaaaagtaataatgagaagaaaatcgggagacgtgaaaagttaagctttgcatactagagaggtaaaagataatgcttcagagttctcattttatctaaaccgcagactctttcctagaaaacgtgatgaaaaggatgaacctcctccaaataaagaatataataatgtcttattaaatcacagagatcaaaagaacgtcctgttaatgaagaattaattgaaaaaaaagctgatttttctttggtccacttcaagctatgttgttgaaaatatctcttaacattgtatttcagtgtgtgtgtgggtgtgtttaatgctagtcccttagaattttgtaaatgggtatatgaataagaagtgtagtagttaaataaacctggaaaatactgacgatcaagctttagtaaatgggtgaaccatttcatgtattactcggaagaccatgtggagggtgatttcaagcttggctaactcacagctcagttgcattttcacttccctatcaagaatttatcctttgtcactggtatgctatggtctcctcaggactacaaaatgactggagtagttgcggggtgcgtgggccgggtgtggtgtgggggatttttgacacaattgactaatctctttgtaagaataaataaactttctcagaagttccccagcaaactcttttttttttaatatttattttatttattttattattatactttaagttttagggtacatgtgcataatgtgcaggttagttacatatgtatacatgtgccatgctggtgtgctgcacccattaactcatcatttagcattacatatatctcctaatgctatccctcccccctccccccaccccacaacagtccccggaatgtgatgttccccttcctgtgtccatgtgttctcattgttcagttcccacctatgagtgagaacatgcggtgtttggttttttgtccttgcgatagtttactgagaatgatgatttccagtttcatccatgtccctacaaaggacatgaactcatcattttttatggccgcatagtattccatggtgtatatgtgccacattttcttaatccggtctatcattgttggacacttgggttggttccaagtcattgctattgtgaataatgccgcaataaacatacatgtgcatgtgtctttatagcagcatgatttatagtcctttgggtatatacccagtaatgggatggctgggtcaaatggtatttctagttctagatccctgaggaatcgccacactgacttccacaatggcaaactctttccttatatctcattggctagaattgtatcctatcccttgttcctaaaccagttcttgcagaggagattggattggcttagacaaatcaggattaactcagtgaaaagtccagaaatccttactcacattggtggcctccaatatctgaacagaatcagatttcagttgggagaggaggagtagggatggtatatgagtagtcaaagactcagaggttggcaaataattgtgactgccacactagggaaaataaagcctaagtcctttttataaaacataaacttgtcacttctgattttgttgatataaggctacattttcaagtcctattagctccaaagacaaatttaatacgtaagtcttctcagagcctttaatatgttaacatacctggagactctctgagagagggataaagcctgcaatgtttcacagataataaaatattttattatgtaaaataatgcaattatttttcaaggcattctctccaggatgattgtctttattagtgtagtttagaaatgggtcccctcaattattagtctgaacctatttcatagtatatattttataatggtcgaaatgcctccgagattgccttttctaagttctataaaaaataagagaaatttataaagtagcaggttataaaattcatattaaaaatgaatagccttaaaaaataaatatagtaaaatggtaatgttagaatttagttagtgggttcactctaaagttcttttaacattgctcaatgtttgaaatttttcataatagaaagttggaaaacagtaaaacagccacaacgtagcaaaaaatagcttttatatatagatgaaataccagtaaaatgattcatgaaaaataacaccatacttataatagcaaaaatgaataaaacatcttggctaactttgcaagaaacattcaaaacctatgtgagaaaaactttaaacactattgagagaagcaaaagtagacttgagcaaacgaagatacagataggaagattcaacttcagcaaggcttctgttctaggtgagtttatttttaaatacaacagaaacccaataaatggaccaccaagttgctagattttctttctgaagataatggttaataaattttattggaagaaataaattattcagaaaaatctttaaaaatcaacaaatctggcacagaggggcttgctctgtcagttattaaaatatgttataaagcctttataattgaaactctagtttggtgcatggatagagaaagtaaaccatgaaacagattttaaaatatccagaaatttgacccagtcgcatatggaaatttgacatatagtaaaggcagaacctcaaatcagcaagagaaggtaaactgtcatgtattacaataactgcatagctatatggtaagagataaaattttgattcatttctcacattgcataacaaaatacgttccaagtgagtcaaatatttaacttaaaaaattatagagtactaagagaaaacatggatgaaaacttctgtactctggaagtgggctcatttttttctaaccatgattcaaaatccagaagtattaacagaaaattaaatcaatgcattttattagaaagaaatgaataaatttttatttggaaaaagatacctaaaggaggtaaaagaataatgacaaactgggaaaaatatttgcaacttaatctcaaagagttaatatatctaattaaatttaaaaagagaagagaatggccaataactttttatcagaatggcttatttatgaacagtttacaaaaaaagaaacaagtttcatctttccacatgaaagaagctcattttcctttataacaagaaaaatgcaaataaaaatacactgtggtagcctttctcacgtacctgattgacacaaattaaagttcgacagcatactctgttgctgaggttgcagggaaacaaacattcaaatccattgctggtgggacagcaaaatgacacaacccttttagagtggaatttgccaatatatataaaaaatacacatgaatttaccctttgacaaaactcctccacttctcaaaattcttccccaaaatactcaggcagaacatgaaaaacacatacaggcatatgcagaaggctgttctatactttttagactgttagacatgattgttattctaagaatgttatctgtatattatgggataaagcaaatgaataatcataacagtatcattaagaaccaagattgtcctcatgagagaaaggaagtagagatttaagagtgtcaaggttaagcaaaaactctgtagtcctgaatttgaatgggaaatagctgcataaattcatgataaattttatctttaaaaaaaaatcctatactatatacactgaaaaaccctagatcccgtgacaggcagtgagcataaagttgatttggtatttaaatgagatacatataaaacacaactctctggcatatgagatattaatggtgctctgaaatggaaaaatacaaattcaagtaaatttgggaaattctgaatttccctcttggaggttacattttatgttatatgttaaatgttctggaaaagtcagtgaagcaacctaaaacattttagcacagtggctgtccggaaccctttgtgtgttttgcaggaaaaggggttgaggttgtagaactcttattgtgaggttgtagaactcttattgtttcttcactacacaaatgtgccgtaggaaacaatttggaaaatattgctgtgaaagtgaaatgcaatttgtggataattcttcttcatagagggacaagaggtctagagagagctactggtgtcgtgtacttaatgaatgcataatttaatgcaacaagtgttatttagtatctactggatgctaaaggctatgttcaatggtggggatccaaaggtaaaaacaagaaaaatgtcttggacacctggtagagcattaaaatatgattctatattgacagtgctataagcaagatttgaaatgttttacgggaatgttgaattgcgactgagcgcctcggtgtgacaaacagttgggaattaagtatgatggtgaaagcaaagaggaaggatctccctggcaaagtaaacagcatgagcaaagatagtttaacagcaacaatagtcacacctatctggaagaataaaggaaaataaatgtgagagggtaggcagggtccaggtaatgaaaagaatgtgggctttggggtctgacaagcctgggccatcatcattgctctacctgtaaatgacctttggaaggtgatttaacctctataaggctcagctttcccactggtatcataaggataaaaaaaattacctcacaaagtgatgatgacataaaaatcccacatccacagctttcaacacagtgtgggcacttagtcaatatcagttgttatcattattaggcagatgggagcaaaatggtaaatatctactgtgaccagtgaaagggatctggatttaatctgtagtcagcagacagccattgagggactcttagtgtaggaatgatgtgactagctctgtagtttgcaaaggtgaacgtggaggaatgaatggatgaaaggagacattgagcattgcacgtgatggaaaatggtgggaggcataaagaggccattggtggagtgtttgacactgttcagtacttcacaggtaggactgctagaattcattagacttacatatgtgagagctgggattgtgaaagggaagagaaagaaaacggacatcagtgtttctagcctgagcatctgaatctccagtaatactaacaatcgagacaggcaacagagacggtacaataggtgtgtagaaagtaatgaattcaggtgtggaatttagtttgttttctgtcattatccatttgacctttctagagtaagcgagcttttcaggttcgaatgtggcaacccagcttctgatctcaaagatccttttattctaagggaccactatattttgaatagtatgtaaggtgtcacaaagtaaaatactacaagctattagagaaacctaacatggtagctggatatggataccaactggctatcacgtggtaggcaaatgtggcttgaattactgtatttatcgaagcagtgttttctttaagcataattgaaagtttacttttaaatttggacattctactcaatgccaatttgtgtgtgtgtgtgtgtgtgtgtgtgtgtttcttgttttaatgtgcaggacaggagagaattggaaaagattccaactatgagcaggagggtaaagtccagttcgtgattgacgcagtctatgctatggctcacgcccttcaccacatgaacaaggatctctgtgctgactaccggggtgtctgcccagagatggagcaagctggaggcaagaagttgctga

SEQ ID NO: 9529 - DNA, 6000 bp, Homo sapiens
gaaaaagactcttttttgggggctgaggtccttttttttggatgtttaattttgaaacccttactgaagggacacctacttagtgtttctccaggacagtaatgttgttactttgccaacctgaagactgactgtccccagggcagtaacctctgcaacttggaaacctgaaacctgttttttacctgaaccctgacttggaaattgaatgtggcccaaaaagtctaaatccaaatatttcctgggatcccagcaatggccaagggcatgctctgggctaggctatttcaagagaggaagctattcctgtgtatagtatttatcctactcatttctaatcactgctgctgcgttgttgaacacctgtatataccagccactatgctaagtgctttacaaatattagctcatttagttccctcacagtcctcaagtattatcatccctttttacagataagaaaatttaggtttacacagctagtaagtggtgatactgagatccaaactcagactcaaagcaagtcctctcgaccaatggggccactagagctcacactctgcctcactcatgggaccaggatgcatgtctcatggccaggttcactcaagggaggactaactggctctccagggatcatctatagacccatatggatcaatgctcatttatgatgatttggacctctagatagcgtatgttctagaaccttaacactgcccccacccagggcagaacccatggagatgtaggcgttgtgctcagatgaacttgcccaggtccctgccgcggcacgtgctttcctgcccttcacacttcgcccccggccagctctctaacttgtacctcaaagtctataatttaatggcagaaacttcttcaggccccatgtttctggaaatatgttcattttataaattactctgtataatgggcatagattagctggtcaaatacacgtgggacattttcattgcaaatcctccttccagaggctcaggatgatatcagcattggaaggcccccaggaagcattgcaggatggaactgtgtttaacctgaacccaagcccagcattccctagacctacctgaccacacatccccatttctcttttgcaggctatccatgaatctggttccacagtttatactctggggaacattgctctagctcattgctctagctcaggatttctcaacctcagcaccattgatcttcttggtcagacaactctttgctgtggtgggctgtcctgtgcattgtaggactttagcagcattcctggactctacccattagaaaccagtagcaggctgggtgcggtggctcatgcctataatcccagcactttgggaggctgaggcaggcagatcacctgaggtcaggagttcaagaccatcctggccaacatggtgaaaccccgtctctactgaaatacaaaaaattagccggacatggtggcgcgtgcctgtagtcccagctacttgggaggctgaggcaggggagttgcttgaacccgggaggcggaggttgcagtgagctgagatcatgccactgcactccagcctggtgacagagcaagactccttctcaaaaaaaaaaaaaaaaagccagtagtaactccctcccaccccaagctaaaatgtctccagatattgctgtatgcctcaaggaggcaaggagcctgagttgagtgcctctactctctactctaactcgtgcattctcagtagaggcaatattgcccccaagataaaacttggctcttggagggagaaaaatttcatactcattttatgtataaagcacagatatacatacactgtataaatagatatatggtatgtttgtagcattaaaattttatgagggagtgttaggaaaaaaagtctcaaaagactccttggggcaagtgataatgaaaaaaaagaaggggttccctaacaccattctagctcagtgttttaatttctatttatgccaattccttagaaagaatgatctttatggctcttttaagctgaatcaaagagctaagcaacagttgaaacacagggaaagcatctggaagttgccaaaaagctgaggctatgagagacttagggctcatgtcagcccctcgcttatgactgctacccacatccaaagtgaagatcaagacctcagccaagaccactgccaatgaagctccgcaatccccaagcagaaggcgcttgggtgaggggtcttcctgactcaaaaggacttgaagctatgttgccaggccacttcacactggtttgaggccatgtcaactattgaatcaaagaatgtggttggctgatgccttccaagtcactcacagacacatacatttggacaaatttttctcttctctcttcttgaatatcctttttcttgactatctctggccttccttctcaccctggcctctcagatcccagttgtcaggagaacattgcacatcttgattgctggcccctgcatatccatgatgagaaactagcaaacaggttgctgatccaaaatgtagagatcattgctaccgcatatggccagttaaatggaatttttttttttaaactaaaaagcgaaaaaggagtggctgattcctgtaatcccagtgctttaggaagctgaggtgggaggattgcttgaggccagtagttcaagatgagcctgggcaatatagcaagacccctatctccccaaaaattaaaattagtcagtcatggtggcttgcacctctagtctcagctacttgggagactaaggcaggaggatcacttgagcccaggagttcaaggttacggtgagctatgattgcaccactgaacaccagtctgggtgacagagtgagaccctgtttctttaaaaaaatctcttttttaaaaaccaacaaatacatttttgtatttttaaaaaaactaaaaatcttttttaaaaagaaaatgacttcattttttttcttaatctttttttggcacatcttcttggccttcggtcttgggaaatgactaagaatcattttctgcttcctacttctatcaaaaaaccccacttgaacttagtacagttgggtgagggagataactcgtgctcacaggaagccacgcacccttgaaaggcaccgggtccttcttagcatcgtgcttcctgagcaagcctggcattgcctcacagaccttcctcagagccgctttcagaaaagcaaggtaagcagggacggggacattcccagggtcttgggtcgcacactgctttctggacctggctgagatgctcaggcccctcacgagtctagggcttacacttggcacctaccttgcagcccacacaccttctacctgtccccacaccctctgagccctcatctgatgggcactaatttatgcaggactctcttcctgcacacatctggcctgagtccacatgccccaaataaatagatcattttcataaaaaatatacacttgtctgcttcttgcttctagcaagactcccaggcaagaaataccacacacgcaaggcctacagaataattccagacacttaccagctgtgtctcctggctttttgttctcctgataatttcctaactcctcagccttgtttatgcctttcattttcactggtaaaatggtggagaaagactagaattgttagtcattcaacaaacttttttggagactctgtgatgtaacaggtgttcagtatctatttgcatgagtaaaccaaaatcttttttctttctttttttctttttcttttctttcctttttattttttattttttttgagacaggatttcactctgctgcccaggttgaagtgcaatggtgccatcatagctcactgcgccttgaactcctgggctcaagggatcctcctgcctcagcctcctgagtagctggtactatcagcacgtaccaccacacccagctaacttttaaaacaattttttgtagagacagggtctccttatgttgctcacgctggcatggagctccttggctcaagtgatcctccctcctcggcctcccgacgtgctgggattataggcgtgggccactgcacacctggcttcaaaagccctttcttgagaaacacagtttgggcattgggtgtgtggtggtgggggtgtggggagagatcgaatgtgaatttactgacgaatgtgaaaaggattttaacaaggaatgtgagggtcccacaaaagcctcaagaaggaagcaagggagtggccttgagtcggaaagcccttcagccctgaattgctctgatacacatgtcagcatgtgattaattttaagaagatttcaacctctttatctgccaatttagataggaagtgaaggtggttggggaggtagaggttttatttctggctgtgatgtgtgttttctagatccatcaggtgaattcccactctaataggattctgtgcgtagaattgatttttacgtgcagtttgatgatgatcatgatcatataaaatacacccaattgagaattgttcaactgattttgtcatccctgaaagtgatttcagtaaccccagactatgaaatatctttttgaaacacatcctcaaagaacacctgcttgaaagggggttttacgatcctcacttacaaatgagagaactgaagctcctggcagagaggtaagaaaattagtgagtgcccaagctggaatctgaaacaaatctttctgcctccaaagcccaaaattatttcgtctggctgcagggccctgtgagtaatcgagcccttcatcttgggaaaggcatatacagacctggagcaaaacagtacgcagccatgctctgcatttagcaatactttggtttatttttgttctcacagaaatctcctttgctcttcccctcattagctgcttctggttgggcccagacctgccttgaggagcctgtagagttaaaaaatgaaccccacggatatagcagacaccaccctcgatgaaagcatatacagcaattactatctgtatgaaagtatccccaagccttgcaccaaagaaggcatcaaggcatttggggagctcttcctgcccccactgtattccttggtttttgtatttggtctgcttggaaattctgtggtggttctggtcctgttcaaatacaagcggctcaggtccatgactgatgtgtacctgctcaaccttgccatctcggatctgctcttcgtgttttccctccctttttggggctactatgcagcagaccagtgggtttttgggctaggtctgtgcaagatgatttcctggatgtacttggtgggcttttacagtggcatattctttgtcatgctcatgagcattgatagatacctggcaattgtgcacgcggtgttttccttgagggcaaggaccttgacttatggggtcatcaccagtttggctacatggtcagtggctgtgttcgcctcccttcctggctttctgttcagcacttgttatactgagcgcaaccatacctactgcaaaaccaagtactctctcaactccacgacgtggaaggttctcagctccctggaaatcaacattctcggattggtgatccccttagggatcatgctgttttgctactccatgatcatcaggaccttgcagcattgtaaaaatgagaagaagaacaaggcggtgaagatgatctttgccgtggtggtcctcttccttgggttctggacaccttacaacatagtgctcttcctagagaccctggtggagctagaagtccttcaggactgcacctttgaaagatacttggactatgccatccaggccacagaaactctggcttttgttcactgctgccttaatcccatcatctacttttttctgggggagaaatttcgcaagtacatcctacagctcttcaaaacctgcaggggcctttttgtgctctgccaatactgtgggctcctccaaatttactctgctgacacccccagctcatcttacacgcagtcc

SEQ ID NO: 9530 - DNA, 6000 bp, Homo sapiens
agagaaaagttgaaagcattccctctgagaattggaacaagacaagaatgcccactttcaccacttctatttaacatagtatcagaagtcatagccagagcaatcagacaagagaaagaaataaaaggctttattgtttattcaaaacaataaagaggaagttaaactgtcactattcaccaatgatatgatcatatacctagaaaaccctaaaaaccaattcaaaaagctcctagatctgataaatgaatttagtaaagttttgggatacaaaattgatgtgcacaaatcaatagcactgctctacaccaacaacgaccaagttgagaagcaaatcaagaactcaatcccttttatgacagctgcaaaaataaaaataaaaataaaaataaaatacttaagaatatacctgaccaaggaggtgaaagatctctacaaggaaaaccacaaaatactgctgaaagaaatcaccaatgacacaaactaattggaaatataactaatgctcatggatgggtagaatcaatattgtgaaaatgaccacactgccaaaagcaatttacagattcagtgcaattcccatcaaagtaccatcattattcttcatagaactagaaaaaagcaatcctaaagtccatatggaaccaagaaaaaccccacatagccaaagcaaaactaagcaaaaagaccaaatttggaggcatcatattacccaacttcaaactaaactacaaggctatagttatcgaaatggcataaaatactggtataaatataggcatgtagaccaatgcaacagaatagagaacccagaaataaagccaaatactgacagccaactgatcttcaacaaagcaatgaaacataaagtggagaaaggacaccctattcaacaaatggtgctgagataactgacaagccacatgtagaagaatgaaactggatcctcatctctcacattatatgcaaatcaactcaagatggatcaaagtcttaaatcttagacctgaaacctacaaattctagaagataacattggaaaaactcttttaaacgttggcttaggcaaagagttcatgaccaagaacctaaaagcaaatgcaacaaaaacaaaaacaaatagatggaacttaattaaaccgaaaagcttctgcacaacaaaagaaataatcagctgtgtaaacagacaacccacagagtgggagaaaatattcacaaactatgcatccaacaagggactaatatccagaatctacaaagaaccaaaacaaatcagcaagaaataaacaaataatcccaacaaaaaatgggcaaaggacatgtatagacaactctcaaaagaagatatacaaatggccaacaaacatatggaaaaaatgctcaacatcactaattatcagggaaatgcaaatcaaaatcacaatacgataccaccttactccttcaagaataactgtaattaaaaaataaaaaaaaaaatagatgttggagtggatgtggtgaaaagggaacacttttaccctgttggagggaatgtaaactactacaactactatggaaaacagtaagaagattccttaaagaactaaaagtagaactcccatttgatccagcaattccactactgggtatctacccaaaggaaaaaaaaagtcattacatgaaaaagacacctgttcaggagacagatgcaccaaaatctcagaaattaccactaaaaaacttatccatgtaacaaaaaaccacctattccccaaaactattgaaaaaaataaataactaaaacattgtcctaatgagggtccataggcttcaaaagaaggtccatggcagtaaaaaggttcaaacccctgctgtggacagacccccatgaaagagggaagtgatggcctccagttgggaggggtcctcattcaatccttgcagagatgggccagaaaatcttagaaaccaatgttctagggcaggggctggcagccagactgcccagaaaaggactttactccatcttatcttctttctacttattgttttaacttgtacttatggattctgaacttttccactgtgcccagcaaggagcttagcaggtgagggttcctggcagggtggaatagaaacaagagcctgacaggcactagacttagccccttgaattgggattttgggtggtggccaaggactgacagggcagccctcaatttcccagtagggggtccgggagtgatagagtccacattccaggactttcctggagatggaccatgttgggctgtcactgaaggctggtatggcagagccgagaagtgaactcccaggcacgaactgaagtgagtccacagcacctgccctggggagtcagtggctgacaggaggtctttaagctgcacaacctggacccctgtcctcagaaactttgagtagggagcagggcaggcaaaactggcaaactatatgagagatgctaggttggttcctgtctgacctctgcttcttccagagtgtagcagatatttggggcccctcctctgataacagctgcagctgcaggggccagctctataccagccctcaacatcccacctcaacagtcataggtctctccttttgcctgtctcagggctatttttaaaagtcacagagtcagctgggggatgagtgggagatgcagccaggaagtgcaggggagttaattccccagagtgggacccacagataaatggcccagcttcccactcactctgggaggcttctgaggttctcgctgagttgggcccccatcttctgaagcagagagcttgatggcacactccctgctcccttcctgcagcctgctagggtcacctcccaaataaactacctggacccaagtactttgctccaggttctgcttctagggagacccaaactgagatatagtaatagagtttttaagctggacacatgactgcctcttataaaggctatattgctcagctgtgtattttagccatgggtggccatgtgattaagttttggccaatgggatgtgagaagaggtgactgtgcaacttccaaatcactcagttgctaggaaggggcatgccatcttcttcccctttgcctctcttcactgcctggaaagcagaagcagcagtggccatgtggacaaaggtctttacctcctgatattcactcccttgtgtagcctcctcccacattcaaccaagaatggcctctgtgatcaatagaatacggcagaagtgacagtgtatgactctcacagatagtcataaaaggcactctatcttccatttcagtccctggggtctgtcactcaggagaaccagccgccatgacataaggacactcaagtagccctgtggaaaggtctacatggaggaggaaccaaggcctccttccaatagccacgtgagagagaaaatggttgggaatagatagtaccccaaataaacctttagatgactacagccctagctgacatctgactgcaaactcatgacaggtctcaagccaaacctgtccaaccaagtttcttacaaattcctgatcgacagaaaccataagacataataaataatttattaaagccactaagttttaggtcaatttcttatataatactaaataactgctatgggttgaattgtggctctcctgtcaaaaatttacatgttgaagtcctaacccctagtacctcaaaatgtagcattatttgaagtaaatgtctttacagaggtaatccagttaaaataaacttattagagtgggccctagaccagtatgactgatgtccttataaaaaggggaaatttggagacacacagggagaatgccaacgtgaaaatgaaagcagagattgggatgatgcttcttcgagccaaggagtgccaaagattgccagcaactaccagaagctggatgagaggcatgggattctcctagtccttagaaaccaaccctactaacaccctatccttgggctttctggcctccagaactacaagaaaataagtttctgttgtttaatcccccaaacttatggtacttggctacggcagccagagcaaaccagtacaataactgatacagacaacatccaaaggatagtggagtagaaagaccgaagaactctgggcctttcatgtcacagcaagagcctccacaccaactctggcttctctatgcaaaaaaataaatccctgtcttatttaagccgctgttcttcccatctctagcccacgtagctgaagctatatcctcacaaattcagcatctaaaacttcctctcgacatgtgctgtcctgactgatttcacatggaaatgaatccccagaataaagaaataaattgagatcaacactgtcatcaagattgtaaagactgtcttcctttcgcacacagacactgagtgtttcttccagatggaaagcaggtggggttgggtggaaggggatgcaggaagcccttactgtgaaggagcagcacatcctggcaggactgagggggaggtctggaggaaccacactggctctactcactctatggagacagagcagaacatctctctaaggaaaaagaaagggcaccaggtccaggagagactgcccaggagcggaggccaacacaaagattcaaaagaagtgcttctttctgtcctgggctaaaacgaaccacacgtacattcccattccttcccaagatggcctcttccattctgctgtccctgaacaacttgaggactggggagttggagttggaacttgcagtattaaaactctttctgtttcacttaacatgaagccaacgtatactggcctaagcaaagaagagatttatataacagaaacagaaaagttcacagggcttccggtgcaactggattcaggaactcaaacaatgtcatcagaaatctgtctatctctatcgcttggatctgatttccttgtgtttgctcaaatctcaagcaggtaaatatgccacagcagcagcaagcttgcattttcccagcttactagtggaaaagcagcttctttcccacagttccagcaaaagccccagggctgatgctcattggcccaggttggggcatgtgaccattggcaagactcccattggccaggcctggggcaggtgctcactactggagccagagcggagtataagccctacccaatcactgaactacgtgggtcaagagtaaaggagctgtggcttccccccaatcagaagggcactggatgatggatgaactctgtgtggtgcgtcttcacactgacaccaggaggataaggaagtgactccctcagctgagtggctggcatgtgccaggctagagcagcttggctatggcagaacatccagccccaccgtgtggacggtagggtaagacccagccctagtctggcctcagactaagggctcctcatccccaggcttccccatgcattggcactcctccagaccaggagtaagacatttctttgttacgcacagttctgtactttcttactccgcagtatggccctccgctggtggccagttaccctcaaatgtggtcttagctccagcaagccttctgctttctaccttctctccactctcccaccataggttacacacacacactcattcttccaccaccagtccaagacctctcctccgaccctccatttcttcagagcacagttcccgcgaagcccttcctctgatctgcaccacccagagaggctaagctctgcctgcagtctccactcacaccctacctcattcctacaagagactctggtctccctacttagcctgggagctcccagggcaggagttcagcttcctccttgctccttccccaccccaattcctccccatgcaagacagaggacagacaggcctacccccaaagaaggggttaaataatctgaaagttagggtcaccacaaagcaaaagaagccagcggtcaattcagggtggcttcccagagtggcagcaggcgtcaaggt

SEQ ID NO: 9531 - DNA, 6000 bp, Homo sapiens
ctttaaattttgctatcaaattattattattgtattaacttgattttactttgctaatccattgcttataaattcctagtgttagagtaggtagctaggcagacatgagcagggcaggagagggcccccctcccccaggaatgtcaggtgaccatcaagtaatggtcaggcaattgttaagctgtctctctaaaataactggttgcagccagagccagagaaagagtctcccaatagatagaaaacatctgaagctggtaatcagcagcttcctgacaagatctcaggagttgggcgagtgggctcaagcacgcacactaagaggcaaaatggcagtttaaccggtatgtgaccttcctctagaaacgactgataagggaaaaacacctcaaatgagcatgcatacacctccagtaaacagtctgagcatgcagctcctcccaagtgctggcaagccaccatgcctgcggacagcctgctccaagggaagagtcgggggagaagaaacataaaccctggaaccatgccaatgtataaaacctcaagtcaagggccggatggggcacttggatctctcaggtcacctgcttggctctcttccaagtatactttacttccatttgttcctgctctaaaactttttaataaaccttcactcctgctctaaaacttgcctcagtctctccctctgccttaagcctacttctgcccctcggccaaattctttcctccaaggaggcaagacttgagttgctgcagacccatatggatttgctgctgctaacatactttggtgccacatgactcagacacattccctagtggtaagacactcctacaactcaccttcttccgctggaggtagtcaacccctgtacgcggtttccttctcctgctctcctgcttatagaacaattgttcctccagaacaattcctctcagccatagtggctctgctcccaccagatgatctctcagctcatcctggtgacttgcaggggtacaggtctgccggctatgttgcccaggctggcctcaaactcctggcttcaatgatcctctcatcttagcctcttgagtactgggactataagtgcccactgccacgcctggctggttaggctacttttctgtggatcacagcccatcatccaccaatgccttgccaacaactgtaaatgtctcatccctgaatcctggaactgataacagctctgccaggtcttcaggtaaggagagcaggccaacagtctgacttccaagataaatctgcagcaggtatgtctgccacttcctttttactcttccctcaattttatttagaaaatgtttaggtatttctggggaaatctaagacatatatgattgggttcccacccttaggaagttcaaagttttgtttcaaataaaagtaatgcccttaaaacaattaacactataaattggcagatagtaaacggcattttgtaaagtgattaaaataaaattttagccccaaacctgcaagtggctcagctcctcaaatttaggtgaaagtcttttgtactatagagaagtttctattaaagaatggccacgataaacaagccatgctttctcaaatacacatatccccatattgacatgtacacacagtcatggagggccccaggtgctggcttgtttttccccatggagtagaaaggcttgctgagaaaagcatggccaagggtgcttgacaaggctcaggccattctaacactgccctatggacctgtcttgaatggcatggttggttgtccctgggtaaaactcagctctcaaagcttaaagattcctaaatgtcaggcagggttacattaaattgccaccctgccttgaaagttctctttcaggaagacaggtgcatatttggctcagtctgttcctttattcatttgtccaccattccctacatccatctgtccatcggtatgtagtctatgcggcctcatggttcatgcccataaggaacacctcactcatttgtaccagtttggtagaaaggacagtctgaacgaattcattcaaaaaggcctgcaaacctactagaggtcttcagatcttttatcagggccccctggcacagctccatactcagagcagggcaggaagcactggctttgcagcctgacagtcctgggtgactgccagggatgtgtgttcttgggcaagtgggctaatctctctaatcttctgtttgcctatctgtacgtgactaggattagatggctgtacatagaagcatccagcatagggccaggcttgcggtagaaatgagtgttagtctctggatcctgaggctgctcctggtccctgctcccaatgcttgacatttgcccttaggaagagccacatgagaaggtttgcctagcaggtgggagagagcaacagcattggagagaagcagcctgaatgggagtgcagagccagagaaggcaggccaggcacctccacaagaaggcagctgcttctgggaaagcagacatcgagtccatgcctctccctagtaccctctccactacaaggcactggggcatgtgacccaggctgacatgcctccaattcctgccttccagcgttatttcccagaagggtcagtaatgttagatcatggagactgacaactagaactgtactgagatcaaagtagtcaacatctggggaattccaggagtacagagggcagcccaaggaaaccagatgattccagccagcctacgcagggtgggtgggcactgcctgctgagtgcctgagtggtgtgggcttaggaggtggggctgcaccaggccctctggcagacccatcatcatgctgttgattggtctggtaatgacagatacctgagtgtgtatcttcgattttccagtttctagctgtgtgcaccagggcttgttattttggctatggtcctcagtgttctcatctataaaggcaggataatatccactgcagggctgctatggggcttaacagctatcacatatgctggagctgcatatgcacgcagaacccagcccataccatggactcagcattggcccagaccctaactgttccaaaaagatgtctgactagtgaattaagtaattttaaggtacaaatgccaccatcttcggtggatggccagagccaaacctccttattgttcccctttagtttacgaataaagctcgtcaggccctgacagaagaatcagccccaaagcagaatgaagggagtgtggggtatcagtcacccatccatctctgacccacgcgttacacaggggcgggttggtcatatggattctgatctgaaggacgggagtagggggtgggtctcttatagtaaccagctgagggctcttaaaaaatgttcagcggaaacatgaaccacatcacagaagtagaggcagaccttgcttcatgagcaagctcatctctggaacaaactggcaaagcatctctgctggtgagtcatttgttttactctttatattgaaaagaagacagggaggactaaccccaggtattgttggtattctcagattcctgtctgtagtagggtacagtgcaaaatgccaggctatggagctcagctgctcttcgttcaaattccatcactgccatttgctgctgtgtgggttaaactggagaaacatgaaaactactgaacatgtttccaggcacacagttagtgcttgcaggctgatggtactgctagtaatggcatagtcagacccacccagggagataaggagaatctagttattgtctatatttgctcaatgaataatctctgttttcatttcttttgcataagacaggctgttttatcagattatcatttatgttcttttttcaatataaatcaacatactactgtagaaactttgaaaactattttaaaaaaaggaagaaataagtcacccataattccaccagctggaggccaactgttaataaaatgtgatcattttttccaggtttctaaaagtacggtcagttaaaatcacatagtttatcatgaactcttatgtgagggcccacagaatacatggcagaaggattcaaggggttcatggactcccagaattgtaggggtgtttgtgtgtgtgcgtgtgtgtctgtgtgtgtgtgtgtgtgtgtatatatatatacattatttctgagaaaaggtctgcagtttttaggagattctcaaaggagtttatggtcaaaaaaggttaagaatcacaattttatatccttttgacatctatttgttgtaatagtaatagttaatacttattttgcatatttactttgtgtttacactgttcttagcaatttaactgtattgcattttccaaaatcagtaaaaatacttcctaaacatttaagtatattctattttatgtatgaattgtaatttgcttcatcattatcagacttttacactacttccaaagttgtagattttttttttaattttcagaaaacaaaataggattttaattatagaggataaagaaatgaatgtttttagttcgcctagaagggaaagtaatttttcatactctatttgcacagcactgtccaggcccaatctgtttaccaattattatacatcaaagtttaccaattattacacatgaatttgcacaggtcctttgaggaaatgtgtaatggcagcataagggaccagcaaaagctggaacaggaagataccaaaaaaaggcgagagcgagtcaagcaataatggggagctgaacattattcttaagagcaaagccacctgtttcatattttaaatgatgaaaaaatatgtttttgcccatgtgaatcaataacacatacacatcatctgacctacttaatacagtgccccagagagcttgtggggggcaggatgtctactggctgacctatcacccttagagatctaacaattgtgacgtaagggcaaggatttttattaagcagtcttagcccaaaggcagcatccttccttgctagagagaaagggcactttggtccctggaaagacagaggcaagcagcagcatcggagacactgctcccagtcaggactcaaagtcagcgacagaagtgtttctgagtggattaggaaaggtaacctcatcgtttatatgcacttgtctggtcaggcaatattttgactttgctggcagagattctgtccaaacacctgctcttcttcatacatcttctagaggtgctggccagacatggctccaggtcactggaaatgagctgctgcatgttgagtatctgcagtcctgtagcaagggcagacttggcactcatgggctgatgttgccgcagctgcccctgctcccacaccacaggttacatgatcccttgtcctgtccatggtctttggcagggtcacagggcagagggaagggtcagagagaagtgacatcttgaagggctggtgccctgggtaagaaaggttgcccatctggcatcccatttcaattgggttttctgcttgttaaatgaggcccctaagtcctaacctgccaatcacaggagctaaggcaaggttccgctttggggaaatctaccttttaagagacttcttgttcagaagtcttcaggaaatgaggctctgatggtagaatgccataaactgtgttaactgatgaaggggaaagtttagttgggaagtgaggagaaccacccaatgctttaaccatgaagccagctcagccaaagtgctgggcagtcgtgggcttttctatgctttgtttccccattagtagcctttgaaaatctatgcaattgaggggaagtaaaggcaggaaggactacctacccaggcagagcagtcttgccatccccaaacacctgtggtctccaggagtctccttgataggagagccccctggtaggggcacttgctttagctttcacaatttattaggaaatggggctcaggatgggtgggcaactgtggtgaggcagggggagatgaaaacaggcatgttccatt

SEQ ID NO: 9532 - DNA, 6000 bp, Homo sapiens
atagtccaattctcctaccttggcttgtgcaccaggttacctggttgttgtggtgcctgcttttttccctgtgttgcctctgttgcctcctgaataacagtctcagatttgtctaaggcctctatggggagctgggacacccggacagagtgggcctcctaaattgagtgggctgcatctcccctcttggccagagtcccactccatgcaaacacagagatcccggatggattcccaagtttgtaagaaacatattctcccatccaaactcaaggaagatacttggagataggaagaacagcagaagcgagacttttaatggcagtcttgcaagatcaggtgtctggtaggcaggcatacccggggcagttacagcaggtaatttatctcctagcatgcaagtccctcccccagttcctcattggttgagtactatggggttacaatctttccagatattgcctaagtttcattatcccctttataaggttatactctggtccccttccctgattaagtttccatttcccaataatgaaactttcttcccttttatgggctgacccctcctctacattctgttcatttattgtgactttctaggtgcatgagccatgtggtttattacatttgcaggctggttgccagtacttagaattatcatgccttgaaaatggaccatttaaaatgatttttcacatacagggtcttttatattttgttatcaaagtttctccattttgtttttcatatttatgtaccataatcaatctgggattaatttttgtgtgtgtgtgagtagaaaactaatgcatgtgttaatttttttctgcatatttgaatatttgaaatatttcataattaatattaaaatcactctaataaaagtaatacttgtttattatagaaaagttagaaaaatacaataaaaataaaaacaaaacttcccctgtaataacataactcagcaacacttttaatgttgtgaggtgtttccttctggtctttttttattttttggtaaaactgagatcaaactgttttccatttttatcacttagcattgtcttgtgtgtatttccttgtatcatttgagttctacaaaattatttttaatgatatatgtagtttatcatataggtgcatcatattttatttaaccaggaacttactgttagacacttaggcttcctccaagttttcaatgtaaatgttagttgagcattgaatattcttgtacaaatatttctgatttgtttttgaggataatttctagaaatgaagttcttgggtcaaaaggtatgaaaaattttaagatctaagaatacagttagagaaagataccctctggaaagtgtgtgccaattttaatcccaccttctccagcgacgaatgagctgttccatcctcccataggcaccctcctggcacttttgctgaaatacatgaagactccaaccttagctgattcatgtagtcataacaagatcacatgctgatgagaatacaaaatctggaaaaagcacatagcaagaagagaagtctgtaatgatttattaatatagtagcctcggtcctccttattaaatttatttggcaaaaatttgccattctgccctgggtgataccctgatacactcagctcaaaccaagagccaggcatagatgtttaagacataagaaggactccaacttaactggtgctcagggcaaaagaagaacacaccaggacatctgcccctctggttaggagaggtcagagggggccagatcactcgttaaaacatttcagtgtctgttatgagccactcattgcattggaggtgggaacacaaaaatgaccaaccttgacagaaaattacaatttggaacactaagggctcttacaggatctagcttcagggcactatgaaatcacaggtaggagtgctccatgtaacctgaggatgtcagggatatagtttcccagacaaggtatgtctaggctgatctttgaagaggaagagggcttggccaggcagagagaaaaacaggcatcctacctaactagctatagggcagacagactgtggagtaaaaggtgaggagtgtgatggaagggactggaggaggaactgtatgagagaaggctgaaggaggaagggactgggttatgaaaagcttcacgtggctttctatggagtttatattctttacaacaccgtatgtgttctgatcccatcacctttctgatcatatgtcctatccctcccccatcccaaccactctgctccaaccacattggtctccttgccattccccaatcatgcttccacctcaggacctttgcacatgctcttctctctgcccagaatgctatcccccaggtgtatgtttggctttcttcctctcttccctcaaatgtctgcctgatagtattacctaagcagagagattacgtctgataaacttggacaatatagcatgctgctcttgccacctactctgctgttctctgtcttctaactctgctgtatttttcttctagtatttattttctatctttgaccctaacgtctactagaatgaaagctccatggaggtggggactttgcttttttattgctttaccaaataggatctattgaatagtctattccttatgcctagaatagtatctgatgcatagcagatgcttaataaaaatttgttaaatatgcgagtgaattttgttataaagagaatgaggagccattgaaggtattttatgttggagaaggatcctcagatgtgtattttagtcagctctctgtgcctgtagggtggaggatgaggccagtcaacctgaccaggaggttcccaaagtcatgtgtctgggttaaggtagaaaggttggggtggagaagagggatgtcttccaaaggaattaagtaggaagcatatttgcctggcctcagtgcctgtttgaatgtgggagctgagagagcaggcaaatgatattccaggttattgatttgggaatctgggtgggtgctgccctaacttagatcagaggatgctggcaaagattcagttcaggaggaatgacaatgaattcaggttcatgtagaacatgctgggtttgaagttctttggcatgtcccaagggagatgtttagcaggcaatttggatattgcagttactggagccatttgtggtgagatcactaagggagggtgtgtaccacgagatagaggagtattaagaatggaaccccagggcatatcaccccagagggaatggaggatgtgtgaaacaggaggaaagagtgtctagaaggtgggagtggtcagtaacatccaataacaatacaagtagatgaaataaggactgaacaggttaaattgcattttgcagctgggaagttgccagtggagtgctcagtacagggaatggaaaagaaaaatcgaggcagaatatggactacttgaaagagtaggaacactctgggaagagtagagcaactaaatgtgaagagaatgagcaagacaaaagttgggcagcaactgaaagggaaaggaaggtgattttaacaaaattaggtctggaaattcttcacgcttttaatgttgagataaagattcataagtagtgaatagtaagtgcagagaagtcccacaaacccctcacccagtgtccctagtggttacaactgtacacaattatagtacaatatcagtaacagggatttgactttggcacaatgtgtgtgtgtagttctaagtcatttttatcacatgtgtaggttcatatttaatatgatcatcattgtattcaaatacaattttttttagagacagagcctcactctgtcacccaggttggactacagtggcatgatcagagtccattgcagcctcgaactcctgggtttgagctatcctcttgcctcagcctcctaagtagctgggactataggtgtgtgccaccatgctcagctaattttaatttttttgtagagatagggtctcgatatattgcccaggatggtcttgaactcctgggcttaagcaacgatcttcccacctcaaatacaaaattattccattatcacaaacagctctttgtgctacccattgataatcacaccagcacctcctccctcccatcatctctaacccctgaaaaccactattctgttttctatttctataattttgtcactgagaatgttacacaaatggaatgataaatcatatactattttgagattggcataatgccctcgaggcgcattcaagttgtgtttatcagtagctcattcctttgaattgctgagtagtagtgtttgatatagatgtactacaattctttctccaatctatagttgaggaacatttgtgccattttctagtttggggttattacaaataaactattaacaatggcatacagctttttgtgtggacagaactttttatttttctgggataaatgcccagtgtttcaattgctatattataaagcatttgcatgtttagttttctaagaaactgctaaactgttttccagacttgttgcacaccattttatagttccaccagcaatgtatgtgtgatccagtttctctgcatcctggccagcagatatgtagtgatatttcattaagctcttaatttgcattttgctaatggcaagtgatgttgcacatcttttaatgtgcttatttgctatctttataacctcttcagtgaaatatctctttacgcttttgtccattttctaattggattgtttgggttttttaaaaatgttaaattttgagaggtgtttgcatattgaaaatagaagtgtttcagatatgtggtgtgatggttaatactgaatgtcaacttaattggattgaaggatgcaaaatattcatcctgggtgtgtctgtgagggtgttgccaaggggcttaacatttgagtcagtgcactggggaaggcagacccacccttaatctgagtgggcaccatctaattagctgccagaaaatataaagcaggcagaaaaatgtgaaaaggctagactggcctagtcttccagcctacattttttcccgtgctggatgcttcctgcccttgaacatcagactccaggttcttcacctttgggactcagactggcttccttgctcctcagcttgcagatggcctattgtggtaccttgtgattgcgtgagtaaatactacttaataaactaatattatatatataaatatatatataatatatataacctattagttctgtccctctagagaaccctgactaatacatattgtttgcaaattttctctagatctgtatgtagcttgatcttgggttaaggttaattttttccctatgggttcctccagtaccatgttgaaaagacaattcttcctccattgaattgcttttacgcacctgtaaaagataagttggctatatgagggggcttcaaaaaattcatagaaaaatgaaattaaaagataagaaatttactaactaaagaaaaatgggtgccctttaaagatttcttaagactaaaaaacaaaaagaagtcagaaggagtcaaatcaggaccgtaaggtggatgcccagtgatttcccatcgaaactcttgcaaaattgcccacatttgatggggggaatgtgcaggagcaatcttgtggtgaaggcctctctggtgaagcttttctgagtatttttctgctaaagcttttgttagagtaggtagctacccaggcatgagcagagcaggggaaggctcccccacaccaggaatgtcaggtgaccataattgccagggaaaagcagtttcccaatagctaaaacacctggaactggtgatcagccgcttcccattaacatctcaaaaattgggcaagcattaagaggcataattgtggagtatgacctttggtaggtattccactggaaaagggaagaatgcctcaggtaagcatgcatacaattctagtaaacacactgcatatgctcgcctccagggtgt

SEQ ID NO: 9533 - DNA, 6000 bp, Homo sapiens
ttgttgttggctctagcagtggatgcatccttcaacctctggcactctgcagggctcagactgttctgttctgtttgttacctgtggagtgcctgccagaccctgctctagctgctttaggtccatttaccctcatagacccccagtcttgttattcatatttcatatttgggaaatggaaacttagaaacttgccaagtccacagcatgagatcctgcctccggtgtctgctggattccagaaagtgccaggggccaacttagatgacaccatgttctctgcacaatcttaggaatgctcctagtctgatgtccccattgcaaaatttacattatcttttaacaaaacgtctttccaaggaggggcatttaaaataactgaggttcttcttgctaaggacgttcctgacacaagagataatttagcatttccttttcattaaaaagtttgaaatcctgtaatttgtgataatgtggatgaacctagaggatgttaagtgaaataagccacacacagatagacaaataccacgtgatctcactcttatgtggaatttttttttaaataagttgcttagccgggcatgatggcacacacctgtaatcctagctactcaggaggctgaggtgggaggatggcttgaactcagaaggtggaggtagcagtgagctgagactgtgccagtgcactccggtctgggtgacagaatgaaacccaatttaaaaaaaaaaaaaaagttgctatcttagaaaaagacagtagagcagtggttaccagagactggggaggaaagagaggaggtgagaatgggcagcagttgatcaacgggtacaaagttaccatgagataggagaaacaagtgctggtgctctgctccaagtagggtgacggtagttaataatgaattctgtatatataaatagctagaagagagggttttcaatatcattattatttcaaaagaaatgataaatgtttcagaggatggatatgtaattaccctgatttgatcattgcacaatgtatacatgtagcaaaacatcacattgtgtcccataaatatatacaattattatgtgaattaaataaaaaaaaattttaaagtcttatctaaatgaaatttctaaccagattctgaatccatgataccactgaaaccagcacacatgatcgcagtaaaacctcattatacttcctccactatcaccaataccctttattctctggaacatgaaacattctgttgtgctcatatcatgcaaattatcactagtaggagagcagagagtggaaatgttccaggtataaagacccacaagataaagaagctcagagtcgttagaaacaggagcagatgtacagggtttgcctgactcacactcaaggttgcataagcaagatttcaaaattaatcctattctggagacctcaacccaatgtacaatgttcctgactggaaaagaagaactatatttttctgattttttttttcaaatctttaccattagttgccctgtatctccgccttcactttctgcaggaaactttatttcctacttctgcatgccaagtttctacctctagatctgtttggttcagttgctgagaagcctgacataccaggactgcctgagacaagccacaagctggtgagttgtaggcattttttccattactttctgattcataggctcaacgcacctcaaagctggaaatgccgggtctgggtacaccctggggaactgcaaagcctgcacacttggggggaatgatcaagatgagaggcaggggtggggatggcatgtgcaccaggagatgttagagaaaccctgaggaagagcagcgtgcagcaggtgatgggggagagtgggcagcaagcgaggccaggacagccactctgctcagtcaccagtccacacacccaggggctcactctgcccctctgagcacccaaggacgttaaagagctggaactgttagtctaaatataggaccatccaagctctgaaccaaaatgtgtcccttgcctcaactcaggagatccacagaggcagaagtaaggaatttattttctgaaagatagatttctatcagttctgggtgacatgttctgacacttgaaatgacacctaggacagcacatttcaggcatcttgctcattgttcactgtagtagaagctacatgctagccagttgtaaaaatgaaattaagtaatgtgtgcacagcatttaacatagcatctgagcttcaggagcactcaattaatgaccacagttgtgattctttaggcagatgcatttttttccaactttgatcagaggtcttatttagcttctccagatttcaagaatctggctcagtgatatgaaatacaagacttgtgaaaagtgtcaattgcaagagaaatggaaggataaagtatacaggtgggtggaaaagaaattcacagtcactgccagaaaaaaaattcttgagaatcaagtcctgatgatgttagggcttatagttcttattataaagagttttatgtactcattcagtgaacatttattggtgcctcctttagccaggtactatcataagagctgaaaatagaagcataatccagtccttgatcttgaggaacatgctgtgtgtagcagataacataataagtgcttatctagatgcatgcagtgttatgtgataagagtaatatgacagaggatacagattaggcttcacagagaagggggatttgagcaggaggtattgaagggtgaatagaagctcaccaatcattttgggcagaggggcaaggacctgcaaaaccactgaagcatgaaggaaatggtgagtttagggaaaatgaagagaagatggctgtgactgaagcacaggatttgggattggagaagggactggaggtgaggctgaaaagaggcaaactcagaaaagatgttgtgctgggcagtctggacattatctttgaagcccaccacatataagtcatagggctactggaggttttaagctaagagtgactattcaatttcaacttaagagaagataggttgagagggaacatggcttgagatgagccatgagcaaaggaaagactacaacaaagccaggagtgaggagtgtgtgaagcaagaaagtgacagttgaaagcagtgcagaggggatgaatctgagaggcatctatgaggtggaactcaaatgacatgataataatacagggcatttctctgtgtcagatgctgtcctaagtccttactccattgatcttcacagcaactcagcatagttaatattttatgcataaagaaatcggcacttgaaggagtaattggccccagattacactgcctataaggattcaaatccaggtttgtttggctccaaaaactggctcctaattttcagaaggagaagcaacccagggcaatgcccaattttgcttcttaggcaatggaggaatccacaatcggaaggagttttcagcagtgccccatttggggtgggttgaatttgaggtccctgcatgatacccactttgctcacttcagtgcctaaaactgagtatggttcatagtaggtgttcaataagtgttgatgcagtgaatacatgcatggggagatatgcatcaggcaatgggaaattcaactctaaggcttaggggaaagctggagcttgaagacagagctttagaaaacagtagcatagaagggagtaggaaccatgagtttagacaatacaattcaggaagaactttgtagcaaggataaagaggcaaaaaattaaagaggtgagagctaagtgtggtgcctggggaatcttaaggtgtgggcacggggaggagatgccagcaaagaacatgaataaaaagcggtagcacagcccctcccatctggaagccaaaaagaattgtaaatggaggaagttagcagaaggatcaaatacttgaagagggtggaattggaataaaaccagggcatttgaaaaattgggttgtcactgcaatcttaacaagagaagttttggcaggatgatggaggcagaaagctgagagaatcatcagttagaacgtttttgacttcagagaacagaaaatgcagttcataatggctttaaaacaggggcttgtttttctcccagcaatttgagaggccaaggcgggtgcatcaggaggtcaagagaccgagaccatcctggccaacatggtgaatccccatctctactaaaaatacaaaaattagcggggcatggtggtgcacgcctatagtcccatctactcaggaggctgaggcaggagaatcacttgaacccaggaggtggaggttgcagtgagctgagatcatggccactgcactatagcctggagacacagcgagactccgtctccaaaaaaaaaaaaaaaagaaggcagaaggtgaatagttcaagggtgggtttaggactcagtgataataggattctgcctggcttctcatggttctctaggtcttccattcatggcaccatgccctcactaggcatgctgccagagcaggaggggcaggtggagggttctcttgtgtctgtcttatcagggaagaagagctttctcagaagcccccagcagactcccttttcatattatggtccagcaatgagtcacagacctatgcaccacctgcaaaggagccagagaaaacaaacgcccagcgcttttagcctgaaaatgagaatctggtttgctggggaagataaagggtgtcggaaaatggctgttgggtaaatcattgatgtctgccactaggaatgaaaggcaaatcaggaactggcacacatgctttcagggagatggctgcaagggagagggcaaagactgggaagttgcttatgtggtgccagactatttggaagatcatggattgcggtgtttgtgttgtgtggtcatcattttgttctttgtttacagaacagagaaagtggattgaacaaggacgcatttccccagtacatccacaacatgctgtccacatctcgttctcggtttatcagaaataccaacgagagcggtgaagaagtcaccaccttttttgattatgattacggtgctccctgtcataaatttgacgtgaagcaaattggggcccaactcctgcctccgctctactcgctggtgttcatctttggttttgtgggcaacatgctggtcgtcctcatcttaataaactgcaaaaagctgaagtgcttgactgacatttacctgctcaacctggccatctctgatctgctttttcttattactctcccattgtgggctcactctgctgcaaatgagtgggtctttgggaatgcaatgtgcaaattattcacagggctgtatcacatcggttattttggcggaatcttcttcatcatcctcctgacaatcgatagatacctggctattgtccatgctgtgtttgctttaaaagccaggacggtcacctttggggtggtgacaagtgtgatcacctggttggtggctgtgtttgcttctgtcccaggaatcatctttactaaatgccagaaagaagattctgtttatgtctgtggcccttattttccacgaggatggaataatttccacacaataatgaggaacattttggggctggtcctgccgctgctcatcatggtcatctgctactcgggaatcctgaaaaccctgcttcggtgtcgaaacgagaagaagaggcatagggcagtgagagtcatcttcaccatcatgattgtttactttctcttctggactccctataatattgtcattctcctgaacaccttccaggaattcttcggcctgagtaactgtgaaagcaccagtcaactggaccaagccacgcaggtgacagagactcttgggatgactcactgctgcatcaatcccatcatctatgccttcgttggggagaagttcagaaggtatctctcggtgttcttccgaaagcacatcaccaagcgcttctgcaaacaatgtccag

SEQ ID NO: 9534 - DNA, 6000 bp, Homo sapiens
ttgaaagaagtgggtaaaatgctatcaaatagcatcacatggtatggagaaatcttttgtgaagggaagagtcgaccaaggtggcaaattgcattgtcatcttattttaagaaattgccacagccacccccagctttagcaaccaccaccctgatcagtaagcagccatcaacatcaaaacaagaccgccatcctcttcagcaaaaacactatgacttgctgaaggctcagatgatggttagcatttttagcaatacaatatttttaattaaggtatgcacattggtttttctgacataatactattgcatacttaatagactacagtataggataaacacaacttttatatgcactgggaaaccaaaaaggttatttttgagatatttgctttactgtggtggtctgaagctgaactcacaatctcaccaaggtgtgcctgaacctctttagctaactggccactgccacagtccactctgtgttggtcaagatgccccagagtggcaggcacactgtgtggtcacatccaagggcctagatatggtgggggctccaaatggatctagatatgtgagatctctctttgatttgacttcttccaacccaccattttctgggtgctgggctcatctcacccagaaagtaggacccaatgtgacagttcctgcccagttccctcctgtggtagccacttgacccaggggcactcttgatccttgcagcctcacttacacaccctatctctacccctattaactctctccaatccccactccccctgctcagcttgtctgctgcccagtgggggccccacccatgctggcctctccttttgcaagtccccattcctcatatggtttcttcagagcccctttctttggctttgaggagagatgccctcactcgcttccccaccaatcctgcccacttctacaatccattcattatcctaattgcctccgtatacagactggagtgagaggagttgatgtgatgggtgtggatacagggctggtgctgtcatcttctagtaagccctgggagaggtgtctgagcccaggtgtcagtggttttctttggaactgtgagtgcataacacttctttgccttcagccttaggccatagttgctagttctgggacaaccagaaaagccctacataatctcgtgttatgtgcagagctgagtatagagctccaggtatgatctgactcacttaagatcacagtgagtctattgtattgttgaactgttagcttagacatctgttactgtacctacatggcactagcctcacgcctagacaccgatctgaaagaaatcccctaaatgcatagagaagacttctcagctgagctaaggggctcccaccaggtttgagcctatctaatgaatccatgaggtagacagcctgcacatgtccacttggtttgatgaattgcacaaatccctatgggggatgtggttcatgggctgggaagtgggttaccctgggaaaggtctacaggacagaggcagggatggagacaacagcatggtgagttcccaacccacccacgatgataggtgtctgaggcagaaggtaaagaggctgtcacctggtgggtgtcataagactcaagtgtcattgttgaggcacatgggtaacaaagcgtggcactggatgggggtagattcttcctatttctgtgaggatcagggggactccctggctctcctgctaaaggtggctctagggacaggaagagtgtacttcttgacagggatgtcagagcactgatggtgacaatcagtgtgacactgctcacatgactgaacaaccgagaagagcccgactgtctactgaacaacgggaagagcccgactgtcaatgacggagctctgttaaatatagttaaggctattttgttgaatgaatgaagccagacaggaaagaggacagtatctttaatccatttatagaagttaaagacaggcttatttaatctctatgaagacagagtggcccttacctctgggtggagcaaaaggcaccttctgaagtgatagggatgttccttatcatcttgatccggagtggtagttacatgcatgtgtgcatatcaaaactcaccaagctgtaccactaagtgtgttcttcctcaataaaaataataaagaactacacttataaagaattttttaataatataggaaaatgtctacactataatctttagctaaaaaaaaaaaaaaaagaagccgcctacagaatggtatatgcatgagaacaattaatcgaaaagtgcatgggaaaagtcaggattgaaacatcatgttttaaaagacattgttttgatactgtgagaatgtacctaagtttttccttttttctgtttttcccaattttatacaatgagcatgtgttggttttataattagacattttgtttgtttggtttggttttgagacacagcttgctgtcacccaggttggagtgcaatggcccaatcttggttcactgcaacctccatctcctgggttcaagagattctcccacttcagcctcctgagtagctgggactataggggcgcaccaccacatccagctaattttgtgtatttttagtagagatggggtttcaccatgctggccaggttggtctcaaactcctgacctcaagttatccactcgccttggcttcccaaagtgctgggattataggcatgagccaccgcacttggcctagacatttgtttttaaaaataaaagattcatttgctctttttacagcccgtctcactgttgactgatattgaccaggagtcaactcaggccccagggattttcacaacagctgctgtatggcagggtttctgctcactgtgctcatgtagttggcccttgcacccaaagtgaataattaacattctccccatcctgttgacgatgctctgaaaatatggtccagaaatggtgtgagcaaggagacagcaaagcaatgcttggaacataggtgcagtgactagacatggggcagctgtttaaagacaaaaaggccccaaaaaggagggatggcacgaaacaccctccaatatgggcatggagtctagagtgacaaagtgatcaaaagttcatttcctatggggtgtccgaatgtacttaataataaaaagagaacaagagccatgcaaactgagagggacaaagtagaaagagtagcagacaccaagcaactaagtcacagcatgataagctgctagcttgttgtcattattgtatccagaacaacatttcatttaaatgctgaagaatttcccatgggtccccactttcttgtgaatccttgggctgaacccccctgtcctgagtggttactagaacacacctctggaccagaaacacaaaagtggagtaacgcacactgcaaagctgtgcttccttgtttcagcctgtgaatcctcaccttgtttcccatctagcctatatttttcaaactaacttggccatagaatcatgtagtatttagggtggaagctgccccaggtctagcacgtcatttaacagatgaggaaatggaagcttgggcagtggaagtatcttgccgaggtcacacagcaagtcagcagcacagcgtgtgtgactccgagcctgctccgctagcccacattgccctctgggggtgagtatgtcttcacatcctccaataccctaatgacagacaaacagaacatggcaaagcctcagctctgcatggtgaaagtaagaaccagcaattgccacaaacagaaatacagtgttggtccggcagcctccgggggttctgcacaagtggattaccagtgaatacaaggctatctatctttcgaaaaaccaaagttgtatttatgctatctattttctataaaattttatattaatttatttgttacctatttttgaactctttcaaaagcacactttatatttccctgcttaaacagtcccccgagggtgggtgcccaaaaggctctacacttgttatcattccctctccaccacaggcatattgagtaagtttgtatttgggtttttttaaaacctccactctacagttaagaaaactaaggcacagagcttcaataatttggtcagagccaagtagcagtaatgaagctggaggttaaacccagcagcatgactgcagttcttaatcaatgccttttgaattgcacatatgggatgaactagaacattttctcgatgattcgctgtccttgttatgattatgttactgagctctgttgtagcacagacatatgtccctatatggggcgggggtgggggtgtcttgatcgctgggctatttctatactgttctggcttttcccaagcagtcatttctttctattctccaagcaccagcaattagctttaccttttcagcttctagtttgctgaaactaatctgctatagacagagactccggtgaaccaattttattaggatttgatcaaataaactctctctgacaaaggactgctgaaagagtaactaagagtttgatgtttactgagtgcatagtatgtgctagatgctggccgtggatgcctcatagaatcctcccaacaactcatgaaatgactactgtcattcagcccaatacccagacgagaaagctgagggtaagacaggtttcaagcttggcagtctgactacagaggccactggcttagcccctgggttagtctgcctctgtaggattgggggcacgtaattttgctgtttggggtctcatttgccttcttagagatcacaagccaaagctttttattctagagccaaggtcacggaagcccagagggcatcttgtggctcgggagtagctctctgctgtcttctcagctctgctgacaatacttgagattttcagatgtcaccaaccgccaagagagcttgatatgactgtatatagtatagtcataaagaacctgaacttgaccatatacttatgtcatgtggaaaatttctcatagcttcagatagattatatctggagtgaagaatcctgccacctatgtatctggcatagtgtgagtcctcataaatgcttactggtttgaagggcaacaaaatagtgaacagagtgaaaatccccactaagatcctgggtccagaaaaagatgggaaacctgtttagctcacccgtgagcccatagttaaaactctttagacaacaggttgtttccgtttacagagaacaataatattgggtggtgagcatctgtgtgggggttggggtgggataggggatacggggagagtggagaaaaaggggacacagggttaatgtgaagtccaggatccccctctacatttaaagttggtttaagttggctttaattaatagcaactcttaagataatcagaattttcttaaccttttagccttactgttgaaaagccctgtgatcttgtacaaatcatttgcttcttggatagtaatttcttttactaaaatgtgggcttttgactagatgaatgtaaatgttcttctagctctgatatcctttattctttatattttctaacagattctgtgtagtgggatgagcagagaacaaaaacaaaataatccagtgagaaaagcccgtaaataaaccttcagaccagagatctattctctagcttattttaagctcaacttaaaaagaagaactgttctctgattcttttcgccttcaatacacttaatgatttaactccaccctccttcaaaagaaacagcatttcctacttttatactgtctatatgattgatttgcacagctcatctggccagaagagctgagacatccgttcccctacaagaaactctccccggtaagtaacctctcagctgcttggcctgttagttagcttctgagatgagtaaaagactttacaggaaacccatagaagacatttggcaaacaccaagtgctcatacaattatcttaaaatataatctttaagataaggaaagggtcacagttt

SEQ ID NO: 9535 - DNA, 6000 bp, Homo sapiens
agaacttcctcaagccggtggctgctaggcccacggcagtgccagctcagccgaggggagcttcctgagtcctgttcccatcaggcccaggcgcctgactccaggctggggactcacccaggagccctgtggccccaggaaagagctggtcactggcctagaggtagatgcagcgcagtgtgttctgatgagaggggctgccctctagaggtctcgatggggccataaccttgcctggaacccttggctcctgggcagtgggggtcaatgaagggcaagtccatcctgcaggcagacctgggggttttctcttatactccctccatccaaagaaggctgcaggtcagagcagcagcaggacaccaggtctggcttcaggcccctcagaccaaggggatgtgctaacagtagcaccccccatgcatacacatacacacaaatggggtggggaaggaccctgggccctggccccaagaggccagctctgcttgcccagtcaggcctcctccagcctgaccatgggcagcaggctccggcagggaggaggcaggtaatgtgaccactacactagattcaagagccaagtgtccacatgactgtttgaaaatgagtatcccttgtccctggctgttaaattccagacacttggcctccatgatctgcaggccctcaggcatcattaatcatttgagtatgtgttgaaaatttttccagtttttttcctttgttaccttttaaaaaattgttctggggccgggcatggtggctcacacctgtaatcccagcactttgggaagccgaggtgggcagactacttgaactcaagatttcaagaccaacctgggcaacatggtgaaacctcgtctctaaaaaaagaaaaaaaaattgaaaaattagcagggtgtggtggctcatgcctgtagtcccagctattcaggaggctgaggcaggaggatcacttgggcctgggtgactgaggctgcagtgagttgtaattgtgctactgcactccagcctgggcaacagagcaagactctgtctcaaaaaataaataaacaaacaaatagataaataaatagttctaggccgggtgtggtggctcacacctgtaatcccggcactttcggaggctgaggcaggcggatcacctgaggtcaggagttcgagaccagcctgaccaacatggagaaaccccgtctctactaaaaatacaaaaaattagccaggcatggtggcgcatgcctgtaatcccagctacttgggaggctgaggcaggagaatcgcttgaacccgggaggtggaggttgaggtgagccaagatcaagccattgcactccagcctgggcaacaagagccaaactccatctcaaagaataataataataataaataaataaatagttctggaaaaattgttctgtttggaatattgataagttagagcagcctgaaggtccagcacaaaggtcttctatatttcttttcactgtttttcttatgactgcttattatagaaaaataagagcaggaaggggggcaaaagcatgggtctcagtctccctgcccagcagctgcccttgcccacacccttctcacctgtgtgcacaagcacacatttgcctcttgactcattcattcattcattcaacaagtatttattgacagttcctacacgccaggcactcatctagcacctgcaaataaagcagtgaacaaagtgaagaccctggccttccttgaacttactgtccaggatggggattagatccaaaaaagcagcattaaacctaaccactaaattctatcatgtggttagaagatgctcagtactacagggagtaaaagcaacaagataagaaaaatgggaggtgggggacgggggtcagagtgggcctgagaaaggaacttttttttttttgagacagagtctagctctgtggtccaggctggagtgcaaatggcatgatcacagctcactgccgccttgaatttctagactcaagggaccctcctgcctcagcctcctgagtagctggggactataagcacatgtcaccactgcctgcttatttgtatcctatttttttgtagagacagggtctcatcatgtttcccaggctggtttcaaagtcctggtctcaagcaattctcccattttggcctcccaaaatgctgggattacaggtgtgagccaccgtgtcaggcataagtctaagttttaaatagattattccggctgctgcattaagactaggctctgggtggggaatggggggcaagggtgacactgacacaagggctcctgtagttattccaaataatcatgttgcatgtcttagcccaggtgatggtagaggcaggatgaggcactaggcttgtcctaaaggtagaggtggcaggcttcccggatggttccagtaggggaggagaggcagaagtaagtcaagggtgactccaaggttgtctagtgatagaggtgccactgcaggaggctggaggaggagcaggcttgggagagagataagttttgtccatgaagagtttaaaacattgactggacatcggcagggcatggtggctcacgcctgtaatcccagtactttgcgaggccgaggcgcgtgaatcacaaggtcaggagttcgagaccagcctggccaacatagtgaaaccccatctctactaaaaactacaaaaattagccaggtgtggcacgtgcctgcagtcccagctactcgggaagctgaggcaggagaatcgcttgaagccgggaggcggaggttgcagtgagccgagaccacaccattgcactccagcctgggtgacagagtgagactccgtctaaaaaaaaaaaaaaaaaaaacattgactggacatcaaagtgcaggtgccgagtcaactgctgggtgtatgcgttgagttcagtagagtggccagtgatgaagctttggatctgggaagcaaagcaagtggtgtttaaagccatgggatgggaagaagctaagttcagacagaggagggcggcagtaagcactgagccctggaagatgaggcagaaccagcaaaggagctgggcgggagtagccaggaggtgagaggaaaactgggagagcatgggcacctggagccaggtaagtgtcagatgctgccaaggagttgagggtagaggatggaccactgaattcggacacctgtggatccctaaggaccctgaccagggcacttttgtgagggagggacaggcctgcctggagtgggcagaggagaaagtgaggtagaactggaaagagccagtgtaaacaacttgtgtgaagtgagaggggcagagccaacagtggcttttaagaaagactggaaagttggccgggcacggtggctcacgcctgtaattccagcactttgggaggccgaggcgggtggatcatgaggtcaggagtttgagatcagcctggccaacatggtgaaaccccgtctctactaaaaatacaaaaattagccaggtgtgatggcgcacacctgtaatcccagctactcgggaggctgaagcagaattgcttaaacctgagaggcagaggctgcagtgaaccgagatcacaccactgcaatccagcctgggcaacagagtgagactccgtctgtgggtgggaggaagaaagactggaaagaagaaggtattgaggtgagagaatggaagcagctggtaggagggtaggtttgagctcagtgaaagacttccaggatgggggtgctggaaactgagctggaaaacagtagacagagattggatagtgggggtctggacatcagggagtgtgcagcttggccactgacctgcctggtcaagtgctggtggctagggacacagcgggtccaagacgcaggcaaggatggcaaggagccgtggagagacccaggggacaattcagatgtctgcctaggccaggtgtggtggctcatgcctgtagtcccagcactttgggattcacttaaggtcaggagttcaagaccagcctggcaacatggcaaaaccctgtctctactaaaaatacaaaaattagccggtcatggtggcacacacctgtagtcccagctactctggaggctgaggcacctccagagaatcgcttcaacccgggaggcggaggttgcagtgagccgagttcgccattgcattccagcctgggctacagagcaagaccctgtctccaaaaaaaaaagaaaagaaaaaagatgtctgcctggaccctagtttaaagtcacccagcaactgactttccaacaacgcggagcagtaataattgactgaaggttgcttagaaagaagagcagccctggaaaaatctgaaagcataaaactactttccaaccacacaagtctacaaaccgcctggctacacacacaggattagccagcgacctaatccgccaagctatgcaaaaggaggcctctgctgacccctggcggtcaccagccggagtctggctgcgcggtgacccaccacacgttgcccagccgtgtggctgggatggtcggtacccatggccgtgcggtcgagccttgatgctccaggacagtcctggaaggcttcctggcagatccgtgggaagaaagccgacagaagggcgggaggcgggaggggaaaggtcccccgggatgggtagggcctcaacgctgggcatcggcgcaggtgtgtactgcagggagccagccagaccccccacggactgcctgaccttgggggaagcccggagtagaggaagaggccggacccccagacccgccattgactatgtccgccattgactatgtgttctgagagaaatttttttttttttttttgagactgagtctcactctttcgcccaggccggagtgcagtggcgcgatctcggctcactgcaagctccgcctcccgggttcacgccattctcctgcctcagcctcccgagtagctgggactacaggcgcccgctaccgcgcccggctaattttttgtatttttaatagagacggggtttcaccgtgttagccaggatggtctcgatctcctgacctcgtgatccgcccgccttggcctcccagagtgctgggatgacaggcgtgagcctctgagagcaaattttacccagttcctctctatcctcccgatgactctgaaatcaaactcagcaagtcatccgagcccccacggcgcagcggccctaggctggcatgggcgatgcggagctactccgccctcaggaagcaggcgaggtgcccagcgggagaatcacccacatcaccgtctaatctctgctgtgaagtggaagcgcgagaaggagggagcgtctcatgacggagggtgtgaagacgctaggctggacgaagcagaaaggcgggtgtcactggggacgttctgagggtaagccgatggcggctatcgcggaggagaccctggcgaggtggggccccgcgcggggcaagggggatggggtgccacagagggctagttgcaagaggacgcgtgacggctgcagctctgcggagaccgggcctcgacggccaaggagtggcaggtcggcggaggcgggggccaggcccggaggcagagcgagacaggagagcaggcaaggcgggggccaccgtgagtgggggccgcgaggcgggggctggggcgcggggaggtgctaggtcggcctcggctcccgcgccgcaccccaggcccgccaggaggcgccgctgccccgcgaagccgttccggcctctcccggccaccgaaatcccgcgctccggcctagagaggccccggaagaggcggtgcagcgcaccccgaggccgcttccggcttcggctctgcaggagaggccagaatcgggggaggacgccttgggcggggcgtgggtgagagaacctgggggaggtgaagaactaggaggttgcactgggagtggacaagggggaaaataagaattagggaggggctgcggtgggcagggccaagggcaggtagcaccctgcaaggt

SEQ ID NO: 9536 - DNA, 6000 bp, Homo sapiens
gcaccctcctgcagtgcagttgctgaggaactgagcagactctccagcagactctccagccctcttcctccttcctctgggggaggaggggttcctgagggacctgacttcccctgctccaggcctcttgctaagccttctcctcactgccctttaggctcccagggccagaggagccagggactattttctgcaccagcccccagggctgccacccctgttgtgtctttttttcagactcacagtggagcttccaggacccagaataaagccaatgatttacttgtttcacctggatttgggttgtgtatttgtttgttctgccttggttgggggcggtggggggatggctgtacagataggctgggagtgggaaggagcctcccctccccaggacaaagaatggaaggaacatggcaggtaccctggggttgggggaggaggggagttagagatcctccacgtcctgctctgtgaccccagtggccagctgcccctccattgcagctgccagagagcaagcagagcctggcttgggtgagagctgagtatggggtgcccttcagggctcaggaatggggagctcacagcctgtcttcatctgcctccaagggatgcctttgtgtctgtgactagtgtgcctgcacgctggtacttccccagtaggcgaggctcccccactgtgcctgccagtggctgtgtacctgtgtgtgtgcatgtgcacccacgctcatgcatttggctctgtgtaaccacggatggatggggctgcttgggtaaagctgtgcccaggtgagcatcagggtatgattgtacctgagcatggctgagtctgtgtggatggctgtgtgcctgtgtgagtgtgtgtgtgtgtgtgtgtgtgtgtgtgtattgctgtgctttgtgtctgtgtatggttgtattataggagcatgtgaggctggctaacagcatctctatgggggctttgttcatgtacaactgtgtgtggctgtgtctgtacaactgtgtgtatggtgatgttcatgacgttcatgtataaagctatgtgttttgctatgtgtccacatataaaaacacacatttgctatgtgtcctgcagccgtatatccataattatggccatgtatgtgtggacatgtcttggtggacagctatttgtggcatgtccttgtgtgagcagctgtatatatgtggctgtgtccacatgtgcagccgtgtgtagacatggtcacatgttcttaggggcaggggtgtgcccatgtgtattatggctgtctacaagtatagctgtgtgtggttgcatgtttatgtgtactatgcatgtggccatgtccacatttacaactgtgtaaggctaagtgtatgtcctcatccgtgtgcacacagctgggagtggtggctgcctagctgtgtgtaactgtgtgtccatgtgctgcgactgtgcagcttgtttgctgcaggccacatcatgggcttttctggctgatgctgtacacagccatatctgtgtttacagccctgtgccttttgtgaggctgacttgttgagcaggttgggagtgtggctagaaggagtgtgtgactcctcacctcagcaccctcctgctgtcaacccctctgctccagaggcctggcccattgctcacctaccccagggagctgttgctctgaggcagccagagagggtgagagcagccggtggcagagttggaggtggaagacagcatgtctgtctcccactgccaccttgtctcctgttagtgatggggcttgtgtttgtttgggttttatgtgtctgtttcgtttcaaagctgtattctttccacagcagcaggacatcaggtttctgtgtccagggaaaaagctcgtccttggtgatcacccccgcacccctacggactgccacacgcacatgtgggtgtgtgtgcctgaggggtctgggcttggcatgttcattagcatgtatctgagctggccttgcttccactgacacctgtggaagaaagggcagtgtcgggaatgtgtgtagggatgccatgccccttggcacttgttagtgtgtgcacatgttaggggcagatagcacaggctctctaatccccattccttcagcacagtctggcactacagcttatccactaccctctacccaggggcgtccttccccatcctgctgtgggagggaagagtcaagagaatcttctcagagctgtcctccctctgcttgggctccagctctcactccctcctacgcagcagccagttccagaagcctttccctaggcccctcccctcccagatgcccctgccatccctaacactccctcagggttgaccctagtacttggttctgcagcccttcctgcaggttgctctctccttgcttaaataccctttttacatgggagtgggtggcaggtttaaagggcatctgcaggaaggaaggggaggccccattctcctctgacctctcccttcccccaatcttttcctcatagtgactctggctccaggtctcaaaagtggcagaggacacatgcctccaactcaggcctgggatgtggacccagctgaaatcgctgagtggggagaatagactccacccgtctcccacgcgcccctttacctatcccccagaggcaccccttgcactaaggccagctcctccactctgcagtagcactatgggcacctgtcggggcgcagtgaccttccccaccccgtgccccgtggcatccccccgccccccacctatgctctctaggtggtagtctgactatggggcggagtgggccacgaagcacccgctccagcgcagagcgagagcgctcggggattcagcaccacgaggcggacagctccaggccctgaggtccccagaaaagctggagcgcggagtgtccagaggaggcggaggctgggttgggagcaggagacctggcgtctggaggaacggaggaggggctgggggcgggccggggccgggggcggggcggggcgggccgcgattgaaagcggcggggcgagcgggcgggcggagagcgcagagccagcgagccagcgagcgagcgagcgggagccggagcctcgcgccccccgctccactccgattctctccgcgccagagccagcgcgccaggtagggtgagccggtggtggtggtgccgctgccgctgccgacctttttggcccttacctcacgtcccagggtcctgcgggccctcaagttgtggggcgcccgcgctgctgtgtccagacagcgttccctgagagctccgggaagcgggaagacagccccgggcgtcccgcctttcttctccagaaaacgcacgccccacatcgcactcccccgttcctcctgctccagcgtcctctggtccttctttctgtctgtgcctccgtctttgtctcaacctctcaggcttgctcgctccctgcccagattttgtggcccaggctcctggctgtctgactccgggtttctgtccccttcctgcctctgagcttccgtctgggcctcccctctgggagacttgcgacttgaccagttttggcttcagcccccatctgggtccctgtctccatctgtgctggtcttcctccctgcttctccctcgcttgcctgggtaagctgctgctttcctgatccccagaggagcccagtgcccctgccctggggagctgagggggcaaaatgaagaggctcagcctccgtggccagcacatggggtccttgagttagttgctgcccttcttcaaactcagtttcctttcctgttctgaggaaagaggtatgtccctctcccagcctttccaagcctgtgtgattgtgagagcctttgtggggtgtgtgtttgggaaggcaactggggtacaaatgattggacgcagtggggaagagacagggagggggtctctgagggccatggctagggtgggcagggccctgaagctgaggatggggagattggaaatggtgactttctctgctgggtcgggagtgaagagaaaacagaggcacaaaatctcaagcagtgttctacacagagctagagagtcccgcactctcaccctcagcactgtttggagactctagcccccaaccctgacacacacatacgtgaacatctgcttgccctgttgacttaggaccttgagccacttgggtaccctccctgaggccagccattccaccttgctgtctcattcccagggcttagtgtctctattccttcctcagtcagcaaactgtggggatggctttttaagaaccaaaggttagaacccttgggtgttcacatgggctccagtctccccacgggttggagactgtcccttagagatgcttcccttcctcttccctggtgggtcctgagacagcagttccttctctctggaaatccaaggctcaggatggggacctctgagtttgtgactgtgacatagtctgttccaaaggtattgacctcggggtcctgggaggtttgtgctgttcttggacaccctttgaattacagaggggtcagcattggctggggtctcctgtcctctgcctgggacttcactgcttgcatctctccccactgctgagtttggtaggggaatatggcccatctctcaccaagctgaggccagggctgagagacaggtccaggggagtcccaggagcttctcaacctacttaatgacaccatcctgtccctccctggcttttgagtacctaggaaaggggctcgtggggaggcagagtcagaaggggcagctgctctcaggttccacttttcctggtctgtttttctgtctttctatctctctgcaggagctgggtcccttcgcatctctcttcttgtctgtcctttcctggtccctgtttcctcctctctttgccttcgctgcttctaatctcatcccctggagacccaggtctgcgggacccatccatcccctttggggccatgggatcgctgcttgcgctcctggcactgctgctgctgtggggtgctgtggctgagggcccagccaagaaggtgctgaccctggagggagacttggtgctgggtgggctgttcccagtgcaccagaagggcggcccagcagaggactgtggtcctgtcaatgagcaccgtggcatccagcgcctggaggccatgctttttgcactggaccgcatcaaccgtgacccgcacctgctgcctggcgtgcgcctgggtgcacacatcctcgacagttgctccaaggacacacatgcgctggagcaggcactggactttgtgcgtgcctcactcagccgtggtgctgatggctcacgccacatctgccccgacggctcttatgcgacccatggtgatgctcccactgccatcactggtgttattggcggttcctacagtgatgtctccatccaggtacgtggaagccacccaaatgggggctagggagggaggccggaggtggtgacccagaattcctgctgaaaaggggctcatgggctgctgtgaattggaagggaaactagaagcttccttgcagtagcttttacagaagctaagaaagtgccctggtcacataatggtggtcgatttttagagactgtgcaagagaacatcttactctcattactcccacacacacacacaccctcacacacacacacacaccccacacaccctcacacacacacacagccccccacacacccacacacacccgacacacccacacacacccaacacacccacacacacgcaccccacacacccacacacaccccacacccacccccacacccacacacacacccagacacacacaccctcacacacacacacaccctcacccttgatgttaaccctgaggggcttaatagtcaggtctcccacttactaactgcatgaccatggcacgttatttctcttttctgtgtcacagcttcttccttataaaattggattcacaacactttttttttttttcttttttgagacaggatatcgctctg

SEQ ID NO: 9537 - DNA, 6000 bp, Homo sapiens
ggaggaaagatagtcaaggagaaattcacagtagctggattgcctaaaggtttttaaagaacagagtatttaatgttcactttaaaattgtgttctattatgcctgtaatcccagcactttgggatgccgaggcgggtggatcacgaagtcaggagatcgagaccatcctggctaacacggtgaaatcccgtctctactaaaaatataaaacattagccgggcgtggtggcgggcacctgtagtcccagctactcaggaggctaaggcaggagaatggcgtgaacccgagaggcagagcttgcagtgagccgagattacgccactgcactccagcctgggcaacagagcaagactccatctcaaaaaaagaaatacaaaaaaatagccgggcatggtggtgcgtgcctgtaatcccagttactcaggaggctgaggcaggataatagcttgaacccaggaggtggaggttgcagtgagccaagattgtgccactgcactccagcctgggccacagagtgagactccatctaaaaaaaaataacaaaacaaaatttaaaaattaaataaaattgttttcgatgctacaatttgctctaaccactctgtgactccatctccaccaccaattttattgttctcaagccatcagtaaagtttacaacaccccaaaaacgcagggtaaggaaacagtgatggagtaagatgaaagaggggctatgtcatttatgagataggaaagccaaaggaatacctctctgaatagagagcaaaagaagggagggatcacaaggttaggagttcgagacaagcctgaccaacatggtgaaaccccatctctactaaaaatacaaaaattaaccaggcatagtggcatgcacctgtaatcccagctactcaggaggctgaggcaggagaatcgcttgaacctgggagtcagaggttgcagttagccgagattgtgtcactgcactccagcctgggtgacagaacaagactcagtctccaaaaaaaaaaaaaaaaagagggagaagagagctccagactgagagaaggaaatgcaaaggtccaacacagggtatgctgggcacatccaaagaccagcaaggaaaccagtatgtgtgaagacaaggaagctggtagagagatcagagacacagccaggacccacatgatgatggccttaatgggccatgaaatttactgaatttcactctgagacaggaatccattacagacatggttttgagcagggaaatgaccgaatccaattttatttttaaatgtgtcattgcagttgctttgggaagaacagcctgtaggaaggcaaggtcagtgcaggaaaaccagataggaggttttctaagagaaagatgatgccagcttggatagggctggtagtggtggaggtaggaaaaagaggttgagtctggatgtattttgaaagtcaatccatcaggacttgtagatgggttggagatagtaagtgaggaaaagagaggcatcagaggtgtctcagtaaagaatttcctaatccaattgaacaagcttcccctgatgtagctcctccagtggaagcatttagtcctttcactggactgtctgaatggtcttttccctacagcttatctgccctatatgttcccaagtggctttctgttcttagcagtcaggggcccaggtgatgtctactcaccaaatattcttgaaccataaggcaatcagattatggttttgtacattatggattttcagactttatggtttcaaaataaatttcctataccaaagatactttttaactgctggggaccctataaacccttttttccccacacatccattttaatactagtccaaagggttaaaaaaatagcaaggggagctgccttaggggaaacagaggccacacgatatggaatttggggatgggaaatgctggaacatgaaaggaaggaggaacagccccaccatcttggccctcggggatgttaggaatagagggtataccaaaagaaggtgtaagggagtaaatgattgaagtgtaaacctcccaaatgttgtctctttcaaaagttaccttagagagaatctgctagtgctctgttaattataccatggtcacagaggtgctgctattgttctgagcttacttggaaccctttttttggatctgtccaaaaggagtgaatgtaacttgctccaaaatctgtgtttctagaggttagatacctgagaagccctgctgtcaagaatcccagattctcctggttggcaggaactttaaagcttctagccacagcgtttgagctcccaaggctgtccttcagcatcttcccaggcagccctgattcattgtggactgaaacctttctgtcattccttctatccactggtcataatagagtatgggcttgtatttccaaaatttaaacatcactggtcctattagttcttttagatctttctttcaagttgctcatttttctcatataagaaaatttaccttaaatggaaaccacatcactttgtcagtggaaaactatgtcaattggaacttaactgcataaggaataataacagatggaagagaaaacaatgatattaaattctacttaggagctgttgcctagcaaaggttctgagtgagaggcaacctctgtctttgttaaaacaggagattagcaagtgttacagaggggtgcaaagacaaatactacaaaaatgatactccttccttgacataatccataggaacaaaagaagtaaaaagggcatatcttttttcaccttgtgatccactgttatctaattgtattgtctgtgtaccacccaataccatgcttccaatctctactggaagatgtacacactgggacacactggtaaagtgatcaagcaccaggactgtaagtcaagctgatcaggttcagctcttggctctgccaactcctagccacccaaccctaaatacctgaaactgtatgcatcagtttcttcgtctttaaaatggaagcaataatagatcttcagagtaatactttcttaaagatagtgcccaaatttggacattatgcccaggtgtaatccgaccagtgaagagcatcagttcagcctaagattgcagcctcattcgggttttgaactgaactcgttcagcctttgggtgttcacaaagctgtgcttgtagccaactaaaataaaatctaaggtattttgataggcaccactactgagccacatcctccattacttacattgctgggtgtttcggcctgagggaggacttcacatttattcctattaaccagattttgcccccttcactggtgctttagcatttgctcagctccttctcctaccctgtatttgagggaaaggaagccaaatgggcagaacttggccataatgaggatgtgtttgacatgctggatttgagtctgtgttccattgaagaaaagaaatggaaactttgttgagtatccattctatacagggcactttccttgactatttcatttaacactccaaggaccccctgaggtagatgttatcgccattttgcagagaagaaatctgcatttttatttgaagttcttaaacatggtaaacgacccaattttctgctttttgcttaacagtattttgcaaacattttatcatgttacttcatgttttcctattttttttttgctttataaataaatacatactccctccttattctaaaaagaatttgaagcacttctgtcttgatgtttatcattttaatggttgtataatgtcccattaagtcaccctaatttattcaacaaatttcctactgttgacagtttggctctgtttgctttttgtggtttttaaaattattttctgtaacaaatgatcctgctaaaaaaaaaatctccgcacgaatattattttgttctggaaatttccgcaagggtggaatactgcattaaaggggataatatttttggtgtttctttatagagcctagcaaattgcccacccaaaggagtatgctttatttgagagtaaaaagccaaaaacaaacaaacacatacaaaaaaactggttttctacaaaagaaattaattttccacttattcataaaatattctagtgctgtgatgggtggcaggcaccgtgccaggggctagggacaaggataagcaaggccaggtccgggcctccaagcagcgcgctgtggagtcgggtagagtagaccaagtgcaacaggcacctggctgcagccaggaaggaccgcacgccctttcgcgcaggagagtggaaggagggagctgtttgccagcaccgaggtcttgcggcacaggcaacgcttgacctgagtcttgcagaatgagtaagagtttgggcacgcgatttgtatttattttactgtgaatctctggccttatatcagaaaaaaaaaaattgtgccaccctcggcacagagaacgttggtggcgtcgtaagcgccctaagcttctttccatcgccaaggagtaggggtcagggaagaggacagcgggaacaggatttgagagccgggaacccctggctcggcacgggagagggcaggagaggacctaagcgcggggctcgccgtctgctggggacccgagccggcctgtggccctcggggaaccgaagacgcgccctcagcgaccctgaagagtcagctaagctctctgcgggctaaggagacggtgaaggaaccgggactaactggggtaggggttagaaggcagcccgcgagtgggctacgaggggagctgggctcggcagttggggaccccgagggggcaagcgggcggggagcaggagaggggcggagctccggggccggggccggggccgcagcggccgcccagagggtctgcgggggctgctgtggccggacccgaaggcgggcgccgggagcgcagcgagccagacgcgcctctccaagaccgtgaccttggcatagggagcggggctgcgcgcagtcctgagatcagaccagagctcatcctcgtggagacccacggccgaggggccggagctgcctctgtgcgagggagccctggccgcggcgcaggtaggaccggggaacccaaggagggcgggaggaaagcgcccctggtgggggaggggccgtggcggggtctgggggccaagggctccgggccgaacgaggggcacacgccggagcagctccagcctgggagcattgggcgtgaacgtgggggaaagtagggaccagattacaggatcaaggctttccccggctcagaactggattgttcagtgcccctagaaggggcagcgggtcgcccacgcgaatgaacgggagcgcgcaccaaaacgcctgctgttggtagtttcttgtgcctctgccttgtttctgcctgtgatatagtcagaaaggactcgcttgccacgtgttaacaaggggacaggtagcttttacagagtgtatgaatatggaggggagggccacagagtcagctctggccccaggggccgtcagtgcccccacaggattcctggtccaagctaccagctgtcttgggaactttgcttcagtggcatcaaattagattgtcagttcccggggcctgagcaccagcctccatgtgtatttcctggggagaaaaaaaaaaggcataccagactgatggagtcttatcattattttaacattatagctttcaatagataacatgcatatgtttctttttttaagtcaaataatacaaacatttatcttctacaggcaatgcgtgcactagcatgtgtgtctattgctgtctcctttctacacccatagcctttcccactctacgtgttctgtcgccgtcttttgattctttatccagaaaatgatgtcaccaccactgcccacatcccttaatctccagtgttcctccttgcaacgcctctcttgtcctcaaatatttttcacaaggtggtcctcagggtagggagcctactaacgagaagacatttcgtttact

SEQ ID NO: 9538 - DNA, 6000 bp, Homo sapiens
ggggcctgccctctggaggacacatgctcccctgccccacccttgctcagcacataggacagcattggctggggtggggatccaaggcccctttggcctcccagatctgcccaccccacacaggaagctccactgcacgcggaactacatccacatgcacctcttcatatccttcatcctgagggctgccgctgtcttcatcaaagacttggccctcttcgacagcggggagtcggaccagtgctccgagggctcggtgaggatcctggccctggcccacctccctcagtctcgccgttatctttaaccactgtaatctcctcttctccccctgcttctccctctccctcctccctcttccctcccaccccacccctcaatccaaggatagcctaacccccacccaaccccacctggcagtactcaaatcacactcccctccggcaacaggagatgttgctcacccatctgggtgctcacagacctgccgccgccagtgagaaaagcagatgggaaatgggacacttcatggccacagcccagagcacctgtcccacctgttgctaacttcctatgtggccttggggaacttacagcctcagtttccccatctgtgcaaggaattccaagattccttccaactctgccatctgccacctgcatagccagggctctgctcaccatgccacttttcctactccccccgtccccgtgccatctggagtgggtccatacatatgcagtcctcctcttttgttctgatcctgacagcaggctggttctgggccttcctagggaagagaggtaaagggatcatctaaggaattcattgccagtcactaagggggccatctccaagggattcttagggaccctctctgagtgccccaagctttgacagagagcttgagatcagccccagcccccactcattccttgtggtcagtaactcattgcttcatgcatgaccccagaggcagtgcattatatcaggggtcagcagtaccttctccccaaagagtgaaatgatcatactggaatctcaggcatttcaacaagggggagagaaaacctaggggacccactttggccattcccagagcttctcagaggttctgtcccaggagctgtgaggccaagtcagacatgagcattgtgagccacaggacctgtggaggaacctgctgcctcctgtgcacatgttacggataattatggagactggcttcccaattcattactgcgaagcttttctaagactaggaagaagcacagataactgtcctggtaaagagctgagttatggccagacgcggattatggctcacgcctgtaatcccagcacttctggaggctgagttgggcggatcatgaggtcaggagttcaagaccagcctgaccaacatggtgaaacccagtctctactaaaaatacaaaaataaaaaaaattagctgagtgtggtggtcagcacctgtaatcccagctactcagaaggctgaggcagaataatcgtttgaaccaaggaggcagaggttgcaatgagccgagatcatgccattgcactccagcctaggtgacagagcaagactccatctcaaaaaaaaaaaaaaaaaaaagagttattctccaaaagcaaatgggaggaagatggggaggcaagaactcctgtaactggagggactgaagcgagacctgaggaaggactttccaaccaaagggagtggtgggggcagggggaggcttctctctgaggatgtcgcaaaccaagggtacaggaaggaagggtgggaaccaatgttttgggtacagggggaagtggaagccagacagtttcctggtggagggtggctttaagccctggctgacagacatctaggcttgatctgaaatgggggactttctgggaggggacagaaggcccagaataccttccagtcatgccaagtgggccacccagagccctgtgattgctctactcatgggtctccctaactccttcatggtcctcgtctgcctaagaaacccattcttccactcggtcctctgaaccccaggaggaatggccacccctcccctcttctcttcttcttcatttctacttccccctcttccaccctcttctcagtcccagtctccctccacacttccatctgggccccactccacagtccacagccctccactcccccacattgagcagactcttgaaactcaagcaagaattctccctcataccttccagctaccttcaatacaaattggcattagatgaatgagtgggtggggtgggagtgtggatgggcaggttggtggatggctaagtaggcagcaggataaatgggttaagtaaggaagattggacagatgataggcagaggggcaggtaggtagatatgtgggtggatgcacaagtggattgatgggtgggtgcagagatgaatggatgggtagatgactgagtgggttggtagaagaatggagagataggtgtgtgggtggatggattgatagatgggaagatgatagatgatggatggacacatggataaaaaatggataaatgagtgagttgatagtgaatgtctagtgggtgagtgggtaaataaatggatacatggataggtgggtagatgattgaatgggcagatgggtagatatatagatgggaaggtgaatagatgaattgatggatggataattaaaatcaccagtttatcccgaagtatcagaggatctaaaattagggaaaatgggaaaaccaatgagtacatttttaaggggataatgcaaaacaacaaagagattaagttggctgcactgcaactgtgtttgtccccccagacacgagtgtgggcagtcaaggacccttgacagccccagtgaaccccgtcttttctcctccccctgcaggtgggctgtaaggcagccatggtctttttccaatattgtgtcatggctaacttcttctggctgctggtggagggcctctacctgtacaccctgcttgccgtctccttcttctctgagcggaagtacttctgggggtacatactcatcggctggggtatggtaccagggagggcttccaggctggggacagagggggcaaggcctggagaactccctagggggagggtgccaacccagcttgcagtcctacgtcttgcttagctgcaggtcctgcctgcaaggatatcagccaagggtcaagaaagtcctcaaaatgtctgatcccaggacaagtccctcaggttgcagctgcacctagggctgacctgtgggacagattttgtgaacatctttccatttccctttagttcccgaaatacacagggccactgctaatctataaagggcctctgtcacaattagaaagagaatgtccgtctaggtagacacagcccttcaggcatacagcttcaccccctcagtggagcatccctccgtggtgaacaacctatgcaaccaaagacagcagactgacaacccacccttttctctctccctccctctccctgcttttctccaaaatctctccctcatgccctctacccctgcttcctgtgccctctctgctctttcactctccctgggcctgacaggggtacccagcacattcaccatggtgtggaccatcgccaggatccattttgaggattatgggtgagctgctgccccacacactcccccggccgccatcacttgggcaggccccctgggtgggatgataatgccatctggccttggtgagtggacaaaaaccacagctctcgggccagaggggaggctggaggaggacctggggagcaacagactctgggcccggggttgctaaagtgctcaggagcagagctggggacaactgggggaggtgctgctgagtctctctctggctgaggacaatccctctcattcctccccacggtctgctcaggtgctgggacaccatcaactcctcactgtggtggatcataaagggccccatcctcacctccatcttggtaagataccctcccaccacctagagatggggaaacaggcccaaagggcaggcaacttagcccaaggtcacatgggaaattagtatctaggtcagaactgaaacgtagcttcctaatgcccaatgcaggatcatccccacccctgtcctaccagttcttccttgagcgtaagcggattgggagcacagtccttagggatttgaaggaggtagagttcccggatgacctgcccaaaggggaaatgccagaggagaggtaagatagagagaggggcagcaggaccctgggaaagaagacaggccagcagtcaaggggcctgaacacctcagccttcccgctctgactgcccgaactcgggtccccacccactaggtaaacttcatcctgtttatttgcatcatccgaatcctgcttcagaaactgcggcccccagatatcaggaagagtgacagcagtccatactcgtgagtgtgggcctagtgcctcagcccccagtacctccatccccagtcctcaaatcatcccacatctccttgaagtcctcccaccccaaacatccagagtcaccaaagagccacattgttctttcccacctccaccatggcctggctcagcccaccaccatcccctgctccagccccaccctcaccaggctgcactcagagccctgcatgcttctcctgcccacactcacctagcatccttcccaggtatgcatctgctgccaagccagggagctcaagaggacaccgatgacctgtgtcttgttcataccatgtgcccagtccctggcatgtgcctcacatggaaaaagggtgcaataaacacatagtagatgaatgccctgggggagaccccagtccaccaatgagacagccatgttcgggactcagtattcctcagtaataatgatgacacctgcagtttacatgccaggcacacgctaagggatttccatgcatcatgtcatttcatccacacagtcccctgcaaaattatctttactttacagggaggaaatgacatacactcccttctccttgagggttttggagcaggtcaccatgggcagggagaagggggcacaatgtccatggaccagggcttggaaaggtgtcaggactgttccccctgcttgggaggactggaggaagaggcaggtttttttgcgggagcaacaaggcttgaagacagagctaaagaaacatgaaaaatatgaaaagggaggctgtgggaaggcaagtagggtctgcatgctcacagatgggagtaggagattgagtatcagtgctattgacacaagacaaacctgggacgtcccacaaggccttccagtcctgggattcttcttggcctggcttctctttggagagtctgtgctgtggttctaagattcctggctagaatgtcacagactgctggatttaggattctattctggaatcctgtgattctccctgatgagactaagactcacattcctggtgtgactgcattctctcctgccaggtgtgtaggcggagcttcccttcctgtctgagaaggaaaggctgggggggacggggggggcatctgcagtctgctgaggggcagcacatcgggcctgtgcacccttatcctctcctttgccgatgggaccttatttcccccaacttacaatggttcaaaagggcctgaatctgaggcaaacagagctggccatggtcagggccaggtctgtgtggtgagacagaaaggaaacagttgtcagcaggcaaaaggggtgggggcagttggagatgaagctcctcaaggagaagctgtcagctcccactctacacctccccataagcctttgatttaaagaaagcctccatctgttagcctccggtgtgtgggatagttttgcagccgaagaggggtgggcattgctcaggatcttggcatggctgagaaccaggtccaggaaggagtgggaggggcaaggccagctcctctgcccccagcttgctgtgggac

SEQ ID NO: 9539 - DNA, 6000 bp, Homo sapiens
tgcctgtgcatttgaagtgttagccacaagagctttgcctagattaatgtcttgaagcattttccctatgttttcatgtagtagttttatagttttaggttttatgtttacatttttaatccattataagtatatttttgtgaaagataggggtccagtttcattctgcatgtggctattcagttttcccagcagcatgtattgaagagggtgtcctttcctcaatgtatgtttttggcacctttgttgaaaataagttggctgtaactgtgtgaattatttctgggctctctattccattccattggtttatgtgtctgttttaataccaacgccatgctgtttgggttacaatgtaagctgctacattttaagatcatttgttatgaagctacagtaaccagaacactgtttttcataatccaggtgcctgattttgatcttcttaccaccttcaagtttgagagaataatttctacacatttgaaagaaatcaagatctgcttacatttcctagttggttaaacacatagtttcagatcttttctctatttcaattacatattcctgagaaccaaactgctttacttgaaagttgctccaatgttctgacagattgatacttttagttctttaaacaaataatgagctgctttgaattataatgcgttgtataataaactgccttattttcagagtggctatacaatttttctttcccactagctctgtatgagagttttagtgttctgtattcttgtcagcacttgatattgtcaatttaaaaaaaaaagttagtcattctagtaagtatgtagttgtatctcattgcaattttaatttacattttcctaatgactaacaatgttgacagtcttgtgtgcttatttgccatctatactttttttttatggaatatctattcagatcttttttattgggctggtttctcaatgtcgagtgcagtgcatttactagggaaacttaacaaagtgttgcagcagttctcatgacagtgagaaaaagagatgttttacctaggtatgtccaccacaaggggatcagggtatggagtttatatgaggatttacggaatttggctcagggctggggataacttctcttagtgctttagcaataacctgaatacctttattagtgcgtggaagtgttcaagtccctagcttgagttcaagccacaggagacaacacaaaacttgccaagtcacagcgtagtcaaggcactctctatttctcaggtgagacagagaaaaaagtggggggacctgagggaccctacaatcactgatacatggaataacacaaatgaatctcaaactcattatgctgagaaaaaagctagacacaggagtagatatggcatgatgccatttatatatgatattctagaacaagcaaaactaagctagagcaacataacgcagatcagcggttgcctgggacaggggataagggagtcattgattgaaatggggcataaggtactttttgaggtgtgaaaatgtcctgtatttgattatgatggtgattcagagaggtatgcaattgttgaatttgttgacctgtacccttaaaatgggtgcaagcaaatgacacttcaatatgttgttaactgaaaaactaatgagggaaatcgtagagattattacaagaatctgccttattgcaaaatgccagaaaaaaatgctgtcccgtcctctttgtttttctccaaggtgtagaaatggaagtgactgaatttttacaatctcttgcgaattagctattaaaaatcttatgcatgtagcttctttacagaaatctccaaatgctttttaaatctttgtaaccttctaggaaatactataatttgttgatttcagatgaagaatgctttgttatagttttaactctgcagagatgtcatttggtaattgtgattatttatcaagctcctaccatgtgcttcatcttagccaaaatttccactgtagatggtgaaattagggctcaggaaggctacatgactcatctatatgagccataaatgggcgaggtgaacccggtctgtgtggtgctaaatcccaggtgccttctatttcaccactggtgagaacacagagtgctaattaaggagactggagctggaatttccactccaccatttagtcatgtgtgagcttggacaggtcacttgatctcaattcccttatccacaggttaggtgattaccagcattgctcctcattctggtctactgcgtagtcccaggtggagcagtttgcattgattaccctgtgaatggcaccccatggaggcagctctgggatgacaatctccctattaagttaaaaggtcattgtgggatttccacccagaaaatttatgtggaatactctgaaaaccctcaaacactgatctcaaataaggtagtaccagtactataactcaaaatccttcaatagctcccacatttccatggaatctactgtgaactcgtcaactctttataatctagccaaaaccagcagtcaatcttatctccctccactctttgctccatgcccactacctctgccaggcccatgcctttcctgtcttcagatgtcattgaccgcctgttggcatgtcatgtgatctagggataaaactccccagataaagtgaaaggagtggaagccagatgcaccacaatgggcctgcaaaattccaccctctgccagagacctgcaggtggctctgaatgctctgcagggctggagcttctgaatgtgtgtcaccctaacagatgtatataatgtgttacacattttaaaatgtgtatgtgtgtatatatattaatctccctggctcttggttcctggcattaggatgcaagcatatctgttccctaatttcattcctgcctacccctgcacagggaccaagctcacctcacctcttggtcttggtagctctacttcctttttcctggaaactctccctaccccttccacatggccaaattctgttcatccctcgggccctttctcttccatgaagccgttcccagtcccttcagcccacatggtcctgttttctaaaccctgtagaacttgcatttgacatcccacatgctgaatcagagcacaatatattatactatatttcagaccaccctgagtggctgcctctttctcactgagagggtctgtcatgacaactatgataagtattttcatgacgctgtccacatgccacacactggcctccacgtagtcctaatttatttgctcctcacacagatcctacaagctaggcattgctacatcattttgcagtagagcacgctgaggcacacagaggttatgtagcttgcccacggtgatatccctattaagcggtaaaggtaggttttgcattcaggtgtccagcagcaaagtctgagatcttactatcagtcgaaaattttgttttagccaatttgaatatgctatattgaatatgctgtagattaaatagtgaaatgtttctttggttatgctttaactatatttgagcattcttgatattttatcaggtctctgttgtctctgatcaccaacaaggttatagactctttaaggtggaaactgagccccttcctccctttcttctctttctctcaaattctctccctattctttctctctctctctaatgcacatgtgtgtgcgctctctctctctctctgtctctcttatcctccttcctctttctttgtcttttgttcctatgttttctttatcatgaagcatacagcacagtcctacacacatatcaaacgtttgataaacactttggtgcattacactcatttgtcgagttagtcagtgtatcaaagatcacttcatgcttagtcagagttcttcccacaaatattgggtgaatacctgctctgtgcccagtgccatgctaggtcccaagggacacatcagcacatacagcaggcacatggctctgccctgtgacgctttgccctgagacatggctctgccctatgacgcttatgtcacagtggcattctacccacactttacatttccttagccctgtatattctgcagagacttttcacatatttatcttagttggttccacggcaatgctatgacttaaatatcattatttccagtttagagatgaaaaagctgaggtccagcaagtttaaattactacccccagcttatgtagctgtgtatgccacaactgaaactcaaactcaagtcttttagacttgtctaaacctttgcagccacattttgccccatccaagtgtctactggaccctgcagaataattagtttattcctttgccgggaaattcttatttcattcttcatcctgtctcccgatgagtcaaatcaatgcttattcaagaattataaatcccaggtctttaggaggccgagactcgcagatcacttgaggtcagaagtttgagaccagcctggccaacatggtgaaaccctgtctctactaaaaatacaaaaattagccaggcatggtggcatgtgcctctaataccaactattccagaggctgaggcaggaaaatcccttgaacccaggaggtggaggttgcagtgaactgagatcatgccactgtactccagcctgggtgacagaatgaaatcctgtcttaaaaaaaaaaaaaaaattataacaaccccccaccactaaaaatgagcaatgccaatgggtggagagcccctaaagcagcactaattgcaaggatttctcaggtgactggttagtatgtggtgtcaatcatgaaaaagaagaactgcacgaaagtatctttctgaaaacttgcaaaactgagaagctagtctgtttaaaacaggaagttatatacttacattgtttactactttactaatgtctgtgatctgatggtatctctgtttcaggagtggtgacgcctaagctatcactggacatatcaaggacttcactaaattagcaggtaccactggtcttcttgtgcttatccgggcaagaacttatcgaaatacaatagaagtttttacttagaagagattttcaggtaggtgtcgcttttccaggaaaagggaggtggaacaaggaggggtccaggcaggtggaagtagtaacttccagcagtgctcttggatctaggagggaggagaggaaggtacacagcaatttagaggtagtatggggccagagtgggagaaaatatggccacatatctccattttcttcttgctttttctaattttccctttctgtctcccatccacacaatgataagtttgcgtgtagcactcacccaaacttggccctttatacctctttagtcaacatctgtgcccatgttaccctcctatactttcacaaattctcaactatgtgcatatgactactccaaagagcttacacttaatagcttgtgtttatttatattgacttgtaagaaatagcaaaaatataattttacatatatatgtgtatatatatatatatacacatatatatatatatatatatacgcacacacacatacatttttatatatacaaagtcctccctcagtatctgtgagggatttgttccaggacccttgcagataccaaaattcatagatgctcaagttccttatataaaatgatgtagtatttgctgataacctacaaatatcctccagtaccctttaaatacaagtacctagattacttgtaatacctaatacaacgcatacagagcgcttcattcatgtggagtcaacatagcacttgctgcgtggcaaattcaaggcttggtttttgcaactttgtggagctttttcccagatatttttgatccgtgattggttgaatacacaaatgtggaacccatggatacagagggctgattatatacatatgtgtgtgtgcattaagtatgtatgtgtggaaatatatatatttatttgaagttttcattgaaaatccacactaaatcaagctactagatgagt

SEQ ID NO: 9540 - DNA, 6000 bp, Homo sapiens
cttcagggagggtctgagctgggggcagctgagccctgagggagccccaggaagggccccctgccctcccctagctcccaggctgccatgtcaactctctgtcaatgccctgagtctggggacaaaagtccaggaatcctgtgccctgttgggctgatctttttatcaacagtaaaatccactacgaataaagtgggttagtagtccctgtgtgtggggccccaaatggcaaagagaggtgggagtccaaggtacggcaggggctgcaaggaagcaggacagccccaggtgtcctggccccggtgagactgggaagctgcccactgccttgggcaggcctgaaccagctgggatccagtgggatggagctgcccaggccttggcaccaaaccctcattaggagagaccctgcaccaggctaggccgccggggaaagggctgcaggaaagatccagtttgaatttgcaaggcagctgccagctcgggaaaaccctgaagaaagaacttcctcaagccggtggctgctaggcccacggcagtgccagctcagccgaggggagcttcctgagtcctgttcccatcaggcccaggcgcctgactccaggctggggactcacccaggagccctgtggccccaggaaagagctggtcactggcctagaggtagatgcagcgcagtgtgttctgatgagaggggctgccctctagaggtctcgatggggccataaccttgcctggaacccttggctcctgggcagtgggggtcaatgaagggcaagtccatcctgcaggcagacctgggggttttctcttatactccctccatccaaagaaggctgcaggtcagagcagcagcaggacaccaggtctggcttcaggcccctcagaccaaggggatgtgctaacagtagcaccccccatgcatacacatacacacaaatggggtggggaaggaccctgggccctggccccaagaggccagctctgcttgcccagtcaggcctcctccagcctgaccatgggcagcaggctccggcagggaggaggcaggtaatgtgaccactacactagattcaagagccaagtgtccacatgactgtttgaaaatgagtatcccttgtccctggctgttaaattccagacacttggcctccatgatctgcaggccctcaggcatcattaatcatttgagtatgtgttgaaaatttttccagtttttttcctttgttaccttttaaaaaattgttctggggccgggcatggtggctcacacctgtaatcccagcactttgggaagccgaggtgggcagactacttgaactcaagatttcaagaccaacctgggcaacatggtgaaacctcgtctctaaaaaaagaaaaaaaaattgaaaaattagcagggtgtggtggctcatgcctgtagtcccagctattcaggaggctgaggcaggaggatcacttgggcctgggtgactgaggctgcagtgagttgtaattgtgctactgcactccagcctgggcaacagagcaagactctgtctcaaaaaataaataaacaaacaaatagataaataaatagttctaggccgggtgtggtggctcacacctgtaatcccggcactttcggaggctgaggcaggcggatcacctgaggtcaggagttcgagaccagcctgaccaacatggagaaaccccgtctctactaaaaatacaaaaaattagccaggcatggtggcgcatgcctgtaatcccagctacttgggaggctgaggcaggagaatcgcttgaacccgggaggtggaggttgaggtgagccaagatcaagccattgcactccagcctgggcaacaagagccaaactccatctcaaagaataataataataataaataaataaatagttctggaaaaattgttctgtttggaatattgataagttagagcagcctgaaggtccagcacaaaggtcttctatatttcttttcactgtttttcttatgactgcttattatagaaaaataagagcaggaaggggggcaaaagcatgggtctcagtctccctgcccagcagctgcccttgcccacacccttctcacctgtgtgcacaagcacacatttgcctcttgactcattcattcattcattcaacaagtatttattgacagttcctacacgccaggcactcatctagcacctgcaaataaagcagtgaacaaagtgaagaccctggccttccttgaacttactgtccaggatggggattagatccaaaaaagcagcattaaacctaaccactaaattctatcatgtggttagaagatgctcagtactacagggagtaaaagcaacaagataagaaaaatgggaggtgggggacgggggtcagagtgggcctgagaaaggaacttttttttttttgagacagagtctagctctgtggtccaggctggagtgcaaatggcatgatcacagctcactgccgccttgaatttctagactcaagggaccctcctgcctcagcctcctgagtagctggggactataagcacatgtcaccactgcctgcttatttgtatcctatttttttgtagagacagggtctcatcatgtttcccaggctggtttcaaagtcctggtctcaagcaattctcccattttggcctcccaaaatgctgggattacaggtgtgagccaccgtgtcaggcataagtctaagttttaaatagattattccggctgctgcattaagactaggctctgggtggggaatggggggcaagggtgacactgacacaagggctcctgtagttattccaaataatcatgttgcatgtcttagcccaggtgatggtagaggcaggatgaggcactaggcttgtcctaaaggtagaggtggcaggcttcccggatggttccagtaggggaggagaggcagaagtaagtcaagggtgactccaaggttgtctagtgatagaggtgccactgcaggaggctggaggaggagcaggcttgggagagagataagttttgtccatgaagagtttaaaacattgactggacatcggcagggcatggtggctcacgcctgtaatcccagtactttgcgaggccgaggcgcgtgaatcacaaggtcaggagttcgagaccagcctggccaacatagtgaaaccccatctctactaaaaactacaaaaattagccaggtgtggcacgtgcctgcagtcccagctactcgggaagctgaggcaggagaatcgcttgaagccgggaggcggaggttgcagtgagccgagaccacaccattgcactccagcctgggtgacagagtgagactccgtctaaaaaaaaaaaaaaaaaaaacattgactggacatcaaagtgcaggtgccgagtcaactgctgggtgtatgcgttgagttcagtagagtggccagtgatgaagctttggatctgggaagcaaagcaagtggtgtttaaagccatgggatgggaagaagctaagttcagacagaggagggcggcagtaagcactgagccctggaagatgaggcagaaccagcaaaggagctgggcgggagtagccaggaggtgagaggaaaactgggagagcatgggcacctggagccaggtaagtgtcagatgctgccaaggagttgagggtagaggatggaccactgaattcggacacctgtggatccctaaggaccctgaccagggcacttttgtgagggagggacaggcctgcctggagtgggcagaggagaaagtgaggtagaactggaaagagccagtgtaaacaacttgtgtgaagtgagaggggcagagccaacagtggcttttaagaaagactggaaagttggccgggcacggtggctcacgcctgtaattccagcactttgggaggccgaggcgggtggatcatgaggtcaggagtttgagatcagcctggccaacatggtgaaaccccgtctctactaaaaatacaaaaattagccaggtgtgatggcgcacacctgtaatcccagctactcgggaggctgaagcagaattgcttaaacctgagaggcagaggctgcagtgaaccgagatcacaccactgcaatccagcctgggcaacagagtgagactccgtctgtgggtgggaggaagaaagactggaaagaagaaggtattgaggtgagagaatggaagcagctggtaggagggtaggtttgagctcagtgaaagacttccaggatgggggtgctggaaactgagctggaaaacagtagacagagattggatagtgggggtctggacatcagggagtgtgcagcttggccactgacctgcctggtcaagtgctggtggctagggacacagcgggtccaagacgcaggcaaggatggcaaggagccgtggagagacccaggggacaattcagatgtctgcctaggccaggtgtggtggctcatgcctgtagtcccagcactttgggattcacttaaggtcaggagttcaagaccagcctggcaacatggcaaaaccctgtctctactaaaaatacaaaaattagccggtcatggtggcacacacctgtagtcccagctactctggaggctgaggcacctccagagaatcgcttcaacccgggaggcggaggttgcagtgagccgagttcgccattgcattccagcctgggctacagagcaagaccctgtctccaaaaaaaaaagaaaagaaaaaagatgtctgcctggaccctagtttaaagtcacccagcaactgactttccaacaacgcggagcagtaataattgactgaaggttgcttagaaagaagagcagccctggaaaaatctgaaagcataaaactactttccaaccacacaagtctacaaaccgcctggctacacacacaggattagccagcgacctaatccgccaagctatgcaaaaggaggcctctgctgacccctggcggtcaccagccggagtctggctgcgcggtgacccaccacacgttgcccagccgtgtggctgggatggtcggtacccatggccgtgcggtcgagccttgatgctccaggacagtcctggaaggcttcctggcagatccgtgggaagaaagccgacagaagggcgggaggcgggaggggaaaggtcccccgggatgggtagggcctcaacgctgggcatcggcgcaggtgtgtactgcagggagccagccagaccccccacggactgcctgaccttgggggaagcccggagtagaggaagaggccggacccccagacccgccattgactatgtccgccattgactatgtgttctgagagaaatttttttttttttttttgagactgagtctcactctttcgcccaggccggagtgcagtggcgcgatctcggctcactgcaagctccgcctcccgggttcacgccattctcctgcctcagcctcccgagtagctgggactacaggcgcccgctaccgcgcccggctaattttttgtatttttaatagagacggggtttcaccgtgttagccaggatggtctcgatctcctgacctcgtgatccgcccgccttggcctcccagagtgctgggatgacaggcgtgagcctctgagagcaaattttacccagttcctctctatcctcccgatgactctgaaatcaaactcagcaagtcatccgagcccccacggcgcagcggccctaggctggcatgggcgatgcggagctactccgccctcaggaagcaggcgaggtgcccagcgggagaatcacccacatcaccgtctaatctctgctgtgaagtggaagcgcgagaaggagggagcgtctcatgacggagggtgtgaagacgctaggctggacgaagcagaaaggcgggtgtcactggggacgttctgagggtaagccgatggcggctatcgcggaggagaccctggcgaggtggggccccgcgcggggcaagggggatggggtgccacagagggctagttgcaagaggacg

SEQ ID NO: 9541 - DNA, 6000 bp, Homo sapiens
ggggggcaagggtgacactgacacaagggctcctgtagttattccaaataatcatgttgcatgtcttagcccaggtgatggtagaggcaggatgaggcactaggcttgtcctaaaggtagaggtggcaggcttcccggatggttccagtaggggaggagaggcagaagtaagtcaagggtgactccaaggttgtctagtgatagaggtgccactgcaggaggctggaggaggagcaggcttgggagagagataagttttgtccatgaagagtttaaaacattgactggacatcggcagggcatggtggctcacgcctgtaatcccagtactttgcgaggccgaggcgcgtgaatcacaaggtcaggagttcgagaccagcctggccaacatagtgaaaccccatctctactaaaaactacaaaaattagccaggtgtggcacgtgcctgcagtcccagctactcgggaagctgaggcaggagaatcgcttgaagccgggaggcggaggttgcagtgagccgagaccacaccattgcactccagcctgggtgacagagtgagactccgtctaaaaaaaaaaaaaaaaaaaacattgactggacatcaaagtgcaggtgccgagtcaactgctgggtgtatgcgttgagttcagtagagtggccagtgatgaagctttggatctgggaagcaaagcaagtggtgtttaaagccatgggatgggaagaagctaagttcagacagaggagggcggcagtaagcactgagccctggaagatgaggcagaaccagcaaaggagctgggcgggagtagccaggaggtgagaggaaaactgggagagcatgggcacctggagccaggtaagtgtcagatgctgccaaggagttgagggtagaggatggaccactgaattcggacacctgtggatccctaaggaccctgaccagggcacttttgtgagggagggacaggcctgcctggagtgggcagaggagaaagtgaggtagaactggaaagagccagtgtaaacaacttgtgtgaagtgagaggggcagagccaacagtggcttttaagaaagactggaaagttggccgggcacggtggctcacgcctgtaattccagcactttgggaggccgaggcgggtggatcatgaggtcaggagtttgagatcagcctggccaacatggtgaaaccccgtctctactaaaaatacaaaaattagccaggtgtgatggcgcacacctgtaatcccagctactcgggaggctgaagcagaattgcttaaacctgagaggcagaggctgcagtgaaccgagatcacaccactgcaatccagcctgggcaacagagtgagactccgtctgtgggtgggaggaagaaagactggaaagaagaaggtattgaggtgagagaatggaagcagctggtaggagggtaggtttgagctcagtgaaagacttccaggatgggggtgctggaaactgagctggaaaacagtagacagagattggatagtgggggtctggacatcagggagtgtgcagcttggccactgacctgcctggtcaagtgctggtggctagggacacagcgggtccaagacgcaggcaaggatggcaaggagccgtggagagacccaggggacaattcagatgtctgcctaggccaggtgtggtggctcatgcctgtagtcccagcactttgggattcacttaaggtcaggagttcaagaccagcctggcaacatggcaaaaccctgtctctactaaaaatacaaaaattagccggtcatggtggcacacacctgtagtcccagctactctggaggctgaggcacctccagagaatcgcttcaacccgggaggcggaggttgcagtgagccgagttcgccattgcattccagcctgggctacagagcaagaccctgtctccaaaaaaaaaagaaaagaaaaaagatgtctgcctggaccctagtttaaagtcacccagcaactgactttccaacaacgcggagcagtaataattgactgaaggttgcttagaaagaagagcagccctggaaaaatctgaaagcataaaactactttccaaccacacaagtctacaaaccgcctggctacacacacaggattagccagcgacctaatccgccaagctatgcaaaaggaggcctctgctgacccctggcggtcaccagccggagtctggctgcgcggtgacccaccacacgttgcccagccgtgtggctgggatggtcggtacccatggccgtgcggtcgagccttgatgctccaggacagtcctggaaggcttcctggcagatccgtgggaagaaagccgacagaagggcgggaggcgggaggggaaaggtcccccgggatgggtagggcctcaacgctgggcatcggcgcaggtgtgtactgcagggagccagccagaccccccacggactgcctgaccttgggggaagcccggagtagaggaagaggccggacccccagacccgccattgactatgtccgccattgactatgtgttctgagagaaatttttttttttttttttgagactgagtctcactctttcgcccaggccggagtgcagtggcgcgatctcggctcactgcaagctccgcctcccgggttcacgccattctcctgcctcagcctcccgagtagctgggactacaggcgcccgctaccgcgcccggctaattttttgtatttttaatagagacggggtttcaccgtgttagccaggatggtctcgatctcctgacctcgtgatccgcccgccttggcctcccagagtgctgggatgacaggcgtgagcctctgagagcaaattttacccagttcctctctatcctcccgatgactctgaaatcaaactcagcaagtcatccgagcccccacggcgcagcggccctaggctggcatgggcgatgcggagctactccgccctcaggaagcaggcgaggtgcccagcgggagaatcacccacatcaccgtctaatctctgctgtgaagtggaagcgcgagaaggagggagcgtctcatgacggagggtgtgaagacgctaggctggacgaagcagaaaggcgggtgtcactggggacgttctgagggtaagccgatggcggctatcgcggaggagaccctggcgaggtggggccccgcgcggggcaagggggatggggtgccacagagggctagttgcaagaggacgcgtgacggctgcagctctgcggagaccgggcctcgacggccaaggagtggcaggtcggcggaggcgggggccaggcccggaggcagagcgagacaggagagcaggcaaggcgggggccaccgtgagtgggggccgcgaggcgggggctggggcgcggggaggtgctaggtcggcctcggctcccgcgccgcaccccaggcccgccaggaggcgccgctgccccgcgaagccgttccggcctctcccggccaccgaaatcccgcgctccggcctagagaggccccggaagaggcggtgcagcgcaccccgaggccgcttccggcttcggctctgcaggagaggccagaatcgggggaggacgccttgggcggggcgtgggtgagagaacctgggggaggtgaagaactaggaggttgcactgggagtggacaagggggaaaataagaattagggaggggctgcggtgggcagggccaagggcaggtagcaccctgcaaggttgcaccctgcgcagctctcggtccactgctgagcctcctggctttttacctcgcaaaatgccgtcctggtgaggtccctggggagcccaccgctggccaagacccaggacagggcaaggaaggcttcctagaggtagagaggtgcacaaaggcgggaaagcagatacggggacattgggagcccctttagaccgatctttaggtgtctgagccacgcccatttggagggaaggctgaatggggaccagcccgcccaaacctgctggaggaaacaaaaactcactcccgttataattgctccccgccccctcaccagctctcttctccccggagacgggacagccctgtctccacaggcttcactccatttccctcgaatggtgcccacctcctatcctcccatctctcttatcctcaggttctactactcatagcaaccagaaggaactttaaaaatcagatcatgttggccgggcacggtgcacggtagctcacgcctgtaatcctagcactctgggaggccgaggtgggcggatcacctgaggccaggagtttgagaccagcctggccaacatggcaaaaccccgtctctaccaaaaatacaaaaaaattagctgggcgtgggggcgcgccttgtaatcccagctactcagaggctgaggcaggggaatcgcttgagcctgggagacaggctgcagtgagccaagatcgcgccactgcactcaagcctgggtgacagagcaagactccgtctccaaaaaaaaaaaaaaaaaaaattcagatgatgtcattctgccttcaacaccctccagttgtttccttcatacttggaatgcaatttaaactttcttgccccatggccgggatgatctggcccctgctgacccctgccccctggtactagcccacagcctgtcctgttggcatggcatgccatgctggccctcacattagggcctttgcactggctgatagcttttcaaaagctttttctccaacagcctgaagtcactcctgacaaggcccacttccctaactctgtctgcttggccttgatcgcagtatttgctccatacggtacaggcagagcgatgcttgtgcgtccagaactcagtgaccagcttccctcccgcaacaggtccctcctcccctattactcccttgctcctagtcacaatctacaggaagcccctgagcccagctggcaaggtgcaccttgcttggctgtttgctgttgcatcaccttcattagggctgtttttgctccttcattaaattaaattccaggaagcagtgctaatgacagccctaacgagtcacgggagaggctaccagccccagcctttggaaagcatggcaaggaggactaggcaataacatgaacaaagcagtagctcctgggaatagaattgattatcatttcccaggccccccaaggaccctgggcttcccaggggaggtggcctttggagactgcctatgcaacaggcacagtggcaggttgtaccatgaactcttcaaggacaaagaaaaggagggaggttaagtttaggccttggccccaaagccctgagagctcctgagttccctgcagggcttgggtagctcctccccagtcatacaggaacaccctgaatgccagaaccagttgggtttgtagggctaggtgtggatcactggcttggagatgttggtgcccctacctcagcatcccctggagactttggaaccccctgtgtggcttgttcctccatgatgcctcatggcagtcccctctcacaccagtcttctcttgctctcgctattctggcccggctggactcctctctggtttgggagcatccagctccttcccaacccagggcccttgcacttgctgctgcctctgtcgtcactctcttctggcttgttacaagactggtccttccacatgattcaaagatcccctcctcagactatcttctcctgcacatacctcccagtggctctagtgtcaccctgttgatttcctctgaaatggtgaagttcatttccctgtttgtttggtgtgtgttcctcaaggacagggcccagctgcctcttttaccatagggttctcagcacattggcaggcaatatgttcagggaacagtggttgaacagatgaccccttcctctggatcctcccgcactgccccccagccgccacccctgtgtcaggttgggcccccttgcctaatccagaagcttatggggaaggggtgctggggcctgaattctccaggtcaaag

SEQ ID NO: 9542 - DNA, 6000 bp, Homo sapiens
agaccaaggggatgtgctaacagtagcaccccccatgcatacacatacacacaaatggggtggggaaggaccctgggccctggccccaagaggccagctctgcttgcccagtcaggcctcctccagcctgaccatgggcagcaggctccggcagggaggaggcaggtaatgtgaccactacactagattcaagagccaagtgtccacatgactgtttgaaaatgagtatcccttgtccctggctgttaaattccagacacttggcctccatgatctgcaggccctcaggcatcattaatcatttgagtatgtgttgaaaatttttccagtttttttcctttgttaccttttaaaaaattgttctggggccgggcatggtggctcacacctgtaatcccagcactttgggaagccgaggtgggcagactacttgaactcaagatttcaagaccaacctgggcaacatggtgaaacctcgtctctaaaaaaagaaaaaaaaattgaaaaattagcagggtgtggtggctcatgcctgtagtcccagctattcaggaggctgaggcaggaggatcacttgggcctgggtgactgaggctgcagtgagttgtaattgtgctactgcactccagcctgggcaacagagcaagactctgtctcaaaaaataaataaacaaacaaatagataaataaatagttctaggccgggtgtggtggctcacacctgtaatcccggcactttcggaggctgaggcaggcggatcacctgaggtcaggagttcgagaccagcctgaccaacatggagaaaccccgtctctactaaaaatacaaaaaattagccaggcatggtggcgcatgcctgtaatcccagctacttgggaggctgaggcaggagaatcgcttgaacccgggaggtggaggttgaggtgagccaagatcaagccattgcactccagcctgggcaacaagagccaaactccatctcaaagaataataataataataaataaataaatagttctggaaaaattgttctgtttggaatattgataagttagagcagcctgaaggtccagcacaaaggtcttctatatttcttttcactgtttttcttatgactgcttattatagaaaaataagagcaggaaggggggcaaaagcatgggtctcagtctccctgcccagcagctgcccttgcccacacccttctcacctgtgtgcacaagcacacatttgcctcttgactcattcattcattcattcaacaagtatttattgacagttcctacacgccaggcactcatctagcacctgcaaataaagcagtgaacaaagtgaagaccctggccttccttgaacttactgtccaggatggggattagatccaaaaaagcagcattaaacctaaccactaaattctatcatgtggttagaagatgctcagtactacagggagtaaaagcaacaagataagaaaaatgggaggtgggggacgggggtcagagtgggcctgagaaaggaacttttttttttttgagacagagtctagctctgtggtccaggctggagtgcaaatggcatgatcacagctcactgccgccttgaatttctagactcaagggaccctcctgcctcagcctcctgagtagctggggactataagcacatgtcaccactgcctgcttatttgtatcctatttttttgtagagacagggtctcatcatgtttcccaggctggtttcaaagtcctggtctcaagcaattctcccattttggcctcccaaaatgctgggattacaggtgtgagccaccgtgtcaggcataagtctaagttttaaatagattattccggctgctgcattaagactaggctctgggtggggaatggggggcaagggtgacactgacacaagggctcctgtagttattccaaataatcatgttgcatgtcttagcccaggtgatggtagaggcaggatgaggcactaggcttgtcctaaaggtagaggtggcaggcttcccggatggttccagtaggggaggagaggcagaagtaagtcaagggtgactccaaggttgtctagtgatagaggtgccactgcaggaggctggaggaggagcaggcttgggagagagataagttttgtccatgaagagtttaaaacattgactggacatcggcagggcatggtggctcacgcctgtaatcccagtactttgcgaggccgaggcgcgtgaatcacaaggtcaggagttcgagaccagcctggccaacatagtgaaaccccatctctactaaaaactacaaaaattagccaggtgtggcacgtgcctgcagtcccagctactcgggaagctgaggcaggagaatcgcttgaagccgggaggcggaggttgcagtgagccgagaccacaccattgcactccagcctgggtgacagagtgagactccgtctaaaaaaaaaaaaaaaaaaaacattgactggacatcaaagtgcaggtgccgagtcaactgctgggtgtatgcgttgagttcagtagagtggccagtgatgaagctttggatctgggaagcaaagcaagtggtgtttaaagccatgggatgggaagaagctaagttcagacagaggagggcggcagtaagcactgagccctggaagatgaggcagaaccagcaaaggagctgggcgggagtagccaggaggtgagaggaaaactgggagagcatgggcacctggagccaggtaagtgtcagatgctgccaaggagttgagggtagaggatggaccactgaattcggacacctgtggatccctaaggaccctgaccagggcacttttgtgagggagggacaggcctgcctggagtgggcagaggagaaagtgaggtagaactggaaagagccagtgtaaacaacttgtgtgaagtgagaggggcagagccaacagtggcttttaagaaagactggaaagttggccgggcacggtggctcacgcctgtaattccagcactttgggaggccgaggcgggtggatcatgaggtcaggagtttgagatcagcctggccaacatggtgaaaccccgtctctactaaaaatacaaaaattagccaggtgtgatggcgcacacctgtaatcccagctactcgggaggctgaagcagaattgcttaaacctgagaggcagaggctgcagtgaaccgagatcacaccactgcaatccagcctgggcaacagagtgagactccgtctgtgggtgggaggaagaaagactggaaagaagaaggtattgaggtgagagaatggaagcagctggtaggagggtaggtttgagctcagtgaaagacttccaggatgggggtgctggaaactgagctggaaaacagtagacagagattggatagtgggggtctggacatcagggagtgtgcagcttggccactgacctgcctggtcaagtgctggtggctagggacacagcgggtccaagacgcaggcaaggatggcaaggagccgtggagagacccaggggacaattcagatgtctgcctaggccaggtgtggtggctcatgcctgtagtcccagcactttgggattcacttaaggtcaggagttcaagaccagcctggcaacatggcaaaaccctgtctctactaaaaatacaaaaattagccggtcatggtggcacacacctgtagtcccagctactctggaggctgaggcacctccagagaatcgcttcaacccgggaggcggaggttgcagtgagccgagttcgccattgcattccagcctgggctacagagcaagaccctgtctccaaaaaaaaaagaaaagaaaaaagatgtctgcctggaccctagtttaaagtcacccagcaactgactttccaacaacgcggagcagtaataattgactgaaggttgcttagaaagaagagcagccctggaaaaatctgaaagcataaaactactttccaaccacacaagtctacaaaccgcctggctacacacacaggattagccagcgacctaatccgccaagctatgcaaaaggaggcctctgctgacccctggcggtcaccagccggagtctggctgcgcggtgacccaccacacgttgcccagccgtgtggctgggatggtcggtacccatggccgtgcggtcgagccttgatgctccaggacagtcctggaaggcttcctggcagatccgtgggaagaaagccgacagaagggcgggaggcgggaggggaaaggtcccccgggatgggtagggcctcaacgctgggcatcggcgcaggtgtgtactgcagggagccagccagaccccccacggactgcctgaccttgggggaagcccggagtagaggaagaggccggacccccagacccgccattgactatgtccgccattgactatgtgttctgagagaaatttttttttttttttttgagactgagtctcactctttcgcccaggccggagtgcagtggcgcgatctcggctcactgcaagctccgcctcccgggttcacgccattctcctgcctcagcctcccgagtagctgggactacaggcgcccgctaccgcgcccggctaattttttgtatttttaatagagacggggtttcaccgtgttagccaggatggtctcgatctcctgacctcgtgatccgcccgccttggcctcccagagtgctgggatgacaggcgtgagcctctgagagcaaattttacccagttcctctctatcctcccgatgactctgaaatcaaactcagcaagtcatccgagcccccacggcgcagcggccctaggctggcatgggcgatgcggagctactccgccctcaggaagcaggcgaggtgcccagcgggagaatcacccacatcaccgtctaatctctgctgtgaagtggaagcgcgagaaggagggagcgtctcatgacggagggtgtgaagacgctaggctggacgaagcagaaaggcgggtgtcactggggacgttctgagggtaagccgatggcggctatcgcggaggagaccctggcgaggtggggccccgcgcggggcaagggggatggggtgccacagagggctagttgcaagaggacgcgtgacggctgcagctctgcggagaccgggcctcgacggccaaggagtggcaggtcggcggaggcgggggccaggcccggaggcagagcgagacaggagagcaggcaaggcgggggccaccgtgagtgggggccgcgaggcgggggctggggcgcggggaggtgctaggtcggcctcggctcccgcgccgcaccccaggcccgccaggaggcgccgctgccccgcgaagccgttccggcctctcccggccaccgaaatcccgcgctccggcctagagaggccccggaagaggcggtgcagcgcaccccgaggccgcttccggcttcggctctgcaggagaggccagaatcgggggaggacgccttgggcggggcgtgggtgagagaacctgggggaggtgaagaactaggaggttgcactgggagtggacaagggggaaaataagaattagggaggggctgcggtgggcagggccaagggcaggtagcaccctgcaaggttgcaccctgcgcagctctcggtccactgctgagcctcctggctttttacctcgcaaaatgccgtcctggtgaggtccctggggagcccaccgctggccaagacccaggacagggcaaggaaggcttcctagaggtagagaggtgcacaaaggcgggaaagcagatacggggacattgggagcccctttagaccgatctttaggtgtctgagccacgcccatttggagggaaggctgaatggggaccagcccgcccaaacctgctggaggaaacaaaaactcactcccgttataattgctccccgccccctcaccagctctcttctccccggagacgggacagccctgtctccacaggcttcactccatttccctcgaatggtgcc

SEQ ID NO: 9543 - DNA, 6000 bp, Homo sapiens
aggcaggggcatagcatgtgcagcatctcggggtggtggggagctggctgtgcttgaacataggctgtggaggctggctggagggggccacaggggaggaagttatctgggaggtgacaggtgtgtgtgtaggtcagagcccctggacctcagctgtgaccctcgctggccctaggctgaggaattacaaggggtcccaggaatcccagaggcatgacaagcctgcaccctttccacagttctgaactccttccctgtggtatctgtcatgtacttggactggtgcagggtgctgaggaccccacggggaacaggatagacaggctaatagccattgaggatggctgcaggggacatccacaggctttggatggtgtcaccagataggctgctgtccctgtactctagccttcccctatctctgcttaagccagtcccctctgactggaacacccttttgctcctattgttcatccaatcctgagcctacccatagggtggatttcagcaagggtgggtgggaggaggaggagggtcttgcctggctgtgattcctgagccctgtccaagccacatgaacagcctcctcctacccttcttacatggcctgaatgctcttgtgaatatgtaccccctacaggagctgtggagtcacagccaaatgctgtgggggcccccaggcctcaccactgcccctccctgagatctctggcccagccaccagcgagcttggggtcagagcagcagggaccttggtgcccatgatactcaaaggaagcaggaatagagccacctccaggccacctcctgcttctccatcatcctctttctctattctccagacattaggcacccactgtgtgcccagcacagttttgggagtgaatacaggccctgttctcccagtcaggtttaagccttgatagctccccctgggaatgggttgcggattggaacaccacaggaagcagggctccttcagcccctcttcgcagcaaccctccaagtgtgcagcgagtcagggggtccctggggcgaacccacctgttggggaaaagggagaggctggtgtggaatgcaccatggtacctccacattgaggactctggcagtagggggcggggcatggtatgcgggtcacagcacatgcgtcatccttccccatggcccttcctgtttttctgttttgtccctgctactctgagatcatttccctctggcctggtttggcctgggtgctggtgggagccaagggccagccccagcagccttgccccaggaatgaaaagtcagctctgggcagcagcctggaggcctgggaccagcctccagggcatggcagggatattgaggcaggcagcagaggcaggccctgcaggggtagccttgatactaattaagggaactggtaatgaggagcccctgggacccctgccaagcaggtgtctgtgccctccccctgaggaacccagatttcattgggcgctgggcaaagagcccactggacctggcaggccccaacctgtccagcaccacatcgagggaccgcacccggctgctctgcggctaatgccgtaattgcgcccattagcatcctgaatccttcaccgaaggactaatttgcctcctcccaccctctttgcctatagctccaacatcctggatcctgtccgaggcaggtctggctcagaccctgggtgctggagcttggctggctagctgtccacagagctgcacctcctcccattcccattctacaggtgggaggccgggggctctgagttcaggtttcttcatttgagcaatgaggtaatgcaggcaggggttaaagaaacaagggctgtgcctaggccaggcgcagtggctcacgcctgtaatcccagcactctgggaggccgaggtgggcggatcacctgaggttgagaggtcaagaccatcctggccaacatggtgaaaccccgtctctactaaaaatacaaaaattagctgggcggcaggcgcctgtagtcccagctactcaggaggctgaggcaggagaatcgcttgaacctggcaggcagaggttgcagtgagccaagatcatgccactgcactccagcctggcaacagagtaacactctgtctcaaaaaaaaaaaaaaaaaaaaaaaaaaaaagcaagggctgtgcttgagaaatggcatgggagggaaggggcctcttgcagctggcccagggtccagctaaggaagccccatgctggcccccactgaccctcccaccccccatccccagctacctgaacgacctggagcgtattgcacagagtgactacatccccacacagcaagatgtgctacggacccgcgtaaagaccacggggatcgtggagacacacttcaccttcaaggacctacacttcaagtgagcgagcatgtggacaggtgggaggggcaggacctgccagcctctggggtagcagaggcaggggctggtccaggatcccccagccccactgaggttttacaaggctcatgtgttctgggcaagcacatcctcaccacctagtgaaccagcagtcaggatccacgccacctctgccagctgctcacagcctctgctgctcctgcctgatgtggctgcagcctgcctgctgtccaagctcctggcccagaaccaggggtgaagtgggcaagtgtggatgattccagaaggtagctgccctactctgggcaggcctctgtcctcagtcagccaacctgagaaatggggtagaaagcctcccccaggctcccttcctggaactaaggtgatctatatctgcaggatgtttgatgtgggtggtcagcggtctgagcggaagaagtggatccactgctttgagggcgtcacagccatcatcttctgcgtagccttgagcgcctatgacttggtgctagctgaggacgaggagatggtgagaggatgagagaatgctgcgggtgggggcagcgggcttggggagtggtggctagcgttgaccttgctattctacccccagaaccgcatgcatgagagcatgaagctattcgatagcatctgcaacaacaagtggttcacagacacgtccatcatcctcttcctcaacaagaaggacctgtttgaggagaagatcacacacagtcccctgaccatctgcttccctgagtacacaggtgtggggactgtggggatagggcctccagagggttgcttcttgtcccaagtagcctatggtgaccaggtggccctcaggcgccccccactggacagaagtgtaaccttggaacactggcaggggctggtgcctcacttaggcttgtatagttgtgtgtgcacacatgaagcccttaacacactcaagcatgtacccctgaacatgtgtacatgggcatcctccttcacacagtggggtacccctttgcacatctggcatgtatgggcagccacaaacattgtcatattatgcacatgcatgcacaggttgtatgcctggccgtccacacgcacagacccttgctgcacacgtaggatgcggcctgcctgccacacatgcagcacaagtcttcattttctctcccccaggggccaacaaatatgatgaggcagccagctacatccagagtaagtttgaggacctgaataagcgcaaagacaccaaggagatctacacgcacttcacgtgcgccaccgacaccaagaacgtgcagttcgtgtttgacgccgtcaccgatgtcatcatcaagaacaacctgaaggactgcggcctcttctgaggggcagcggggcctggcgggatggtgagccagaggggctgtggcagggtgctggggaagaactaagcgggcctggagccccagcagggggttctgggggtgggtaggggggtgaacctggagggggaggggcaataggtgaccaggggacaagggaggagaaggcccagggtgtgaatcaggaggtcaagtgagtgaggtgcagggcatggaggaggtcatacaagcaggcctggcccagtggtccagacagaagggcctggccttgccctgggacagaaccagaggccatcctgatgttccctggagaaatctcacctcctcacccaccaggccattggcccagcctgccggaagctgcatgccagcggagcccagccctgctgcccactaccaccagctccatgtgcacctccagctcttgccctctgacttgtctgagcgtcccgggcttaggctggccccactggccctggtggaggtggggatgactctcccagtgccacagactcccctcccccacgtaacccagcaacagaaactggctcctgggcggcaactgtgtccctggtaacaaatgggtaggaaaaatagagaagggtcattgtctagggaggcgggagagaggcacgccctggctgcttcccgatccatgctctgctttcccccacctccagggccaccgccgactttgtaccccccaacccctgaggaagatgggggcaagaagatcacgctccccgcctgttcccccgccgcttttctcctctttcctctctttgttctcagctccccctgtcccctcagctccagacgtaggggaggggttgccacaggcctccctgtttgaagcctgcccttgtctgagatgctggtaatggccatggtacccccttctgggcatctgttctggtttttaaccattgtcttgttctgtgatgaggggaggggggcacatgctgagtctcccaaggctgcgtctggaggggcccctgcttctccagcctggacccccagctttgcccaacaccagcccctgccccagcccaagtccaaatgtttacagggagcctcctgcccagtcccccaaccccagccgctcggaggccccaaaggaaaaagcacaagaagcgtgagacgccaccattcctggaaaccacagtccacctgctcattctcgtagctttttaaaaaaatgaaagtaaaggaaaaaaaaaaaactgcaaatctagaaaactttttagagaaaaactatttaaaactgtcagatcctgaccagcaagcccccccccagccccccttccaagtgactccgtgccttgagtgtgtctgcgtgtttacacccgtccctctgctggccgcccccgtgcgagcggcacccctgccctgccctccacagaattgggttccaagggctgttccagacaactgccaacgtcactgagggccctgccccagcggccctggccccaggctctattaacctaaaatgtagctccctagcgctaacctaggaaccgccgctgcctgctggggggccacgcccctcatgcccttgtcccaggcccggggccttcagcgttgaacacttccttgcttttttcacatgttttatggaattgttcacctggtttgaaataataaaatgtagaaagaaaaaaaataccgagaactgatgggtattctctcccaggggcagaggcctgggctaaggtgtgccaaggtgatggtggtcctaacctcagtcctcaacctgagtcagggccctgactcagctttccgggccgtcctggagccccacgctctgagcttcatttctcccacctggactaggcagcatacatgtggggcccgtgtgtccccgcccttccagtactctgcagccttgggtctcgggcagctgggcaggcttctaagggagctgttgtaaggtgctcttccacacctggagcaggaggggtggccggcctctctagcgcggaaggagaaagtgacttccgacttaggtaccaaggcctgagagtgtccgttgccaaggccacacagccaggtgggccgcatgcagtcctggcttgactaaaaaggccagtaggggccttaagacatattcagaaagttccctgccccagagggccgccgccaaacctgaagggtagtgacaggtggccatactaccatgtgatggttgccccaggctgggcctggagagctgcagatcattgactctga

SEQ ID NO: 9544 - DNA, 6000 bp, Homo sapiens
ggaggctgaggcaggagaacagcttgaacccagaaggcaaaggttgcagtaagccgagatcgcgccactgcactccagcctgggtgacagagcgagactccgtctcaaaaaaaaaaaaaaagaaaaaaggaaaaaagaaaagtaagttgtttatctgaccttctaaaaaatcaagagagacagaatacccaaacaagccagttttagcaggcatgataaggaactaccctctgctttaatccttacaaaaaagtaacctgatgttaaccaatcagttatctttcaattactgtttcactgttcccaccttacaaagcccattcttctgctactgcccattgggagttttcatcctattttgtagaatggaagctgccctcattcacgaattgcaaataaaagccaactaagatctttaaatgtgttgtaattttgtcttttaacagatagcacatcaaaagcacaatccctagaaggattgacaaattggacttcatcaacactaagagcttctgctcttccaaaaacactattaatagaatggaaagacacagactgagagaaaatatttggaaatcacatatctgacaaaaagacttgtaatcagaatatacaaagaactctcaaacacagtaagaaaaaaaccaacccaataaaataagtgggcaaaagatctaatagatgcttcaccaaagaataagcaggtgaaaacatgtctgttcaacactgctaatctttagggaaatacaaattaaaaacataatgagacaccatcacatacctattagaaaggctaaaaattttttaaatgaccatgctgtgttggcaaggatatggagcagatggaactcctgtacactgctggtaagaatgtgaaagggaaaaaccattttaaaagttagatatatactttggggtgatgaaaatgttctgggccgggtgtggtggctcatgcctgtaatcccagcactctgggaagcagagacaggcaaatcacttgagcccaggagtttgaagaaatcctgggcaacatggcaagaccctgtctctacaaaaaattacaaaaatcagctgggtgtggtggtgtacacctgtggtcccagctccatgagagtgagaccctgtttccttaaaaaaaaaaaaaaaaaaaaaaaaaaggaaagaaagaaagaaaaaaggaaaggaaaggaaaagagaaaagaaacggttctgtaattagatggtgacggttgtacaaccttgtgaatatttgaactgcacacactttaggctgggcgcagtgtctcacgcctgtaatcccagtactttgggaagctaaggtggaaaggctgaagctgggagtttgagagcagcctagacaacaaagtgagacattgtctctaccaaaaaaaaaaaaaaaaattagccaggtgtggtggcatgtgcccttagttccagctactcgtggggctgaggtggaaggatcacctgagcctgggaggatgaaggtgcagtgagctgtgatcaaactattacactccagcctgcgcaacagaatgagaccctgtctccaaaaacaaaacaaaacaaaacaaaacacgcacactttacataggcaaattttatgatgtattaagtatttcaactttttaaacaaagttaaagcatatgcctaccatatgccccaaccattcccctccgaaacagctacctacccaaaggaaatgaaaacacagatctagacagagacttgtgcaccagtgttcacagcagcttttgttgtaacagccagaaacgtgaatcaacccaaatgtccatcaacagaaaggctaatcaaactgtgatatagctatacaatgaaataccactgagctacaaaaaggaatgaactatagatacatacagcacaaataaaataataatgtcgaatgaggccagatactcccccccaaataaatacacagtatacttaaagtatatatacagatcccatttatacaaaataccagaaaatgcgaactagaaagcagatcagtggttacctggagaggggtaaggaagggcagtaggcaggagggtgaattacgaagaaatactgggatacttcagggtaatggatttgttcattctcttgactatggtgatggtttcacacaatacataccatctttgaatggtatgtattcatagatacatatgtatgtcaaaactcaaagtgtatagtttcaacatgtatggcaattatattccaatgaagctgttctttaaaaaataaataaataaaaggtatagtcagaggccaggaggctgcagatatctatctgaggggatgacatggaagcagcagccactctgcattgcctcagttctcactgcattcacgattgctgaatctggattccagcttcagcttttcttaattctctgctgcaaacgtctgccttgtgttgtgttagcacctaaagtcacattagacagaaactttccactcaccccgtctgtccttcccaagaggaacactttctcttgttctcatacccaaaaccacttcctatgtccctttaccccaaccatcacatctggtttagccccagccatacaaatctttccctaacctctttacatttccacaatcctagttgcatcattacttcttgactcctaatttatttccttaccccaggctcccttcactctactccagcctgctttgctacacacaggagcagctactgaaagccaaagctccttgggctaattcctcaggcactccaagagcttggctccatatcccttccgagggtcccacagcccaggtctatgtgtttgcttgctacagctgacttcctcttctatcttaaacctgccttgccacactttcccaacccccagatcctggaaggggcatccctcttgtattctgtgactcaaacccagcaactcctcaggagactagttgcaaacacctgactgaagggacaattcagagcagaggctgagccactcggattttaagtcaaatctgaatgccaacgcgcagcagggtgaggcaggatcaggcactaggcatgaaggctgcagcaagagatggtatcagggcaaatcagaccccagtgatggtcaaaagaaagaagaatccacttcataccaactaggaccactagaattaaaaaaaaaaacagaaaacgagttttgacgagcatgtggagaaattagaactcttctacaccgctggtgggaatgtaaagtggtgcagccattttggaaaacagtctggcagttcctcaaagagttaaacatatgacccaggccaggcacgatggctcatgcctgtaatcccagcactttgggaggctgaggtgggtggattgcttgagttcaggagttcaaaaccagcctggttaacatggtaaaaccccatctctataaaaaataaagaaaaaaaccaaacacacacacatgaccattcctatgggatctgctctgccatctctacaaaaaataaacaaacaaaccaaccaaccaaaatgtatgaccattcctatgggatctgctctgccagtgtcgacagtgatctttggttcaggagctgttttctcttcccccaagaaaatcatggtcgacttttgatttttattttcaaaccttcttggtagttgattttaaaatcatgatcccagaaaagaaccatacaataaatttagtccaattttatgccttctgtcctagtgaaagacctgtcttctgtttcccatgacggtggttacccaggacttcttgggtgtcctaatttattgttgaataactgttatttacttggtttcactgtttgaaacttactggttaaacaactggttcagattctgtcctctggagagatgcaattttgcaaacatactgattttatatattgagggtgccatgtttgagtctctgtattcagtggagcatatcagagttcatgttaatttttacattggtgtacatctaagtagaggggctgctctggtctgaatgttaatgcccctgcaaaatttgtatgttggagcctaaggcccaaagtgacagtattaagacgtggggcctggctgggtgtggtggctcatgcctgtaatcacagcactctgggaggctgaggtgggtggatcacctgaggtcaggagttcaagaccagcctggccaacatggtgaaactccgtctctactaaaaatataaaaattagcccagagtggtggcatgcacctgtaatcccagctacttgggaggctgaggtaggaaaatcacttgaacctgggaggcggaggttgcagtgagccgagactgagccattgtactccaacttgggcgacaagagagaaactctgtctcgggaaaaaaaaaaaaaaaaaagtagaggtagagcctttgggggagtgattaagtcaggaagggcagggaccttgtgaatgggactagggcccttaggaaagtggctgcagcgagccacctcgccccttccaccatgtgaggacacataaaagacaccatccagaagtgtgaccctcactagacagtgaatctattggagccctgataatggacttcctcagcctccaaactgtgggcaataaacttctgttgtttataaattatccagtctaagatatcttgcaacaatagcccaaaggaactaagacagaggttaactgaagatgtaagggatttcttcattttaggaggtgtttaattgtattacttgagttgaattagcaagagtaatggtaagctgatttagtaagagtatgggtaagtgtgagaagcagggatggtgaggaaggagaggaaggtcactcgacttaaacacagtatcgctagcagaggagaggtagaaaaggcgagggtactggacaggcactgattttggcacagtgagaaagttgtgggtagcagagacattcttcgccgagagtcgtcggggtttcctgcttcaacagtgcttggacggaacccagcgctcgtcccccaccccggccggccgcccgtagccagccctctgtcccctcttcactgcaccctcggaccatcccaaggcccccgccgccgctccagcgccgcgcagccaccgccgccacctctccttagttgctgccatgacaactgcgtccacctcgcaggtgcgccagaactaccaccaggactcagaggccgccatcaacggccagatcaacctggagctctacgcctcctacgtttacctgtccgtgtcttacaactttgaccgcgatgatgtggctttgaggaactttgccacatactttcttcaccaatctcatgaggagagggaacatgccgagaaactgatgaagctgcaaaactatcgtggtggccaaatcttccttcaggatatcaagaaaccagtctgtgatgactgggagagtgggctgaatgcaatggagtgtgcatcacatttggaaaaaaatgtgaatcagtcactattggaactgcacaaactagccactgacaaaaatgacccccatttgtgtgacttcattgagacatgttacctgaatgagcaggtgaaagccatcaaagaattgggtgaccacgtgaccaacttgcacaagatgggagcccccgaatctggcttggcagaatatatctttaacaagaacaccctgggagacagtgataatgaaaactaagcctcaggctaatttccccatagccatggggcgaattccctggtcactaaggcagtgcatgcatgttgggatttcctttaccttttctataagttgtgccaaaacatccacttaagttcttcgatttgtaccattccttcaaataaagaaatttggtaccaaaaaaaaaaagaaagaaagttgtcggtagcaaagctattacaggacagaaatgtggtatgtggtcgaggctgtcactgcactactcatcactcacactgaggtgactgggaggagccggggaaggacagaaaggagtcacagggagctcatttccagccccgctaaatgggagggaga

SEQ ID NO: 9545 - DNA, 6000 bp, Homo sapiens
cacagtcctacaggcacattcatgaaattctagggctctgtggcacagttcgtgggcaaggtctgtggtgcccaatatgggacatctgccgctgggagtacgtaaggtgttttgaggcagcaccagacatagacatttaaactttttaaattttcttcaatttatcttaaatgaattttaaaaacactagctttacgtgtatggtagtgatgtaaaattttgtttttaaatgtattgaagtgaaaagtgaattaatttaaagaaaaatgataaataaataacagtccacatggttcacaaacatgataaatatggctattggcaaaaatggcaaacatggttggagaacgggagtatcgatgggtctgatttggaatgagggccttggaccaacagcaccaccattccttgggggcttgtgggaaatgcagaatcgcaggtgccgtcccggacctactgagccagcatctgcattggaccaagacccccaggggattcgctgatgtttgaggagcattgctccaaggagcttggcagctctgagacaccggggctctgaggtcagaagctccacttgcagccaagagagtcccagggttcagggaaaagttggggcattcccacctccttggcaccacatacacatacatacacgcacacatgtgtgcacgtgcacacacaggttctccttcaccacctgagctaggcaagtccccacagcagccccagcatttcctttgcagaatctcctcctgctggcttctacactcctatttgtactgtgtgagtctttgtgctccctgagggatagcgagcaagtgctttgggcagcagggagaacagtcatgtcaagaacttgaatgtgctgaagaaatgttctaaaatgcagacatctgactgttgccgaagctgtgaacaacagaaatgaacttgtacttaaatgcttcgaatctgcagcaggtttttcctttaccagctgacttttattgagattcaaccatgtacctggcactagggagaaaaggatgagtaaggcatgatgcgagccatagtccagaggggacacatacgatgcactcttcatgacagcacagcactggcaggcattacaagtcagctatgggccaggcgtggtggctcgcacctgtaatcccagcactttgggaggccaaggcgggtggatcacgaggtcaggagtttgagaccagcctggccaacacaatgaaaccctgtgtttactaaaaatacaaaaattagccaggtgtggtggcacgcacctgtaatcccagctactcaggaggctgaggcaggagaattgcttgaaaccagaaggcagaggttgcagtgagccattgcactccaggttgggcaacaagagcaaaactccgtctcaaaaagaaaagtcaggtatgtacccagggcccgggggcagggaagagcaagcaatatattccagctgcagatggggttctggggcttcttaaaaagggtaaaaggccaagcatagtggctcatgcctgtaatcccagcactttaagaggctgaggctggagcattgcttgagcccaggagttcaagaccagcatggacaacatagtgagacctcatctctaaaaaaattaatgtgttaaaatttaaattttaaaaagaggtaataaatcatctgggtcaagagaaaggacaggatttttctgggttgagaaagcagaggtgctcttggctgagagacatcccagaagtataaaaatgcacattccggaaagtgaaaagtttagcttctcctggagcctaggtgtgcaagagttaaattcctcagggcccaattttaaaaatcctcaaaactttacagaccaggctaaggagtttggactttatcttgtggtgactgggagccactgagggtggttaagtaacaatggcatcactaggatgagcaaattattgaaagtggcatgaacttcatggtcggcagggtaatcaggaaccctggcacgggcccaggagcccacacccatacaactgagtcagggccctccccagtgtctccaccccttccggaaatcagataactaaggcatgctagccttctatcctgcaggtaagtctgtcctgagtgacatggggcacagtgagaccggtccacaggcagtgtcttgcatactagcagtggaggccccaaggagcactcagagtggggctcagctaagctgaaaaccccattgccatggggcaccagacaccactgagctgaactcactccccttgtccctgccatgcagaagtgatttccctagccccaatccccctgctgaatgccaaagccagctgccacacactcttgagagccaactggtaaattttctagaattctgtgggctggttgttaaacatggccactaagaattaaactacataagctagcaattgaataagttatttaaaacagaggtaataaatacacaaaacttggcacttcctaattattgactgtactattatctatgcctgttggatctggatagtggagactcagtacaatggtgtgctactgcatgtctccacgtttagtgacatcactttggtagcttagaatcagtcatagtaaggccaggtgaggtggctcatgcctgtaatcccagcactttgggaggccaaggcgggtggatcacgtgaggtcaggagttcaagaccaggctggccaacatggtgaaaccccatctctaccaaaaatacaaaaattagccgggcgtggtggtgggcacctgtaatctcagctactcaggaggccgaggcaggagaattgcttgaacacgggaggcggaggttgcagtgagccaagattgtgacactgcactccagcctgggcattgcagcaaaacactgtcaaaaaaaaaaaaaaaaaaaaaaaaagtcatagtaaaagtgtttacaccacagaaattggcaaatgtgacaaatcagagctttttctgcagagagccagtggttacatacctgccagcctaccactcctctccaccctctgtcttgctggctctctgcggaagccccccaacccttccaggcctgtcctctccactctatgagtcccagcagcacaactggccttgtcagatgagagctgtcacataggcttcagaaagtcatggggaccctaccaggagccctgattatctgccccattgcatttacttactgctctttggggttatctgggtgattcttcgtgctgcccaaagctaccacacagggtctcacatactggatgggctcccagggagtatagcagtatgaatggaaggaggtgctggcctgatctcagaggtagggaattaaagagaggccttgcctccatcaaaccaacaaggtcccagcagcctcatggtccaggtgaggcatctctccaaagtgcccagttcctgaaggtcactgcatagccaggtaccctctaggaataactcatatatgagaacaagaacatgcaagcagatagctggaggcagcaacaagccttctgcctaaacaatgcaaaaccactttaaaaaggcagccccgtcgaattggagcccagggaaccagcacaagaaaatgctggcactccgtctgctgccattgctgtgaggagtcctttgtagggggagggcgggtagccctatctatggatggctgagactcattttgcctgagtcttatatattctcaggaatatcttcacagccttggagttgataaaggagtgctttcttaaacaggacataagaaaaaccaccaaaggaggacactaaaggaaaagattgggaaattggactttgttaaagttaaaaatatctcttcattagaagacaccactgacagaataaaaggcaacacagactgagaaaagcaatttgtaatacactaaactggcataggacccaaatccagaatacataaagaactacaaatcggtaggaaaaaatcagacaacccaattaaaaactgacaaaaaatttgaacaggcacttcatgaaaaaagatacctagatggcccaattagcctatggaatggtatgcagccttactggtcatgagggaagttaaaataaggcacaatgggccaggcgtggtggctcacgcctgtaatcccagtactttgggaggctgaggcgggcagatcacaaggtcaggagattgagaccatcctggctaacacggtgaaaccccgtctctaataaaaatacaaaaacaaaattagctgggcatagtgatgggtgcctgtagtcccagctactcgggaggctgaggcaggagaatggcgcgaaccccagaggtggcacttgcagtgagccgagatcgcgccactgtgctccagcctgggcgacacagtgagacgccgtctcaaaaaaaaaaaaaaaggcacaatgaactatcactatacacctacaagactgggcagacctttagaaatagaatgacaagtgttaggatgcaaagcaaaagcaactgaaacccaaagggagtgtcagcttgtactaccacactctggaaaacagtctgacaatatctgctaaagccaaacacacctatcctaaggccaagaagttcccagcagtgagtgcattcatctacggaagaacgtgcactagaatgtgcattgcagccctattcatgacagccccaaactggagacaacacagacatctgtcagtagtagactggagcatactcacaccaccgacaagtatactgcagtgagagagaatgacccacagctacacaacacactagaacatgaatgaaccccacaaacaacggaaagcaaatgaagccaggcacagaaaaagtacatcccatttaattccattttcatcaaggtcaaaactaacccatggggttagacaccaggatggtaggttcctttggggaggaggcaatgggtaggaaaaaacatttatctagaatctgaagtttaaaaaaattaaagtagtttctcctgctgtgctgccttttttttctgctttgctttttcgaggtaggaagttccaggacaggtaatatgtctgaggaagcctccacctccctcaccctactcacccttctcctctgggaccagacaggcaggaactccagggaaagcccaacaaggagctgtcctagagcactgatttcattttggcttcaagtaagattttcactagcaactctgcttttcatctcttttaaattttattattattatttagcattttcttatctgttacaatgtattaggcactgttcaaagcgtggcattagtattaatatgttacccattcattcattcagcctgctggagacttggtaatggcctctttattgagaacttactctgtgccaggtagtaagctaagttcccaattaatcctcacatgagctcttccttgccaggcaggagagaggggaagatatctgttagcattacagaggagtacacagagactcagagaagtcaagtgccttgtccaaggtcacacagctaagtcagtagcagagttggtatacaaacccagattccacattactgcaaagcaccaagctctgtcttatctagtgaccaccctcaagcaaatcacgttgtaagactggcagaaatacgaggtttcttagttccctaccctggcctaatgaatcaaaatttctggcccctaggctggcctgagcagtagagtcccccacagcagttcaaaacctgattccgtccccggacccagtaggcacgcagggccaagctgttgggtggacggaggggacgggactgccgggaaggtccctcacttctttctggcccctggcaaatgttatgttctctcctctgagaagccctccctaaccatccctggccaccccccgcaactgcttacccctttactttgccttaggtgtcttcctcgcgtctctcagtcttatacgtgggctaggttgaaccatatgacattgtcctttctataaattaaaaaatggttgaaaatggggcatttcatg

SEQ ID NO: 9546 - DNA, 6000 bp, Homo sapiens; identical to SEQ ID NO: 3404

SEQ ID NO: 9547 - DNA, 6000 bp, Homo sapiens
gaaagggggctgggcatggtggctcacacttgtaatcccagcactttgggaggccaaggtgggtgggtcacaaggtcaggagtccacgaggtcaggagaccagcctggccaatatggtgaaaacccatctctactaaaaatacaaaaattagctgggcttggtggcacacacctgtaatcccagctactgaggcatgagaatcgcttgaacccaggacacagaggttgcagtgagctgagattgcaccactgcactccagactgggcgacagagtgagattctatctcaaaaaagaaaaggaaaagaaagataatgaaagggatgctcattgatttagtacctgttctggccaggaatagtgctggttacttttacaaacattatctccagctgcccccaggatgtgggtggcaaggtggggctgaagcagggctgaccctcacccactgaccctgccacctgcccagatggctcggacttctggaagtcagtgcacttcactgactacagccagcacactcagatggtcatggccctgacactccgctgcccactgaagctggaagctgccctctgccagaggcacgactggcataccctttgcaaagacctcccgaatgccacagctcgagagtcagatggggtgaggacaggttcccccaggaccagggtgggcagggctggggcccaggaattttctccctgatgaactctcctctcctcccacagtggtatgttttggagaaggtggacctgcacccccagctctgcttcaaggtacaaccatgggtaagaaaagatgtggtgtagtgggtattgcctggagcttgctaatctgccattcctgtatttctcagttctcttttggaaacagcagccatgttgaatgcccccaccagactggtgagtcaataagtgacctctgctgggaccccctgccccatttcatcctcacccaactgtaaccaagctaaaccccagcccagccctgaattcatcacccaaagcccaactcctatcaacacccccaccccgccccaaacagggtctctcacatcctggaatgtaagcatggatacccaagcccagcagctgattcttcacttctcctcaagaatgcatgccaccttcagtgctgcctggagcctcccaggcttggggcaggacactttggtgccccccgtgtacactgtcagccaggtatggcctcgcccccactaggtcctattgctcagagcacagccctcaatttccttgtgacctcattgagatagaccctgggaaggcagaaacaaacaaatccctgacttttaccatctggtttactttatttacgtgatcagcctctgttcagctaacttgctgacagtaggttcctcaagggagcattttcttttttttctttttttcttttttttttttgagacagagtctcgctctgtcacccaggctggagtgcagtggcgcgatctcggctcactgcaagctaagggagtattttctaatcctttcagtttctgaatttacaggaataacagaggcaagggactggccctcccacattcaggtgtcctgtagcccaggggtcccaatccgtgagccgcagaccagtaactgtctgtggtttgtgagaaacgaggccacacagcaggaggtaagtggagggtgagcaagcattactgcctgagctctgcctcctgtcagtccagtggctgcattagattcttataggagcgcaaaccctattgtgaacggtgcatgcgagggatcttggttgtgagctacttatgagaatctaatgcctgatgatctaaggtggtttcatcctgaaaccattcccccaaaccccaaccccttcaacctctgtgtaaaaattttcttccatgaaaccagtccctggtgccaaaaaggtcggggaccactgctctagcctaacagaacaacatttaatactgatgccttcccttgaacccagctgtccgctaccactactctcctgcctccacgaggcacctgtgcagaagttatctatcctaggaggcagagcccatgcagctgacaggctctgcacaatcctgtaaactattgacaaatttcacctgttacgtaactaggagcactttatcagactatcttccatgtatctgatataaaaaccacagtcaagtacaccctcaataccacagcaccacgctgactaagcatgactagctctttcaaacagttatttcttaaatgctcacttgcagcttatatgtttgttttgcattgtatgagggctcccaagcagacaggtgatagcaacacagtatgaaagaccaagtcacgcttaagatggccacatgcagtgtctcacacttgtagtcccagctgaggtgggagaaccgtgtgagctcaggagtccaaggctgcaatgagctatgatcatgccacagcactccagcctgggtgacagcataagactctgactctaaaaaaaatgtttttaattaaaattctgtccaatttagtatgctttgtgcccaccctgtagcaggctctgggagatacaagaaaagtatataacacagttaaggagttcatagactaataatagctgttaccaataaatgaatatacattgtagtttatttaaaaagacattcatgtgcatatacccatttgatgctctcaataacccagtaaaataaagattattatcccccatataaaaatgaagaaagtaggccaggcgcagtggctcacgcctgtaattccagcattttgggaggctgaggagggcagatcacctgaggtcaggagtttgagaccagcctcaccaacatggcaaaacccgtctctactaaaaatacaaaaattagctgggcatggtggcgtgcacctgtaatcctagctacttgggaggctggggcaggagaatagcttgaacccaggaggtggaggttgcagtgagccaagattgcaccagtgcactccagcctgcacgacggagcaagactctgtctcaaaaaataaataaataaataaataaataaataaacaaacataaaaaaattaaaataaaaatgagggaagtgagccttaggaaagagaggtaacctacctccatgcaaggaccacaaagctagggactacaaaggcaacagttaagcctggacccaggtctcctgaccttaaaacttacattcttttcaatgatatgttttgatacctcttcagctgtgcaggagagtaaagtgagacagccttcctggtttgtgagctgctagaggacacagacaatgtccgcacccgccttctttcctcagggcttggcacagaggacacactcagagtctgtctgttgacaaatacctgactgcagcaggagctgagctctgggaaagatcagtgggagccggagtgactggggaagccttcttgtcagaggtggcacttggcctaagcctcgtaggattgggggtgtggtggggaggaacagcaggggcaaagactcaaggccagacagggccagattcacctccctggggacagcctttctgctctttgtttctacaggcccggggctcaagcccagtgtcactagacctcatcattcccttcctgaggccagggtgctgtgtcctggtaaggaaacctaccctcactctacatacagagccttggcatctgctcccctagtggcacccacccctggaaaatccattctgcaaaaatgtttggtttggccagcacagtgttttaaattgaaattgcttaccaccatttacatatataaacaaagctggatttctggcctctgttgaaaaatcagaaaaacctagtgccgtgtgtccacattctggcatggtgacaatggcctggagctcagtgccatctgattgtttcagtcagggcctgtgctctccaggtcctcacagcagccctggtcaactttgagtttactttttgagtttggcccctgtcacacttgagtttgccaccattgacctgttctgtgccaggctagcagctggagcagacacaaacccacctgggaagaattccctagccagtggggactcccctctcccccagctccatgcttcactcagctccccgggaggagaagatgcctggctcataggggtggggggctctgtgccctcaggtgtggcggtcagatgtccagtttgcctggaagcacctcttgtgtccggatggtgagttcttggggagggggaggtaagagggaggctgggcactgaggaactgggcttggcctcatcctgcttgactcagtctcttacagacacctggggctcttgatcctggcactgctggccctcctcaccctactgggtgttgttctggccctcacctgccggcgcccacagtcaggtaagctcacctggggtaacctgggaagtcagacctgcccagctcggagactagctgccccctcaccctcccctgtctgagctctcagcactgcacccaatctctgttacccaggcagggagcctcaggcccccaagtgagcaggaatggttaaggcaaggcaaagggccctctgagcatattgtcactgtactgagtctctgtacaaaaggctagtggggcagaaatccagcctgcgctgtactcgcccagcctggagccctgaccctctcttcagaaggggtgcctttatctaattagcccataagcaccctataggctagggctgttttcggtaccaacccccagagcaaataaggggcgggggcgggggcggagaggcgagcaccctacggtatcccgagagggtggggagaagagggctgagcagtccctcagccgcccagccttcatctgttgcttcccgccaccaggcccgggcccagcgcggccagtgctcctcctgcacgcggcggactcggaggcgcagcggcgcctggtgggagcgctggctgaactgctacgggcagcgctgggcggcgggcgcgacgtgatcgtggacctgtgggaggggaggcacgtggcgcgcgtgggcccgctgccgtggctctgggcggcgcggacgcgcgtagcgcgggagcagggcactgtgctgctgctgtggagcggcgccgaccttcgcccggtcagcggccccgacccccgcgccgcgcccctgctcgccctgctccacgctgccccgcgcccgctgctgctgctcgcttacttcagtcgcctctgcgccaagggcgacatccccccgccgctgcgcgccctgccgcgctaccgcctgctgcgcgacctgccgcgtctgctgcgggcgctggacgcgcggcctttcgcagaggccaccagctggggccgccttggggcgcggcagcgcaggcagagccgcctagagctgtgcagccggctcgaacgagaggccgcccgacttgcagacctaggttgagcagagctccaccgcagtcccgggtgtctgcggccgcaacgcaacggacactggctggaaccccggaatgagccttcgaccctgaaatccttggggtgcctcgaggacgactggccgaaaagccgcattccctgcctcacaggccggaagtcccagcccagtccccgcgcgcgtccctcttcctcctcatactttcccttgactgagagctcctctaacccctgttctgatgggggagggcggtcttcccacttcctctccagaactccagaaagagcagtgtgcttatgcttcagtccaggctggagaggttggggccggggtagggaggcaggagccatgtcagttctgaaggagggtgaggcggtgggggattgcagggggcggctgagagaaaacctccttgggggccagggattccctttcccactctgaggctctggccagagggagagaggactctggacctaggaaaagaggcttttggctccaggtggtcaggacagtgggggttgggggtggggtgggtgggtgctggcggtggggaccaagatccggaaagatgaataaagacaaacatgacaaacta

SEQ ID NO: 9548 - DNA, 6000 bp, Homo sapiens
ttcatggctcctgcgaggacctggcctctactttgacacagagcaggcacatggaaaaagttagctctcagcccactgagagctacaacgaaaatggtagagcatggtattggtaaatatttgttgttttggttcttctcaacaggtgactaggaaaattggcttctattttttttttcttgttgaagggtgaagggtcaagcactttttcctaggtcatgttacatactattgtttgtcaggatgaaaataattgttccagtcctttctgttcctccctgaatagccctcagtagatcagccttttggtacagcagtgtttaaagttggtcactatcatttgattatattcttggttacagctcaagaacataactcactttatttaagtttacttagccaaactttgttgaatttagcctgaaggtgtgaggctaaataccttggaggaaatttagattccttcctggtttttccattccagaactgtaaataagtttaagaaataaatacagcaaataaaaatgtgcataagggactagtgataataacatctgtttgtaaaaaactctgctatatagaaaatattttataaatgaaaattattaccctatgtaattttcccaacagtctctcccttacccctgccccttccttacatctgatttgtagataagagaccaaaaactcaaaaggtcaagtaacttgctgtagaatgcacatttccaaattgtagtgccagtagtcagctatagattactggattccaaataaaattttctgttcttttcatactacctgtaatagcagtggctttaatagtttaagtgtgtagacttctatattacctacaaatgctcagtttttctcagagtatatggctctaattatatcttccaacaaagctgataaattagatataaatgatgttggggcaagatggggagtttaaagacaccatggaggatgtcagtcactgttagatccatttctattctttgtattacttctaccaataaccaccatttgttgaaagtcagctcttccttagcccttttgtaaatattagctctaattgtgccaccaactctgaaagggaagcttattaagttctcttttatagataaggaaactggaacttggagattttaaacaactaaccaaaacaactaaatgttattgccagaatttaaatccaggacttaaagcctggtggatgccctaccattaaactccttgccttataatcaaggttattctatgggaaactatatactagattagaaaaatttgaataagtagagcagctagcagctggggcagagagagttccacttgggctggagctctgagtccttcgcagtttaaggctatgcaaattacaagctttcgcagtatggggtagactacataagacactggaggcctacaaagcaaggcacagaagggaatagtgggaagacactgaacagtaagaaagagaaaagcagccccccaacatccaggagctgtcctggtactagtggctaagctttgcccaactaggagctggcctggcactcacagctaggccctggtgtcctcctccttggcataaacaatctcccagaacaccaacatcagacagcaccactctgtgaccctaatggagccagaagaaaaacaataccactccagaaaatgtctgaatattgttgatgaaaagagtcaaactccgtaaaatatttgaagacatttattctgaaccaaatatgagtaaccatggcctgtgacacaacccttaggaggacctgagaacatgtgcccaaggtggttggggtgcagcttggttttataccattttacggaggcatgagacatcaatcaaatacatttaagaaatacattggtttggtcagaaaggcgggacaatgccgagtgggggcttccaggctataagtaaatttaaacattttctggttgacaattggttgaatttgtataaagaccttggatcaacagaaaggcaggtctgggttaagataaagaattgtggagacccaagttatttacagaggaagcttttaggtagtaggcttcagaaacaataggttgtaaaaatgtttcttatcagacttaaagtctgtgttggtgttaatgttgagaggtgtaatgaggcatgtccaacccccgctgcccttcaaggcctgaaacagtctccaggtaaaattttaaaagagccttggctgaggaggaagtcctttcagatggttgggggaccttagaattttatttttggtttacagtatacatgagaaacatgaacattctccaaatctcaaaaataaccacacattccctgactatattttatggctctagctttgttttactctttaccaattatagctttagctttatttcattcttcttttcttatagattacatttattaagatacccaatcataaatttcccccactttctcactgcctttgatccagagcaaagccctgcttccttaaacatcccccacaaatcacctaacacaaaccccaatcatacaataagttctttttaacactgctttttttttctgagataccccaaggttctgtatcatgtatgttctctctcaatgcgttaagcaacaaacacaacttgttcatctacagatgtgttcctgtggtttagttggagtgcactgatactaaagtccatgatgtaggtcagggaatctgtttcatggcttaaaatagtgccaacatgacaaaaactcagaaatgtgtgtctctggcttgaacctctctgcctaacagtatatacaataatctatgccacatttccacttagatggttaatatagcaacttcttaaatgtttatgcacagaaaaatcatctggagatttttttaaaaggaaaaatctgtattctataagtctgggtgggtctgaaattctgcatttcctcactggctcgcagatgatgccagtgctgcaggtccatgaaccacactttgagaagcaagagtctaatgaactcgtcaaattcaacatgcccaaataccaacccctaagacttccagtttcagctccagcatgtaaagagcatggaagtcataatccttacaacaagagaaactggacaaagaaaatcaacagcttttcttaaacccatcagataatggagtttgtagggcaaatccccatatctgaagagacagacaatctagagtcacagaagaaatatgcttacctagagcagaagccactggcacaataaactggtaattttaacaattgctggaggctgagtttggactggataaaagtcagcttaattaaaaggctaacatccaaaatgtgtgtgtgtgtgtgtatgtgtgcatgtgtgcatgtttgaaaggccttcatgtttttggttttgtttgttggtttgtttttctctcctaagaccttgtcttttggagcaaaagtttattttttttctttttttttctcagttaactgaattctgttttcacctgatttttttttttttttttttactaaactagttattgcaacagaatctactctagggattttaaggaagagtgtagtttaattttatgtttaatttggctcaaagaaaaataaaagtgtctccttctagcactgccagatttttttctctttctattttataacgtaaattttgctatttgattttcacctgagttgtttcctttaatgtgaaaattttagactatttagctgacaactgcctagggctatgaaacaggttatcgagaaaccgaaagtctaagataggaaaaaaaaggagggagtctttgtaaatctataaaatgtactgtaaacaaccaatgggttcactttgccaagacagactgatttatcaagataggagaattgcaatggagaaagagtaattcacccagagccattgtgcgggagactggagttttattattactcaaatcgatctccctgagcctttggggatcagagtttttaaatataatttggcaggtaggggcttggaaagtagggagtgttgattggtcaagttggagatggtgagaggtgacagcgtgctggcagtcctcgcagccctcactcgctcttggcgcctcctctgcctgggttcccactttggcagcacttgaggagccattcagcccgccgctgcactgtggtagcccctttctgggctggccaaggccagagccggctccctcagcttgcagggaggtgtggagggagaggcgcgggtgggaaccctggctgtgcgtggtgcttgtgggccagcacgagtttccggtgggtgtgggctcggtgggccccacactgggagcagccggcaggccccaccggtcccgggcagtgaggggtcttaacacctgggccagcagctgctgcgctcaatttctcaccgggccttagctgccttccctcggggcagggctctggacctgcagcccgccatgcctgagctccccccacccccctgcgccccgtgggctcctgtgcggcccgagcctcccgacgagcgccaccccctgctccacagcacccagtcccatcgaccacccaagggctgaggagtgtgggcgcagggcacaggactggcaggcagctccacctgcggccctggtgcgggatccaccgggtgaagccagctgggctcctgagtctggtggggacttggagaacctttatgtctagctaggggattgtaaatacaccaatcagcactctgtatctagctcaaggtttgtaaacacaccaatcagcaccctgtgtctaactcagggtttgtgaatgcaccaatcgacactctgtatctagctactctggtggggacttggagaacctttatgtctagctcagggattgtaaactcaccaatcagcgccctgtcaaaacagaccactcggctctctgtaaaatggaccaatcagcaggatgtgggtggggccagataagaaaataaaagcaggctgcctgagccagcagtggcaacctgcttgggtccctttccacaccgcggaagctttgttcttttgctctttgcaataaatcttgctgctgctcactctttgggtccacactgcctttatgagctgtaacaccgcgaaggtccacagcttcactcctgagccagcgagaccacgaaccccaccagaaggaagaatctgtgaacacatccgaacatcagaaggaacaaactctagacatgccgcctttaagaactgcaacactcactgcgagtgtccgcggcttcattcttgaagtcagtgagacgaagaacccaccaattccagacacattttggcgacctagatgggacaatcgcctatcaccgagtggtgagaccatcgcctatagctgagcggcgagacaatcacctatcgccaagcagtgagtaccatcggacccctttcgcttgctattctgtcctgtctttgcttagagttcgggggctaaatactgggcacctgtcggccagttaaaagtgactagcgcggctgccggactaaagacaagggtgtcaggctttctgggaaagggctttctaacaactcccgactcttcggtgttgagaccattggtttgcctagaaccagcttttgcttttcctgtacttctgggctgagccgagggtcaacagagaggaaagccatgcacctccggggtcccgacaacaagttggttgaccctgcgaccatgagcggaactctcaaaggcatgtcgcccaagcgagactcgcccatctatcctatctatcctgagccttgccccctggttcctaatgcctgccagacaaacttcctctctcctctcttctctgagtttagtcccgcttctaaaaattgctacctgtctctggtgcttttctagtttctcctataagaatgatttctagtatagactccggacacactgcctttaagaactgtaacactcaccacgagggtccgcggcttcattcttgaagtcagtgagaccaagaaccca

SEQ ID NO: 9549 - DNA, 6000 bp, Homo sapiens
aatctttttcagaagtaactagattatgaaatttttcaattatcttaattatttaactataaatattttaaccagtgactcattaccttccagctgctgttaaattttttttagtgaagaaatctataccagatggagcatagttccaaagaatttctttagcagcaatatagtaatgtataacatgtgtcccagtaacaaaggcttctgttgaaggtttctggcaattacttactttgaaaaatgcctgcatactctctgaaaaacagatagagaatgttattaaaacattaagacaattttcttggtcaatacatattttcaattttagccaacaatattgagactttctatttctttgagaaatgtgatgtatgaaatcaatggaaaaatttaagatgtatgaaataagtacaaaagtcaggatgcaaaaatgaatattaaaggcatatatattattagagaataataaccagctttggaccaactctgaagtgaagatggtacctacatactgagaagaatttgagagtccaagaacatcttccctcatgaatatgaaattactactactagtcattaatgagttagttggtttattcaattaactagttggctggaagaaagaaactcaaggcatgagaagatcagtcctgtgttttaatttcagagcaccgttggtgggaatgtaaattaatatagactttatggaagacaatttggcaaaatttgttaaaattaaaagccctggcaggcagtgggtcacacgtgtaatctcagcacttttggaggccaaggcaggcggcctcacttgagcccagcagtttgagaccggcctgggcaacatgacaaaaccccatctctacaaaaaaaaaaaaaaaaaaatcagctgggtgtgatggtgtatgcctgtaacgccaactactccggaggctaaggtgggaagactgcttgagcccagaagatcgaggttgcagtgagccatgactgcaccactgaactccagcctgagcaacagagcatgactcaaaaaaaaaaacaaaaaaaaacctctctgccattatatagtttcacttcttgagagtcatgagaaatattttcacatacatgaagagacatataaaaaggtattaaataaggtcaggcacggtggctcatgactgtaatcccagcactctgggaggccgaggcgggcggatcacctgaggtcgggagttcaagaccagcctgaccaatatggagaaaccctgtctctactaaaaatacaaaattatctgggcatggtggtgcatgcctgtaatcccagctactcaggagactgaggcaggagaatcgcttgaacttgggaggcagagattgcggtgagctgagatcgcgccactgcactccagcctgggcaacaagagggaaactccatctcaaaaaaaaaaaaaaaaggtgttaactataacattgttaataaaccaaaaaggcagtagcaacttaaacatctgtttgtaggcaaaaggttaaataaattacagtacaaccaaaatatggaaaactatgcaacagttaaaaaaaaaaagttaaatgtatagagaatgcatggaaagagacttcaagactttgatatgagtgatgaaaacaacagaatattatatgcagtgtgatctacttacataaaacaaagcacaaaacatagctatgtatttttatttctacgtgttcatgtttatgttgtgtgaaagtgcatagcgaacaggttttcaaatacttgcacaaattgattacagtggctaagatggtggtggggtggaattggactgatggtgtgtccttaaagcagctctccaaaactaaacacaaactctgatttatgtgctaatttttttgtagtgtaagcacttcccattgcaaccaatttgaagctaccaataatttaactgctggattatttaactctcagctcttttgagctggaggctaatgtatactgcattagacttctttcactttttctgcctgctttcctccacctatttttctgcctcttttcctccttctcttcttccatttctcccactttttttcctcctttctttccttcctacctttctttccaacaaaggtctattcatatattcttgtaattacttaaaaaaaatggagtaaattaaagcgcagaaaatcttcagaaggacacagaaagaggagacacacaggagaaagtgatgggatcccatcagccaactaggctttgaggcgttttttcacttggtctagggctgacactagtctttctgcagggttgaggtagaaagactgtcttgagggtatgatctgagaataaggtagataggaggtattggtggagctgagtatattttaatctgaaaatgatcatcttttctaagtgacaactttttatcactaaattcagtccttgagttataatagccgtgagtggttttctttttctcacacaaaaaaataaagttaaattctgtaattctaatgaaaattatgtttttttctgattgaaaaataacacagaacatttacgtgatcatatatagagttttgtcatattcaagaataaaaaagataaacaacaacataactgaccattctgttattaaatggcaaatgtggagagggaaataaacaaaaataaggaggtttacttgagtaatcaattagaattattgggttctgcataatttcttgctctgcttcccataggattttgattcttgtttcctcagttaaagaaaaagctgtaataatatctgctctgtctgacactcagggttctcactcagggtttatattctcacaatgaatataaaagtttttgtaaaaacagcaacccaatcctatatacttaaaaggatttaaagctgtcagggacctgggctccatcactgactgtttccaaaaggaatcatatcaccttcttggatatcggtttcttcatttgtaaggtaaggcatttgtaatgggctatgaccttggaagttctctgactctgtatcacgcaaaagtaatagatcactaccatgtatctggcatcccagcatccacactccaggggccttggccaccatgaaggcatcttccagtgaggaggggaagagcataatggtgtcctttctgtgattccgagagatcagagtttgtccgcggaggtagacggggtgtatgtcagccacgccacccatgccaacaaaataccactggaccctatcttcagcacacatggtgagattgggcagatttccatagatgtatccatttattgctgaaaacaaatgtatattaatcaatcaggcatgatagatcagtgccacctggtaaaaattctgtgtatttcctcatcatattaatataaacctcacaatgtcaacattgttctcacacataatctataacatctgatttgtgtttcatgggaaaggagtccatatgcattgtgtatgatgagaagtgaggggaacacaaaggtttaaaggcaagaggagaaaaagttcctgaaaggcaggaagcagtgaaaaggggaaaaaaatagaaactaagttcatgagagaagaaaccaaggataagggtgacggattatgatgacatcatttctgaaaaattctatgttggataaaaacacatattcataaaatatttggtcaattatgtctttgttattccatattttattacttaaagttacgtctttcttaggtttttactgtctattttaaatcagtatgagacttcagaaaacaaatattgaccaaactttacttgctattggacttagggaatgagcaggctttactagtgatttgcatttgcatgtcaacccagtatactctgattgaaacgctgaaaaacataaactcaactaaataaacttgaacaaagggaaatgactgaatacgatcatagaagttagaattataagatattatgtatgagaaagttcttttaatcgtacattgcatgctcatgctctcctcaaaacggggatcactagtattaatcttgccagattcagtaaatgcacgaatattttcatcactataccagcttctgctttcatcagttgtagaaaacatcagaaaagaagacctgtcaatatctttttcagtgtctccattcagtgtccctgaaacaaaaaacacatttcttacttttcatgtagacattaattagaaccattgttacagatacaactacttttacgatctacagttttgttaattgttagggcacgtgaaaaaggtaaatgtttgcgatgtgggatgtcggtttttgtaaagtttacaacaaacttaaaaaagcatattacctatatgaagccatatttaaagaatccatactcatctttacatcaaatcagtaactttctgcagtgtctgcatctgatgaccattatcgcgtgagattgttcaaagtctaaaaatttgtgtttcctcaaacgaaggataactttagttcataccaatttatttattcttctatgcttatattcaacaaatatttattgaatatttgtaatgtgttaggtactatgacaagtgttgggtttataaaagtgaacaagacagttatctacccttgcagggcatacaatcaagggtggacgccatcaattaataagatactatagtgtgtaaagttctatagtagggaagagttcagtgtttgggagctggttaatttaattttgggtatggaaatcttttctgaaggcagtgacacctcagttgatatttaaaggatgaggagtttgctggggtgtacctgtagagaagattccaggcagcaattaagataaaaggaatttggactttatcgtcagaacaatcagcagtccttgaaggattttaagcaaaggagtgacagactcagaatcatcctcccaccttcaccccccagacagaaagccaagtggagatgaattgaaaggggaagcactagagactggtggggcagctaagaggctgttgtgggtatcctagcaaaaagatggcagtggcctgaactaggttagagttcgtggagctgaagagaagtgagctgaccttgtgatgtgtacgaagtagagctggcgggacttgactgatgtatttagcaagtgatgagggagagggcagtatcaagaatgttacccaaggttttgtctccagtgactaattggagcatactggggccattccccaaggcagggaacacagaaggaagggagagattcagggcaggaacaaatgacgggttttggaatatgacgtatttaggtacggatgaaacacccaagtagagacgccaagttgccaggcctgactatcagtaaaggagtttgaaccaaagttacagatttcagactcattaacccacagatggaaacaaatgactcaaaatggataagatccctctgtgcgcttagattgaacaaaagagaaaagtgcttaggacagtgggaataaaatagttataatatttaaaaagtatataaaaatataatattctataaaattattatcagtcccaaatattttataacagccttatatttaaaaccatagggcataaatcaacataactgtaagtgagaaagtctttttctttttctttcttttttttgtagagacacagtttcactatgttgcccaggctggtctcaaactcctggccttaagtgatcctcccaacctggcctcccaaagtgctgggattacaggcatgagccactgtacccaaccaaggaaggcttgatggcagttcacatacttgcctttgagaatgcaaagcattaagttatcttactgtttaaaaagaaaagggagaaagtttggaaatgttcagactagatagctaatgtttaagttaaatataataaacacatattctttatcttgccattatgcagttgagttccttgcaattttgagaagggcaaaaagctcttccaaagttggtttaaaaagttatctcccggctgggcacggtggctcacacctttaa

SEQ ID NO: 9550 - DNA, 6000 bp, Homo sapiens
atttattgcaattcccttgaggagggtaccactattatccctaaaacatcttctaaaaggaggcttttggctgagcgtggtggactcagaactacatgcattgcattgttgacagttgtttatatattggtgttttgcactctgaactccatgagatcagggacaagttctgtttttgtttttatttcctcatcttttgaatatttatctgtatgcctagcctatagaaataaagaacaatgaagtaattttccttgtgtctttgtcccgttgaggctgttctggtactcttgaaaacactattccaatgattttacttttccttataggatcagatgatagaaaacctttaaatattagctataaccaagaagaggcaatgaagatacatataattgccaaagaaccctctgctaaaagttaagaatggtttcacgtggccaggtgcggtggctcacacctgtaatcccagcactttgggaggctgaggtgggcagatcacctgatgttgtcaggagtttgagaccagcctgaccaacatggagaaaccccgtctctactaaaaaatacaaaattagccaggcatggtggtacgtgcctgtaatcctagctacttgggaggttgaggcaggaggattgcttgaaccagggaggcagaggttgcagtgagccgagattgcaccattgcactccagcctggacagcaagagtgaaactccgcctcaaaaaaaaaaaaaaaagaatggtttcacacttttcaaaataccaaagaagctgctctctgtctttataaactataccttggcctatagagaattgttcttgggaagaccgttcactcctcaggatggggatcttgccaaggggtttttaggattatctactgctccagatactcaggaagtattctgaatttaggatacagctaaaactcattaactttaggtactaccacttcattgctactgatgaatttaggtttacatttacctttgtttagcaaatgtttccctgtgccatatttcaaattaattttttttttttgaaacggagtctggacctgtgccccaggctggggtgcaatggcgtgatcttggctcactgcaaccttggcctccggggttcaaacaattctcctgtctcagcctcctgagtagctgtgactataggtgcctgccaccatgcccagctaatttttgtatttttagtagatatagggtttcaccgtgttggccaggctggtctcaaactcctgacctcaggtgatccacttgccttggcctcccaaagtgttgggattacaagcatgagccactgcacctggccccagatgaatatttaaaatattcaagaatacaatttacctttcagcaccttggaacactttatagccatctctggttgcacaaaagcaattttaacacattatcttcttgaatgaactttggctgaggttgaattaagtgggcaactgagtgataaatttaataattcagatctttgctacattcctcttctagcagttgggatgaaatgaggagtggaaaaagtgcatggcaacaaagacgtcactaaaaaaatatttgtggattaaataaaccaataattttttcttcttgcaagatagatgaacagaaattcattgtttagcaaggtctgccaagcatacatttttaagaccttcttgaagctgactatttaacactttcaactctggcaccatgattcttgactcctactttgttcttgttactatggccacatgctcagctgtcacctaagatgctcttagatcttaagaagagcagatgtatgccccacctgtacatttactcatttaacacatgtgctgagagtttacaggggccaaacactcacgtaggcatagggatatctgagaaaaaaccaaaaaccaaaaaccaaatttgctgtacacatgaagcttacatggagctcacatttgtgcgtgtgtgtgtgtgtgtgtgtgtgtagacaataagcataataaatcataaaatatatagaatgttatagccagatgcggtggctcacacctgtaatctcagcactttgggaggccgaggcaggtggatcactggaggtcaggagttctagaccagcctggccaacatggtgaaaccccatctctactaaaaatacaaaaaattagctaggtgtggtggcgggcgcctgtaatcccagctactctggaggctgaggcaggagaattgcttgaacctggaggatggaggttgcagtgagccgagattgtgccactgtactccagcctgggcaacagagtgagactccatctcaaaaataaataaataaaaaagaatggtgccaatagtaagagcagttccactcaccagaactcaaaaccagtatttctatgggcttcagcttcctcatctgtaaaatggagctataacatattttgtagtattgtttttttgtttgtttgtttttgctgctccagtcaacgaaagagacacactttattgaggctccagggaggctgccgttcgaggaaggaagagccttgaccttcttgggttacaggttgttggtgtggtcacacctcttgcagcagttgacagcacgggggtgcaggcaagcatagcacttgcggcagatcatcttgtcacagttgtatttctgggagagctggcagagggaaggctcaataatgccaccttacaggcgcagcaccaggtgcagggtggactctttccagatgttgcagtctgagagagttcggccatcctccagctgtttgccagcaagtatcagatgctgctggtcaggtgggatacctccttgtcttgaattttggctttgacattctcaatggtgtcacttggcttgacgtcaagagtgatggtcttgcccgtgagggtcttcacaaagatctgcgtctctgcgtctgcagctcagttgccttgccgaagaaaaagatgacggcagatattttgcagtattgagaggattagaaatgaaatatgtttgccaaatgtcacagtctctaattgtaggcctctttacatagtagctattaatagaggcacatctgctcttgtacaagtaagtgaacaatgtgtgctggactggaagtaactctctgggaaatttaggacaaaaggggactagggcccaaagaaggaatgagtcatccagcatacctagctacctattgctgacaaaaagctttactaatacccagttggagatgaataggatgtgagctctggatccgctgatgtatttatatatccttccattgcatggcttcagttcttcccaactaaacctctccttatctttttttattttattttttatttttttgagacagggtctagctctgtcacccaggctggagtgcagtggcgtgatctcagctcactgcaacctctgcctcctgggttcaagcgattctcctgcctcagcctcctgagtagctgggattacaggtgcctgccaccatgcctggctaatttttgtatttttagtagacacggggtttcgtcatgttggtcaggctggtctcgaactcctgatctcaggtgatccgcccgcctcggcctcccaaactgctgtaattacaggcgtaagccaccgcgcccggccaaatttctcatctttatgaaacactcaagagaaacctgttaacaataatgaaaattatcagcatgctatgtgccaggcacttttatgaatataaatccccttaatccttcaatgagcctgcatggcaggtattacaatcatcccgttacagaagggatatttgagagacggcctacagggtggactcaataatgtggcagctggccgggtgtggtggctcatgcctgtaatcccagcactttgggaggctgaggctggtggatcaccttagctcaggagttcgagaccagcctaaccaacatggtgaaaccccgtctctactaaaaatacaaaaagttgccgggcgtggtggcgcgcgtctgtagtcccagctactcaggaggctgaggcaggagaatagcttgaacccaggcagcggaggttgcagtgagccgagatcatgccattgcactccaacctgggctggtgcaagactctgtctcaaaaaaaaaaaaaaaaaaaaaaaaagtggcagctgtcgtggtgctcagtgggcgagcaagcacaggaggacacctggtcaagtgtaccccatctttcacggtccctgagttggggttcgtgcctactggattgacagaaaagaaacttccaggagtcgtgaagactcgttagttgcttcggagggttatcctgggcgtccttgacagaggtggcgtcctccttccctgcagcctctaaagaatgtagttaggagccaagggaggtggtgaccccccaccccattgagaacgtcaggggagcttccgacttgaaaaactagttagacgctcagcttcggtcaattaagcttatacaaagaggggcggtgcgtcctgaggaggtggcacgggggaggcgagcggaagtccgccagccgccgattggctgggacaaatgtccgtcccgcctccctcccgccccatctcccggtggcctagcggcgcggcccgcgggcgcgctgaggaggctggcggtgccagactggcagggggcgtgacccgaggaggcggggcgggggggcgtgtcttgcctggccccggcgccgggctcgtcacggtttgcggctccgcccccgaacccctcctcctacgcggctctcctccttcccgctcggtccgccggttcgctcagttctagcttcaggttccacgccgcggcctcgctctcctactaaagccagcccagcagtcgcagcgcgcacacgcacgccccgcgtctcccgcgcccggcgcccggctctccccacgcgcgcacacctcgcgcacggacgcacccacgtttgtcctcgcgcgccgggggctcggcggcggcggcaggggcagcggcagaagcaggcagaccgcgcggggcagtaccgtagcggccgtcacgggctggccggccggccatggaggctgatggggccggcgagcagatgagaccgctactcacccgggtaacgagcagggtgagggcgccgcggcggtggggctcctccgcagggggagggcgcggggcgaggcagacaaaggcggggggcgcggcgggcgtcgcggctcggccacctcgtcccaggcccgtcgcccctccacctcccggcggccggcgcgcctcgccatcccctttgtgtggcggcctggggcgcgggtgggagggggccagcggctgcgctcgggaggcccgagtcggggcggccggcggcgcgccgcgggcatcctctgcgcggctcaggcgggaccccgacatccccgcagaggccgcctgtgaccccgaccatccatcccttccctcagcgctcgcctcccctgtttcttagcgcgctccccaggcggggtcccggttccggttgccttggcgcaggagtttcagattagccctcgaaaacctatctttcttctccttctaaggaggacggcggctccacctgtctctagccccaggcagtggtgaagagctggttgaatctttccccctctttccgagtgtcccctcccgctccgcggtgcgctttgttcggtgagttctccggccgcgtggactggccgcgctccttcccggccaaggctctttcgctgttgcctgccgggtccgccttctccactggctgggacccggggagtatcctcctgccgcaggccaagtagaaggaggagggtgtcctgagctgtctggtgctccttctctaactcagctagcaagatcgcgtttcctactgagactggctttgatttcagggttagaagagaatggggatggacttaaggccggtgttcccatttgtgatgatgggtgaacggcccatgctcaagaagcggacttcctgctttctttagagcacatgcgtccccgcagttgtctctttctcctttc

SEQ ID NO: 9551 - DNA, 6000 bp, Homo sapiens
gtttaactgtttcccggaattctgtgagctgctctaggaaattaagcccgaggaaagaaccttgatttataggcagttggtcagaagcacaggttaaataacctggagcttgtgattggcatcagaagtgcagggcagtcttggggactaagtcctcaacttgtgatattctgacactgtctacctggagatagtgtcagaattgaattgaattagagaacacccagctagtgtctcctgcaaaattgcttccttgcttgcttggtgtgtagggaaaaaaaaagcccccacatctggtcacagaagtcttctgtgttgattgttgagataatgggaaaagcactttggtttcgtttttattccaatattctcaatgccttaataattttctgcttaaataattccagcaacattattactctgtcactgttaaacctgtaggagctcagagagtttggaatgctacttttgaaataaaaacataaagtggattagataatgagctatattctttcttaacaccacctagttttgaaattaataacctgttaaggagtctgccatgtgtctagaaacaatagacttcaccggatcctttttttctaaatcacttgctgtttttcccaaggcttcctccaaaggattcaaagctatctcttccttcctccaagctaaataaaaatgtaggaccgggacagtcctgtcctatcagcctatgtctcttgaaatgtacatgtcccaagttcaagaaaaaacaaccaatggcaaccataaaccaactagaatgtctctgtgccccattttcaaatcccaagagaatgtgatggccagtgttgagccaggggtccacctctggtccaattagctcagccagagcagtgacactatggatgagaaacattgtcattaatagccacagggttattttggaggtaactcagattcacagatggcagcttaaaagaaaagcgtatttgtgattccaaattcaaaccaaagcccaccccctaccttctttctcttctatgctccattgctatcattagctaattatagccacagagcctacccctctgaatccttgcctggagaaagcttgtttctctttaaatggagctcagccaacagttgcttgttctcatgtaaatttcatacaaacaggccctgaaacttaaaaggatatctttaaaccccattaaataacacagttccttagcaggaatttctcttgggaagggatgtcttctattcaaatgctatgttatgacaagcatgacagacttgatggggatctgttctgactcatgacattgcataaattgggttaggtggaatgtgtgcctgcattctaagaaaagctcctcggggcctcagccctattatttttgttaatagctctgaattatgactatctcctcctaggaatgatacaccccatttccacattgggtgcgtcatggaatctatgtaatacatgattccttaccggcaaagccaagtggcctgcacacattaaaaactaatttacagttgtacttcttcctctccttctcttcttcccctaggccagagttggcctgcctcaccaccagaacttcagtttctcccaaatgtgatgaggtccctgctgtttctaatttaacttttaccaaagggaggaactctagaatggattctgatccacactgtattcctcaaactcgattcacaggcaacatttctttaggggcaaaggtttaacttgtgcatgttttcatcattattggttattatcagaagtaaaaaattggctctttgagaccattttgtgcatactacaaattcttagctataaggcaaatccagctccttgtgttatattcaaggaaatctgaaacaggacatagtttgttggaagttttacaatccactcaaacagacttaaggaaataagaatttgttgacttttatgaatgaaaattccagctcctccctcccatctgcccccatgcaaagttagacctaaagatttgaacatcactgggacagagtttctctccaccacttagttctgttttccttagtgttggcttcactctcaggcagcttcctgtagccagtaaagatgcctggcagctacaggatcacattttccaaacattaagccaggagaaaggaagatcttcttctccagtaaatccaataaaatcccataatttctacaggcttagtttcagtcactggggtgaaaagaccaaggcactctgattggccaaacctagctcataggtctgtcattagagccggaaagtgagatcaacctacctgaactacagtgcgcgatgcaagagataaggtcttctccaaaggaaaagcaagatgctgtcataaaaataaagggcagcatgaacagcaaagcccatttgcaatatgtgttggtctgcttaagctgccataacaaaatactacagactggtggcttaagcgacggaaatttactttcccacagtttgaggcaagaagatcaaggtgacagggggcttggtttctagggaggtctctgttcctggtttgcagatggctcccttctcattgtgtcctcatatggcctctttcctgtgtgcacacactcttgaggtctcttcctctttcttataaggaaaacagtcctatcagctaggaccccacccttatgacctcatttaactttaattacctccttcaaggccccatcttcaaatacagtcctattacaggttatggcttcaacttatgcaccttaggggacaaaattaagttcataaatagaatgaataagtgatataacaattaaggtcataaaattaaatagaataaataagtgatataatccagataataattaaaagcagggctgaggctggaagtcgcatcataactcctaaaacaatgttctctttgccttattaccttttgatctccctctgtaaatctttgacaagcttcttgtttggagctagggatcagaagctgtccaggacagaaaatgagcctagtccaaagttctcaacttcaccactattggcatttagggccagacaaatctttattcttgggagatgtgccatgcattgtaggttgtttggcagcatcctacccaccagatgccggcagcacaccctttccacccccactctccccaagtgtgaacaatcaaaaatgtctccagacattgccaaatgtcacctggggagtaaaatagccctagtttcaaaaccattggcctagttatttgagcgtcttatctattattgttttactacaaaatagcctttcagtattctgtcgctcggattgctactacaaggaatccttgtgcataagaataaattagattctcagggcccaattccagagactataattaagtagtcatatgtgaagccaaaaaatatgcatttttgtaagtcttttgaaaccaagcttcaaaaagtactactggtcattttatcactagttccttcattcaagacgtgatttactgagtgtgtactatgccaagagtagtcctcaaagctggtacacaaaatcacatctttcaaagagctttcatactggaggagaagacagacaagaaacataataaataagtaacaaataagtgacaaagctaattggaagaagggattgccaagagcaggaataaagtaaatttgtaaatagagtagacggagttaacctcaatgatggagtcacatatgagcagatacatggaggatttgaggaagtgtgccatgcatgttaactgggggaagagcatgtcagagagaaaatagcccatgaaaaggccctgaggtggatgtccgcctaacttattcaaggagtagcaagaagatgacatgactgagtgaggtagagtgagcaagaggaagaggaagatgagttgagagctgagaggtaatgagggccacatcatgcaaaatattatctaaaattatcaggacttcatacaatgaggagccaggaaagagttttgagcagaggcacgacatgatttaactgatgtctggttgctgtatttagaatactcaatgggaggaaatgagaaaaaagagaccagttaggtgattattagaattggcaacaaggaattcgttggtgacattgctggaagtagtttcagtggagtctggaggaacacctgaaaaaacttgttgaataagttcggggagaatgtggagaccattagcatagatcattcttagaggaggtttgtaaaagcagagcagataaaggaagctttagctggagggagcaatggaatcaaggaagattgtttaaaggtggcagagagtgcaacgtgttctacacagctgggaacaatctagtagaggagccagaattgatgaagtaggggaaagaaagcagggaattaactgcaggagcagtgtttttgagcagagaggttgggcttttgtacgtaagggaaagtgttgcctttggggagaaatgtggctggttcccctatggtgacaagaaggaagacacagcatatagacacacctgctgaaaggtaagtggttgtggagatgggagtttgtggaagttctcttgttattgctttaattgtctctgaaggaaacagcaaagtcatcaaagaatgatgagcagaaggagatgttagcattttgagaagggaggaggtgtcaggaagcatgtgggagactgaaccgatgtgttaataatgccaagcagcacggctgaacaccagaaggtgggtcagaggataggaaaatgatgtgatcaaagcatttctgcagtgtgtgtgttgggagactaccagcagaatgaagttgccagcactggaagttgttttaaggaatgtgtttaggacagacagacaggaaggatgctaaatcactgagtcttggtcagcctaagagaatagtggggaggacaaacgtaggctgggagaattgagaggcactcgagaaaaatgtttgacccgagtttgatatggctcttgggctagagcccaagcattgttcgttacatggtccatcatagtcctctggtaaataggtcttttacttctcactctcaccccacaaaggttttcttgggggaagactgcgagaaggtctttgatagccattgaacctctttgaagaacagctaccataaattaccaaatggtggtctagcgttcataccagcagagttgggaaaacgtgtcctttaaagttgagataggctgggcccagtggctcacacctgtaatcccagcactttgggaggctgaggcaggcagatcacttgagctcaggagtttgagaccaacccaacatggcaaaaccctgtctctaccaaaaatataagaaattagccaggtatggtagtgcgtgcctgtggtcctggctactgaggaggttgaggtgggaggatcgcttgagcctgggaggcagaggttgcagtgagccaaaatcacaccactgcactccagccggggtgacagagtatctcaaaaaaataaagtggggatgcttgtaatatagtgactaatatatgttgaataacacagaagtgaatatttccttcagcaaataaaatcagatggaaatgcatttttccaaaactataattttcagaagagcactgagccatccgctcctcaccatccttgcataaatgaaggcccaacaggatcaattaagctcatttgttgacacagcctattaaaatacctccaggcctctaggaaaaaaaaatgagcccagaatgcactgtgcacaaagcaaaaactgatggaggaaaatcgattagcaaatgaaactgaatctgagaggcaagactagaggttgaaaggacttaatttgaaaattgtatataattttagcataaaattatgctaaaaagagggctgccattctgtgtgttcacttatgtgctttttaaaaagtacttttcttagttcacaccttataatgcatatgtctaaataagtattgtttccttcaaaatagttgtctttgaagtttggcc

SEQ ID NO: 9552 - DNA, 6000 bp, Homo sapiens
aacctaacgaagatttttaaagagaaggatgatgttattcaagtgatgttgccagaaggatggatgtagtagtgtatccagaattggttccttccggtgggttcttggtctcactgacctcaagagtgaagctgtggaccctcgcggtgagtgatacaggtcttaaagatggtgtgtccggagtttgttccttcagatgttcagatgtgtccagagtttctccgttctggtgggttcatggtcttgctgacatcaggagtgaagccacagaccttcacagtgagtgttacagctcttaaaggtggtccagccggagttgttcattgctcccagtgggttcatggtcttgctgacttcacgagtgacaccgcagaccttcacattgaatgttacagctcataaaggtagtgcagacccaaagagaaaccagcagcaagatttactgtgaagagcgaaagaacacagcttccacagcgcagaatgggaccccagtgggttgccactgctggctctggtggccagcttttattcccttatttggccccacccacatcctgctgattggtccattttacagagtgctgattggtccattttgacagagtgctgattggtgcatttacaaacctttagctagacacagagcgctgattggtgcatttacaatcctttaggtagacagaaatgttctccaagtcccctacccaattagctagacacagagccctgattggtacatttacaaacctttagctagacagaaaagttctccaagtccccaccccacccagaagcccagctggcttcatgtctcagtagtgtcattgagaataaaagaaaggaattgcaggcaaaggcatatttatgttaatttaaaatagtaaaatagtgtgcatgtggatcgtttctagtctcaggacagaagctgaagtttgtgcccatggactatgcatcaaaatctgtgctcctgaagaaaggcaccaaaatactagagaagaatgttctgcaaaggcattgctggtctttctatgtctaccttgatatttataagtctcctgaggagattctactttctctgtggaatgatattacataatcatttaggagtttgacttcaaggcccgcacaatctatctattgcattatacatgacacaagatccgggcacagaacaatgtgttaagatgatgactctaccactgtgctcacatttgcctccagggaaaagaagggcactcttgtctccaaaatatgtaactccttttcatctcagccgttgtggctgcactttatttccttgtcatgttaagctgaagaaataagagcaaagcaaagggaatgagcaaagatatcacagctttgcttgtagtggttcgtctcaggaggtgagagaaatggtgaaaattattggggaaaaagcaagactgacaaggtagtgagagacacgtgagtgtctcccacagaggccaaacaggaacacacccaaggctaggggaagttgggaaataagaaaaataaaaacagaagataaaacatgagggatagcaaccttaaaagacacacatacacacagatggctattgggtggttcccagccatcctagtgaaaaagtgtatcaaataattaagttggcagatggagtagaagaacaacccagagccagcttgggcagggcctctgactgtttctaagataaagcatcctggaaccttgggagaaaagacacggcacctttttggtttgtttgttttttgtttgttttgttgttttgttttgttttgttgttttgttttgttaaggaggccttagattattcaactcttttttcccgttctctctcttgtaatgtgctctactacttgggaaataagaattttactgtgaacagaggtaaaatttttattacaattttagagaatgacatggctgagatctatggaatgtttagagcacgaaatgaactttaaacacttggattgtttattctatcttttctgttcctatttacttacttatatacatgtatccccttagctgtcatgcttttcactgcctggcaaactcctattcatttttctacacttaacaattaatttaattctcatgtaaaccttcactttccctctcaagttaagctacacctgactttgtcattccatgttattccattccatgtatatgccttcattcgcagtgattacaaggtgtttaatattttaaggtttatctttccctctaagtagacctgagggccagagctatctgattcatctttgttttccccatgcaaataatgcaatccttggtacatgaggagggaataatatatttaggggcagacgataggtactaataaaataaacaaatgagcaaatgagttggctgacctcttcccttctcttcctgagactatgggtgtaattagtgctttctagggcactgtgaggacctgccactcccgtgccctatccttgtgactggccccgtgggaatttgcctggcttttgctggataggtcaccctccttttggctggagaatgatcaggcctgggtgttggaagtcagatacaccactgagtcacagtacctcaaggcactgtggttccactccatgtgtgaaaggtctctctgcagcattcttgcaagatgagttttctaattagctttcccttataaggtgccagaggggatggttggtcagcattagagcctacagatgggaaaacaatggccaagagactttgcctaaggctactgggtgggccgaagccttccagttaacatctggtgagaatttaatgactcagtgctctattctccacccaaggttctctcacctgccagttcctttcattctgctgggccttgacctcaagagcacgaaattgagtgtgatgtgattctacgactgtgctactggctacatttcgcattggtgacaggaaagcacgggctgaggtgactttgtctttaaatggctagaagagggcagactgcatctctgagtatccttgaacctaacacctttgtttagggttgctctccagaaaaagcttgagagaaagcctaacagtttgcagagtggtcaagagattgaataataactgagtagcaataatactcagatgggttatgtcttttgactatttaaaggacttttgtataccactgtatgcagccttatgaaataaattgtgtatacacacacacagacacacacacacacatacatatatctaggataaaattaataaatggttcagtgttaaagattggaaaatatgggaagaaaaacaaaaaaattgacatttaatgccatcatctagatataactagtattaatatttttgtgtttctcttttctatttttattagataacatagttcctaatatagtaaaaaagtgacaattaaaatgtttatttatggaggaggatctgagatagcaagacggctggaagagtagttcaggaatggagagagaatcaggagttctgatgacttcatgtgtgatcttgagtagatcttaaaatttctcttagtccttaatttttgcccctacagaagggcaggaaatttgaaggcaatgtcaatagaagctcaatgccctaagttgaaggttaaaccttaaataccaagaattaatgtgataagaagttagtctacatgcagtagacaaagacaccaaaatacaccctttaacttcagagctactgccaggatttctatgtatcaagggactgtcttacaaattaatatatattttttttttgagatggagtttcgctcttgttgcccaggctggagtgcaatggcacaatctcggctcaccacaacttctgtctcccaggttcaagtgattctcctgcctcagcctccaagtagctgggattataggcatgcaccaccacctccggctaattttttatttttagtagagacggggtttctccatgtttgtcaggttggtctcgaactcccaacctcaggtgatccacccacctcagcctcccaaagtgctaggattacaggcatgagccactgtgcccagccgcaggaattaattatttacctgatccccatccttttttttatgcccatattttcaggttgccaaggtctaagaaaggaaagggatgaggtagcttaaatgactgtaagatgagcagctcttctatcatttaaatccacaaaactaggcaacaagggaatcatcacatcaaccatcctacactagtagttagctgtagtataaaaggtagttggcccggcgtggtggctcacacctgtaatcccagcattttgggaggccaaggcaggtggatcacctgaggtcaggagttcaagaccagcctggccaatatcatgaaaccctgtctctactaaaaatacaaaaattagctgggcatggtggtgtatgcctgtaattccagctacttgggaggtggagacaagagaattgcttgaacccgggaggcggaagttgcagtgagctaagatcacacctctgcactccagcctgtgcaacagagtaagactctgtctcaaaaaaaaaaaaaaaaaaaaaaaaaagaggtagttttctgcgttcaaattatctcccatttaatgatttgaacacacctgttctgtgggcctcataccctctcctctgatgcccagacatcacaacaagagaactctacctaaaacaggcaaagattggaggagatgaaaaaatgtccaccctgagtcaaaggaatggctccacctttagggcatacctctccagactgggaaagctagttggagaagaacaagaataaaggatatctgggttttcatttttgccttgctggcctgtggtttcttgagattttcttaccataaattgcccgctatttaggagagaattttgtttctgtgggttcaaagagaccaggtaggctgtggaagaaaaaggcaagggctagtggcattcacttactcctgggctctgagctctgggctctctctgggagagagaggacccttctatatacttcttagtgtgtaacccagtctaaggtagaaacgaagaagctctcagggcaaatgttctatccaggacattggctggagcattccttgtcttgtatcatattgtggattggcagcaaaaggcagagaacaacttaggtatataatttgcagaaatatccaaacattgttgtctgaacaaaactctgttgagtaaatggtgatggtgatgatgggatgatcataattactattattgatgtgttctgtatgccgctttacatgcattattctttctacaacccagtaaaaataggtattatttcttccattgcacagaggaggaagatgatgttcagaacacaaacaactcacccaaaatcccacagctagttattaaccaggacagtattgaggtttccatagcctgtgaaatgtctttcactatttgctgttcctagttttgtgttagagtcttgggtttggtctattacagagaatgcagaatgcaaattctggagactcccccacctaacatgtctgggctactgatccgagaaaccctcacaggtagatctaacttaactgggtacagctagatggcattttgtagcaaaggctgtgagcctaaaggctggggatggggagcgattcagccttcatgaattgcaaataatttttcaaggtatcttcttagggaagaaagagagttggggtctcaggatggtggggagaaggagctgtggtggggcccagtgtagaaagaggaggcctatagctattttctccctctgttagggcagatctcagctcacttattttccttcagcctcaaacaagttgttttgtttttttttaatttaggaaagagaaagattatctttaaacaaaagtggcaccaatatcctgccatcctgattaaaagcaggatgaagataaaatgatttctctatccctcatggcctacaaagccaacgcctcccagggaaatggccttctc

SEQ ID NO: 9553 - DNA, 6000 bp, Homo sapiens
ggtatttgccattgcaaaggtaacgctttctgggacagagctagatcaagaaatgtctgggtgaatttgtgcctggagagcacatgggaccctggagagaagggagtgacggcctcaccatgccaactagtcagagtagggcaggtatgtctgggaaatgacctgtctacaggtgacggggaagaaggcgagccaggcaggtgagacggtgtggagaggatgggggctggtgagccagtgtgtgtcccagcaggtgagtggaagaacacagccacttgtgagaagctgaggggcagagacccaggcaggtaggtgggagacatttggcaccaactgcatgtggaggtgcagaggaagtttccaggtttgggggcagggatggcaaagaacagaagagagagacactcagtagggggttgggtctaagaaggaggcttcattcagtttagcagccaaagggaagtgcaaggtcagaaagctctgtcatgcatcccccagaatcagcagtgatctgggggtgggtgtgctgtgaagcccccccgaggctgccctcagtgctattgagatgccccagcccctggcttccccaagcagctccctcgtgctcagcaggatggcacaaacatcactcactctccttgtcagcggttgtcacagcacatttgtggcagcagcgttcatccacgcttcaggaagtcggtgaggctgggtgcttcaggggatggccagatttagcgatgcctcatatcctcggatgacatcaggggactcactccctgaccaaagcagtggaaaatgggactggaaaacaaaaaagaaggaagaataaatctattcaaatgctacctccttgattgcatggggccttttaaatgtgtcctgagcagggacagagagagaggcctcagttctcatccttagttctgtcatgaagtagctgtgtgttgcagaaaatatcagtctgggcttcagtctcttcacctgtaaaatgaagataattacagctgcctggacaaatggggcaaaaacgaggctcagatggagagcacagactcataggcaggggtgacaagtgcaggttctcttgggtgtcgactctgcctggtggtggctgcctgatccctgcattgagaagaacgctgaagctgaggccaagctgagccagagagagtgctaggatcgattagctatgcctgcctcaggtgccagattggagggcgctcctgctatgctatgtttgccatttctgtcctaaatggtttttaggtatcattattatcatttcttctttacccaaagccaaaagcaccctgagaagaggccaatgggcaggtctgcacccaggaggctttggtgctaatcccacagccctcttcttcctttttcttggttttgtttattttttttttcctttttcttcctttttatttacttatttattttttttctgggtagcacaaccaggtgaaggagactcaggtgagacttcaggatgaggatcaacaatgtcaaactctgaaagacagaaggaactggaagccaatgtcaagttggcagaagtcagaggcagcagaaagaaagcagacagctgagcccagaggcagagggaaggcgcctttcagtgggcagaggtcagacacacctgagggctgggggtggaagtgagcatgaggaaactcggcaagggaagcaaacccttcctctgcgcacctgcaaagagccccagctctgctgttggcgcagccctctccagctgcacggctcaggggagctactgctctcagagcttcagtttcctcacctgcaaaacagaggttgttgtgaaggctaaatggcactacgtcatagcagtgtctcatggcacccccctcccaccagcctttgggtcccaaggtcgttcttgcaggcccagcccattggctccatctgggagacccagggccagagaagcagagtgggcccgtgaaagacaggaagggtggtccgggccatcagacattgacagcctctcttgtgcctgctcccaggctctgacccattcatcatatccctgattctaagttgcctgggatttagacctgtttctgctccaggatgtccagtccctctagaagcagcttggagtggtctgggagcgggggacactcgtggctgctcctttgtagcagttctagaacttgcaagcatgggacaaagatgatcatgatcatttcgctcatccctcggggctctagccccttcccggagagtgctgtcaggctcagggccctgcattccagtcccgacgggccacttcctggctcagagacctccagcaccactctgggcctcagtttccttatctgtcagctccctcccagctgggtggtcataggtctaaataagatcacgtgaatatatgaaagttctctgtaaactgcaaagtattagctgtacgttaacctctgtcctctctgaaattcacaactcacagaattactgggggtcttttctaacaggacagtgacaggggagcagatggccccggttctctgagtcacactgcacggtcgtcccacccccacaactgcctcattttcagctgcgtcctcttccctccactccagttcagagagcctttcagttaccctaatcacactacacattacttgcaggcctcggagcctgtgctcaagccattccttctgccgggaatgacctttgcctccctgcttggcaaacttctatgcatccttcaagactcaatgccgatgacagttcctgcctgataccttcccaaggcaaagggtgtgcctccctcaatgggctccccagcctctattttcgaaccagaggagtgagaacaaaccgagttggcatgacggacgcacccctgccccgcacacagtaggtgcttagctgatgtgtggatttgaacctgttgccttcccctcactcacccaggactggtcttgacattcagagctcaactcacatccggggctgtgtccaagccctctattctgtttggctcagatggccccacgctccctggggcagagccgtcccgaggcagcctctgccttcatgatgctgtgtctctatgtgttggggtgtgtggcagtggaggggctgtggtcacagaggagccaaccaggagagctgaaggccgcccgtagccatggagacagggcccccgggccagccaggcccgggctggtcagtgaatgaataaacgtggcccatttttctgcttttgtccggagcctccctggggcttcctgctgtcagccccagctgtggggaaggcggaatttgcctgatatcgcggagccgccgcctggcagcgccgagcctggcctgggccgcttcacgccaagattcatgcccggctaacaagccccactttgttcctgtgggaaagtccagcctctcaggaaagagccctctctccggccggcccctggtctggggactcagcgaggcaaacaaagcctccatccgctggcaaggattctcaggccccgaagtccacctccgttccccggccaggggaggagctgctctgggaggcggaactcaagcgcatccctttgtcccactcatcccggaggcctgagatgccacctgtctggcaggtctcccccactgcccctgcctcgcctctggctacaaagtgtgggctctgtcagagcagctggcctgggctggggcacccaaggccttggggagctcggcctggcccctgctccctggagttgaggcccaatgtacctgcagatacgccccagggactgggtggagtcctgatggcactgctgtccagacggtgaccttggcctcatcacagcacctcagcaggctcaggacaaggacactaagcccggctgccccctcgagtgttggagttatcttctctaaccacaatgacaaggagtggccttatttagcactgggcctgtgctgggctctccaccgagggcattgcatgggtgaaccattggagaggttctcccatttgtgagctcggctcagacgtctataggggaggacagaaaggtcacaggaaggacggatgctgctctggggttggagcagaaggcactccgccccacctagcaaatccccagcaacgcagctttggcagctgttatcctgtagaaacgtgggtccagccctgtctgatcttctgattgtctttcaagggagttgaacatttctattttgatgtgaaatttcccaatttgtaaaaatgtaaaacgaagcaatatatcgtggctgaaagccctcagagtccaagttttgttatctgtaagggaggtgtcagaaacaggtggcctagggactagatgcggccagcaaataggttttatctggtccccagataattttacaataatttattatggagtctatgtcatgcattccaaagaggaatataaaatgtacatgaaaggcataaagaatcatgaaatacatatccctgaacccacctcccagctgagaaaatagaccaaccccaagactgcccctgccagcccctccccccgcaccccagagaggtaaccactgtgctgaattttgtgtctactctccccatgctttatatgtagttttatatgtagttttgtatcagttagtgcattcaaggccacacaacacagctctcgctgactcccatcttttgggtccttccagcagcagagcctgagacaagggtatgagggcaggagattccagaaaacaccagctgggcagtgggaagtgagacaaggataggaaggaggcccatgaaaggtgtattatcaagtggtccctgagtggcaactggagctcagtactgctgggggcatctgggagactgggtagagcatgcacctcaaagctatcctgcctaatggaccagggagctggggtatttataccccactcccatcagtcactggttcagggctgctcccaggaagagctaattctccagcatttctggcctgctatttggaagggcagagtggctctagggccagagagagacctcaggaaagggatgcagggcaggcagtggtagtcaggcagatgtgcactgaaggggtcaggtgaggggctagaccaggacaccacagtgtctgctacactacttgagctggctttgaatccagcggctgggcttcctacactatgaagtcatttgcctgctcaaattcacccaccagaggtgctttctatcccacacctactgaacaaaaattgtgtatggggggacgtctaggcagtcatgttttctacacagtctcacagcatctggatactcactgaggtcacgagccactggcccaggagataaagtgcatatgctcagcctgtcgttcaaatctgctaccacactctgctcccacccttcccttcccatccctgtcctgctccctaggccacagtcccctcaacctgctggattgtctctcagaggaacagccagcctcaggaaatgcaacactttcagggaagttcatgtgcacaaattgcagactggtgggatttaagaaatggcccaaattaagggtttctgaattactccacttatctcttcttggccttaagattgctttttataaattgagatgatggaaatgtttctttcttcccctgagaggcataaagggaaccaattccatttcataatccaaaacataagccttaattttccatttcctctgcagccacagtaaagctgctaatccttaaacctgtgctgatggtccccatgttggacgtcaaaggaatctataagcttaccctgcttccctgtggtttatctgaattgaaccctgtacaacagacatgggaagcaaaagtcttgagattgttaggggctcctttaagacaagggatgtatttgcactctgttgtgcaacatttagtgagcaactactatgtgcctgacactgcactgaatcagggagacacagaggtgagtaagtcccaacccctacctacagatggagcagctgattactttcttac

SEQ ID NO: 9554 - DNA, 6000 bp, Homo sapiens
gcgtgttctcgcatgtgtgagtggatgtgcatgtgcatgcttgcatatgagtatatgtgtgcatgcttgcatggtggagtgtacgtgtgtgcctgcatgtgtgaatgtacatgtgtgcttgcatgtgtgtgtgcatgtgtgtgtgagtgtgcctgtgtgtatctgcttgcatgtgtgtgctagcgtgtgtatgtgtgcttgcatgtgtgagtggatgtgcatgtgtgtgcttgcatgtgtgtgtgcttgcatgtgtgtgtgtgcttgcatgtttgagtatatgcatgcgtgtgcctgtgtgtgcatgtgtgcttgcatgcgtgtttgcacttgtgtgtgtgtttgcatgagtgtatgtgtgtgtttgtatgtttgagtgtgtgtgtgcgtatgtgtgcacatgtgtggaggcatttcatgtgttaaaagatgccactagagggtctgagcagaggggtctccccagctgtctattagatccctgtggaccacagtgtggagagcagagttgggaggactgcgctggcaactaagggtccccatgtcctccaggcaggaggtgacagaagcaggggaagtgagacaaggatgggttaggaatatttggcagtggtggtgccagttccaaagtgggctcaggcaggaatccagatgcccccccaaccagctttgaacccagtgaccagggatctgagggccattccccagagctgggggtgcctggatcctccccatctccttcctcacccagtagcagtggggctgcctcaaggggaaggagatcccaagtatacttttgcagaaagctctgactcgtacaaatgcagaacagtccccagagctgccccaggggcaggagcatgggaaagcaccaaaagaagctcctctccagacccccctgaaatggaaccatgttcctaggaatctcctgcactactctacaaactccccagccctctgagctgccgaaggcaaacagaagctaaaccaacatgggaaacccagagggaagagcccagcagcctgctgagtcacttcccctctatttgatgtggggtcaggagccccaaagtcacagaccccggctccaaccccagctcctccaaggttgctcacctccaacttctctgtctgcatttggggtgctgcagtccctcctcagagggcagtgtcaggacccagtgtggtcacaccaggagctcagagctaaacagagggcagctgctgccggggccagacaagagccgcaggggctctagagcctgcctcacacagcccatccatagcaagaggcacttgcctctgtccccacaaactgcctgtgcagtcttctccccaccttcctgtggcggcacagccttttccttattgactcttgggagttctttatatattcaggatacacatcctttgacaattagatgtgttataagccatctctttctagatcctgacttgtctcattatttcattatttataacttttaatgagcaaaagtaactaattttaatgtagtcaaattgactcatattttcctttctttatttttttagtatcttgtttatgaaatcctcccctagcccagggacaggaagcgaatctgctctctggtctcctaaaaaccttagaattttctgtgtggcgctgagacctaggccacctggaatccacagttgctcatgatgggagaaggaattccagggcataatgagagggtcacatgagcagattctcactgtgatggcttttgctgctgctgtctggggactggacagaaaggtgttaccaagtacagcaggcagagcagagaggaggtgctccttcctgaggagcccagagtggggatggagggaagtggaaagttctggaatatatttttgggaagaatccaccaggctgagggatgcaggggacatggggagcatggaggttcccagtagggcaacctgggggatgtggcatgtttcgcagagatggggaaaatgagggaggcacctggttaaccaggagcttggtcctggacacgtagactccagcggccctggaccttcccaagacgcagctggagacagggggctctaccacagaggagaggcctaggctctcctgggcaccgtgagtacagagcaggaagctccttgaggagtgtctgccttggggcaaaagggcgggaacaggcagacagcagggacagcccctggtgctggtgacaggtggcgcagacaagagctggtgaacattccccgaggtcagccatggtgtccacactcactgtgtccctcaccacagctctgcaagctctcacgtccatttcacagatgaggaaatcgaggctcggagagcagtcaggacttgctctgccttcaccagccatgaggatggatttgcgcccacacgtgtgcctcggtagtccgtgaggaaagaaagcgctccagtcttgtttgccagggaagggaggggaagtacagcccagtggctgggtcaagaccacagactggagaagccagactcctgggattagcctcccagcccggcctcctatccactggggaacttgagcacgtctccagcctcagcccacccatctgtagaaggtagcagagccagcactgtattagtgcttgggaaataaaataataaatataacttttgaggaagatgttctgcctcattcagggacatgtaagttaaaaccacaatgaggctgggcatggtggctcacacctgtaatcccagcactttgggaggccgaggcgggcagatcacttgaggtcaggagtttgagaccggccttgccaacatggcaaaacaaaaattagctgggcatggtggcacacgcctgtaatgccagctactcgggaagctgaggtgggaggatcactggaacccaggaggtggaggttgcagtgagctgagatcgagccactgcactccagcctgggcgacacagtaagactcaatgaggctgggtgccgtgtctcatgcctttaatcacaacactttgagaggctgtggtgggagcatcacttgaacccaggagtttgagaccagcttgggtaacatagagacctcatctcttgaaaaaaaaaaattagccaggcatggtggtgcccatctgtagtcccagctactcaggaggctgaggcaggaggatggtttgagcctaggagcttgaggttacagtgagctctgattgcaccacaacatcccagcttgggtgacagagcgagaccctgtctgtctctaaaaaaaaaaagcagacaagcaaaaccacctagttgaaaaaccagttcatgccactagatttgcaaaactaaagagtgccaaatattggtgaggatgtgggacagccagacccttccacactcctgctaagctgctgggagtgtaaactggggctgtcacttgggaagacggttttgctgtatctcctgaagctagacaaatcctaccccgtgaccctgcagaccgtccctggatctaaaggtgcccaccgagaggcacacacaggatgctcatcacagctttgctcatcatggctccagataggcgacaatcccatgtccatcggcaggagaatgggcgagcaggagcccaacaaaacaggctgcgaagacgatgcctgcgagcagctgccctgtgccctcaccacacagagcagacagagcaaacagcacaggctgagtgaccccgtttctgtaatgcccagaacaagccacccaaaacagcgtcccattctggggtgcaaatataagaggtcacacccaaagaaaagcacttaaagatgaacacaaaaatgagggttgtggctgctcctggggagggaggagcggggtgagacgcggagggacacctgggcccggtatgagtccattccctttccctgttaaccatgtgaactgtagagagttcctcttctgtaggggtgacgtgattcacacagcaaaaaccgcacccctcaggctacagatgggggccaagtccccagccgggactcagccctcccacgacggggttttcctggcccatctgctctgttatcgatgctcctgttgccggcttccccttccttggcctggttgcgtccaccgggaggccctcccggatgcctcctgcctgggagtggcggttgtgagtacagtaactgagtgctgggtgtctgcccctcagccttgccatgcaggctgggggtattgcctggacagctctggcccgtcaccctggattctgcagccccacacctcacaccgtgtagatccgctgccccacgctacagccggagttcgcgtctcgccacgcctctgccgcgggactttcctccctgggctgcgtccccagccgggaatgcgccaccagcctggggcctgcagggggcgcccgggctccccgcgcaggtgcccgcccatctgacagagcggaacgcgcgaggccgagagctgggaacacccggccccgcaaggtctgggaactgcgattgcctccttcagcctcagtttccccccccgtgaaaggaggccatgctcctagcctgggcacactgagccaggccctgttcctggggtcgcgggctagcccgctcgagagcggggggctcccggaactgcccgcgcggccccggcgcccagagagttgaggcgggcagccgtatcgccctttgaagacgcgcggtgggcccctgcaggcgcgcggcgcggggcagagcgccctctggaggccgccgccggccccgcccccgccccgcccccgggctctgggcggcgcatgcgcgcggcgcggggctccgcgggcggcgagagcgaggccggtccgcagccgcgcggcgctcggcgccccattcatgctgggcatcggctgcgcggccacgcagcggagcccgggcgcggcggcggcctcggcctgggcggcctacgcggcttcggcggccccgcggcggggcggacggcggcggcggcgcgggcggctgggcgcggcgatggccggcggcggggcgcgccccggggcggcgggtgagtcggggcgcaactttccccgcggcgcgggacggtgggcgggggccgggccgggctggggtccggggccgggcggcccgtgggtgggcgcggggcggcctccggcggcggccctctcgtgaggcggcaggcagggggtgtgcgcggggactgcggcgcgcgtggggactgcggcgcgcgtgtccgcggcccgcgtgtccctgcggctccggcccaggcgtccgcgtgtgtccgggcgcggtcgcggcgccgacgcggagagaccgcacccccgtgcggcggggctgggaccgcggcccgggatccagcgccgcggcctcccccgccccccggccgggcccgccgagccccgcggcagctccggggtggcggggggcgggcgctgcccctccacggaggctggggagaaagtttgcggcggccccgcggggaggcccctgcggtgtccaggcccgtcccggccgctggacctcggctcagacctctggccgcgggcgaggacggggtggccaggcccggatagggatcggagcctcccagcagggccgcgggggccggaggaggtcgtgcaggctaagcccccggccggccctggggcgcggggtggaagttggagcggcttcccgaccacagctgccaccgctcccactggcccggagtgcggggaggtgggctctgggtgccgcccaggaggccgccccgctcgggcctccttggcctccccctctcggggcctctccagggtcagccgcttctcccggaggcttccgattgcttcctggatagtcccgggcctgatgtgcggcgaagctggaggcagcgggccgatcccgggctgccaggggaagggggagtggggactccagggaggcccctcggtcggcgtgaggtcccaggtgcagccctggaaaggaggggaggggctccgaggggcggccccgggcggcgatctgccccaggctcctgtgtggggttctggggccacgcccc

SEQ ID NO: 9555 - DNA, 6000 bp, Homo sapiens
ctaaaaacacaaaattggccgggtgtggtggcccgtgcctgtagttccaaatactcaggaggctgaggcaggagaatcgcttgaacccgggaggcagaggttgcggtgagccgagatcatgccatcgcactccagcctgggcaacaagagcgaaactccacctcaaaggaaaaaaagaagaaaaaaaaagcaatgaaaggaagcaatatactttctgtattacctgcattccagccagaataatggaaaacagagtacttactcgggagcaattctgtatttttatcctggttcctgaacttactgcttgaccttggttaattacatccatttccgcctgccctgattacttcttgaagagttttaacagctggatatctatgagtcagtcattagtaaacatatctataatcttacaacctcacgagttatgtattcttgctccattttaatgacaaactaaacatctgacactggccaggggcagtggctcatgcctgtaatcccagcactttgggaggctgaggagggaagatcacttgaggtcggcagcctggccaacatagtgacaccccatctctactaaatatacaaaaattaactgggcgtggtggtgcatgaggcaagagaatcgcttgaacccaggaggtggaggctgcagtgagccgagatcatgccatttgcactccagtgtgggtgacaaagcgagactccgtctccaaaaaaaactaaaaaaacaaaaattagccgggcgtggtggcacacgcctatagtcccagctactcaggaggctgaggcaggagaatggcttaaacccaggaggcagaggttgcagtgagctgagatcctgccattgcactcccgcctgggcgacagagcaagactttgtctccaaaaaaaaaagaaaaggaaaaaaaaagttaagtggtaaagtacacaaaaatgctatcgtaatatatgacaaaaatgctattgtgtaatatttttaaggtagggaattataccaattcaatctctacttcaaaatattacataaaggtattactactatatatctagtaactaagaaaaaaaaaagccacgcacatttgaattgtaatgctgtaagtattcattctgtatttctctttagataaaaatcaaagtaaaactaatactgatagctttttaaaagatctacagtcataataattttgaattcattcacacagctttcttgaatcttaaaaaatattttctttaacttcatggcagaacttaggagtctcaccaaacacacaaacactggcaacttgcttcactagttaacacctcatttgtatttatggagccattccaggtgatcactgtagcactctcatattcctaattaacaaaatccttctaattacaacttaaaatttggtggcctcaagttctcactttattatctcagtagttttaaacatgaaaatgctgcatagcttactgcaatcactcaatggcattcccttgctgctgcagcatctgacactgccagaacaggagttctattaagtgagacagtaaggaaagagcgttctccacatagcaggccaggatgccttggcatcattcttctggctctctacttactgtcaggaggctaggaagagaaaaaggaaccaatctttttttttttttttaatttttcatccctgcaaggaaaaaaaagcagaatctctctgtggtcaaatcttcagccaatagacaaatcattccaattagtccaatggtggtttcactgcttttaggcaccagtttggtactatcccatatacgtgccacatatttttattgaactttaaaagacaagtagaattgttggcaaggcacggtggctcaggcctgtaatcccagcactttgggaggccgaggcgggtgaattacctgaggtcaggagatcaagaccagcctggccaacatggtgaaaccccgtctctacaaaaaatacaaaaattagccgggcgtggtggcacacgcctgtaatcccagctacttgggaggctgaggcaggagaattgcttgagcccgggagatggaggctgctgtgagccgagactgtgccactgcattccagcctggccgacagagaaagactctgtctcaaaaaaaaaaaaaaaaaaaaaaaaaaagacaagtagaattgtcataaatcatgtaacaaaacacatttatactttaaaaaagacatctccctgcctgttccagatgttcaaatgccagtttaagaaaaacctggccaggcgcggtggctcctgcctgtaatcctagcactttgagaggccgagggagtcggatcacaaggtcaggagttcgagaccagcctggccaacatggtgaaaccccgtctgtactaaaatacaaaaactagctgggtgtggcggcgggcgcctgtaatcccagctacttcggaggctgaggcaggagaatcgcttaatccgggaggcggaggtcgcagtgagccgagatcgcgccactgcactccagcttgggcgacagagtgagactccgtctcagaaaaaaaaaaagaaaaacccctggtcttccactgatttggttcaaaatattttacagactgcaccatctgaaatacattacctctcctgttaccaatatgaaaaaaaagaggacctttggttcctcagaaaaacacaaactgttatttttttaaagaaaaacttatcaagagatgaaatcggaaaaacttaagtctttaattctgcccttgggaatgtaataaattattccttttatattccaatacacaaagaactcttgtagacaagaatcaggctcaacaaactaaaaacagcatgtacctaggatcctggcagtttacaggtgtttgattatccttaaccagagtaactcattagaagcatttaaaactatttaggaggggggagggggaagcccaggagataagtactatatctcttatctttttgaaaccctcaaagctctacactccagttatactgcttgaacaaacaaataacataaaattgctaatttaaattcgaatggaaatagtaactggttacgtttcactccaaaattgggtcaaacaataggaaagggggaaaaatctacttttaaaaatgtaatttaaaagcaagatggggatattcattagacctccttcactttgagaaagacaaaaaacaaattcagttttggcttatctcacctgagtccttctgaataatgcctgaaacacactagctaaaatcacagacgattactgagcaatgttctctttttacaagacccccaagaccagaaacagtcacttcctttggaagtgccctgtggctgaggccatatggttaacatgtgggaacaagcacaagccttacccataataaaatcaacacctaaacccaaatgtggaccattatgccattctaaaacaggttctcacgatatggaaaaatctagatggaggggagctagttgaatttcgtgtctcgtttgtaattacatctgtttcattaatccaagaaatgatgcagactaccgcccgctgctgtggttttggaggtttgacaaattcgtgttttttctggtaatggcgcttttaaaggatcccagcaacttaaatagtgttaactcttggaatgtgagccccatcagccccttttggaatggtaatgtaacacaagcaacttagtatttaaatgacgataaaaattcaagaatcggaaaactatcaaggatagggagtataaactctaaaagctcccaagtcttccagcagtctcgccactccaaacacaaaggcttcttcaggaaccctttgttgttgtttgtttgtttgtttgtttgtttttttaagacggagtctctctctgttgcccatgctggagtgtagtggcgcgatctcggctcaccacaacctcggcctccggggttcacgcgattctcctgtccagcctcccgagctgctgggactacatgcgcccgccaccatgcccggctaattttttatttttagtacagaccaactttcaccatattggtcaggctggtctcgaactcctgacctcgtgatccgcccgcctgggactctcaaagtgctgggattacaggcgtgagccaccgcgcccggcctaagaacccttttctaaggcccccaaaacccttggcacatggcccgccaggcgcacgaccccagcacatggcctgcacgactatacccaccccatccccccttcatccgcagccgggagcctttccccaccacacggactccttccagtgagttcccgccaaatccaccctcggtccctcattccgcgaccctcgaagcgtcagggcctcggccccaagggcgcacgggcgggcctcctctgccctaagcctgcggcctggggtgcggccgtggcgccgaaagacccgcatgctcggcgacccagctttccaggacgaagaaaggacagaagtgtcgtccgacagcggtgcgccagaaacccgggtccgaggcggcggcagcagccgagcttcccgcctgacgcagcagaggcgcaggccaaagtgcggccgccatcgccacctcgccgctccctaccctctctgtccgccacagacccgacccgcactgcggctccgtcagcgccgggcccctcccccagccctcaccttccgcgtcggagcgggcccgcagcggcggagactcggacgcaggcctggggaagacggctcgcaaggtagaggctgtttattttgagggtccttgcctgcgccacacgcgggtctgcacacggccccacatacgccgctgcgcacggctctcctccgcctcgcccacgcggccaatcagcgcgcggggttcggcagtccaatcagagccgcccgcggcagggccgcccactagagcgcggcgcggggcgggtgtttctgcgcgcagcgtcttttcccgccgtgccccgcgcgcggcctttcacgccgggatccgggtcccggtgcttctcggttcattcccagctgggtccgggcccggccagactgggtggaaatctggctgaccttggtggtctgtcttggccagctggagcaaagggatgccaggggacgggtctcggtgcagtgactgccattagcttggggccgcagaaagtttctcccctttctcgggctcctgccaggcccttggctttcagagccaggcccgatttctagataacatttaagtttgcagaaaaggggatgccaagtcacggtggtcacggctgtgggatgcagcctctgagatttgtattaatttttgtgagccggggaaaggccttgctgctttctccgccaggactgatgtgtcttcccaagatgaaagtgcctggtaagggcgaggggcctccctgggaaggtcatgagcatgtaaggtaatggggcctagactgtgacttttggcacgtttatgagtgacatcccccgggagggcaaggataaccatttgacctggtctgtcatattcaggaatagacttcagtttagttgtggtattttctccaaaagagatttgtgtatatagccctagatagtcttgtcaagattaaacccaatttaaactgttaactataaaatattttagaattttgtctcattctagaatggctttattcgaaacaaaaaaaaaggaagagtcccaagtttcgtctcagtgaaacctgccagttcaacactatgatttatttttctttttttctttaattttttttttttttaagagtagggtcttgctctgtcgctgggtttacaggcataagccaccaatcccaaatcccggggctatgatttttgaaatcatgttcgtgagaaggcagagcacatgtgttgagagtcagactttaaacctgggttcaaatcattagtgcttaatcattgtaaagcagttaggaggttgcgttcaacatagcaattatcaaagaatgaatgtataactttaaagaccaatgatattttaaactttttttttttttt

SEQ ID NO: 9556 - DNA, 6000 bp, Homo sapiens
tttctttcaactggttctcacatgacagaaatgaaaagatgaaattacttgtctttaaagttttgccatagggaaatgataagaaaaactcctctcgacccctatccccaaccaggaagagtctgaagccctggattatagcacaggtagatattaaaatggagacagagccgttatttagtggtgacaggaatataaatacgtgcactaaactataaactggtatttacttcaggaaggtaagtaatatttttcctctgattgctgcactgtcagtttaatgcagcgtaaataaacagtaggtgcctgctagctcgaagtaggaagtgttcattccacacgaggaacagattactgaagcctgatgctcatcatgctgaaacataactttcattttaccagaaaatataccctactgtggatgatttttcgtgcctgatctattaattaacttaactctgttctgtcaaaatgtaaaccaatttgtaaaaatcatcacagagttttggagtttgaaaaccaaatcaatttgaaaagcaagagtaatgactgttctgtaatctgatcacaaatgctaaaaatgaatacttaatataataagcacaaaccacacaaaactgaaaaagacgaaaaacattttgaaatatcatagaacttaatccaagttatctgatttactcgagatagtcctcatttgttaattaaaagcacctggcacctttaatattttgcagccttgtgccactttggtcttttcaatatgtatgcttattctgctctctgaaatatctgaaggtaaaccattcataaaaatcaaaccccattccttaattccaatagaaatattgctgaactctcctgagagaagcggcaagtttgaagatcaaatgatgatatccttcctaacagcattcatgtaaaacgtgttttttctattttatgtatgccacaaagctatgacagtatatagcaactaattttctttttatatatgagtactgagcaaaatatttcgtggcagcatttaaaataagaacccatcttatctaaaaagtgtaaaaggcaatctggggaggtttctatttataacatgaacaaaattctgataatcaatatattgaaaagggaaaagagattaaaaacatttttgcattcaactacatcatgtctagaaatagtctgaagattgctttagtcatatgcatttattttaaatacttcatcaattccaagtgctaatatattaattacagccatccaagacaatatgtatggaagaaactatgtgtgtaaagggcatatctatgtatagcccttttggaaatttacagaacagatgaaaacccactagagtgctttatagagtccctgctgtatatccatgttgtgtttagcttaacagtgtttgtaaccaaaatatttttacaataatgaggaacaggtgcctgtcacctgaccttttaggcctaatttacaatccacaacctgtcatatgaaaaagaactaaaaattctcctccagatattttagtctttactaagttaatgtagtatttctttaccatcactcagcatatcatgtcttatttaatcacaggttcatatagctggcaacagatttctttgcagaaataaaccaatattcattttgttgtcgttcttaagatgctgggagacaaaagaactacttttgtagattatcaaccaaagaatatattaatttcttacaaatctgaacaaaaaacattccttttgaatacttttacatacaaagaactattatttattacatatttcagcttgtgggaaagtgaggaatgcattgattctggaaataactattcagacttttggaagttatttaggtcttctttctctatcttccccccgccccccatcctgccctcccaccaaattttaaggaggtagtactttaggagggaaatccctattcgttattttttcatatattatttatattcattattcagaaataaatacaaaattgaattgtaattttatttctcttgtataatgttagatgtagcattatccaaatttgacaatgccttgtattttatagctactgtttaaatattatgtattacctatgactgaacaactctacatttaaaatattgttttcattagaaaaaactatgaagtagtaagtgtcaaatgaagatgaagaataaacatatttggtatatttataaaatgcatagtcatttaaaacgtgtacaaatagaatacatagtttgctactgttacattttatatagtatacacattgtctacagtgtatttaataatgtgcttaaccaagttaattaaagtatttatgtctgatgattgtgtaataaacacttggagaggtagtgaaagatacagccagttacttctgctaactaaagttgaaattatgcacttattataaccttttctaacaatgtgagaaaaacagagtaaatatattaaatttgtttcacaacagatgcttaggttgttaatatttaagatgcctattcatgctattcctgtctgcacatttgtcaaaaatgtaagcttgaatgctaatgtttgccagcagactggagcagccagtatatgaatgtactactgttctaagaaaataatatgcaatagaaatagaggactactgctaaatcatagcagtagtaccatacaggagatgagaggtttttagagcaaacacctcaaccttggttttcttcagacttaaagtatgggtttttgtttttgatttttgcagctacatttgaccacagaataaatctcacattcctgacatctcagaaaaatccactttggatagagtgtaaatttcaactaagtttcaacgggatgagttactctgtcagcagtacaaacaccgtaaatttcagattgcttaggacaaaacctgacaccgagcggtaacattttactcattcttaccctacccgccacccccttgagaaagtcaggtcccctggcctccaaggatgcaaacatggaaacccagtcagtcagagcagtaaggttctctctggggaatagggcatccttctgttttccctgtctcttttataaccatgtggagtccaagtcttagaacatttgcttgtaagtccggaatgccactgagaaagttcgccaaggaagggcgcagaggtcaaagttgccaaccaggacactttgagagaggaccctgtggttgacatttgttagtgaaatttgcaacacctcagtggaggccaaggccaaaactttcaaggagatccctatgcccctttcccctgttggtcttctgaggtcatcccaagaggaaactgcgtttccccagtaagcacgtggcactccccggacctgccacctgcctgcttcgtccttctcgtcgtggtttcccaaaccccggttctgccggcccgggagccttagcactggagcaataggaaaaggccaccgcgctcgggtctggacagcaggagggaaacacggtgtggactgcgaggctgcacctgtgatgtcccggcccctgctaagaggacggccctttcttctgcctcttgcccaactccaaacccacattcacgccagcagcctctccaggaccggcctcgctacagccagcgagggctcgaaatgaggagtgccgcggctttcaaactccgggctccaacttgagcgccccggcgcccgagtagctcccgggatgcagaagttgccacaaacttcccaggcccctcttcgccgatgcttacaatcagccgcgcaggcagggagcggagggaggcggagatggaccgggaaaggatgctgagcagactcgcgatccggtgggggaacattaccactcccgcagcccactcctccaggcaccttactgcccgcccggctccagaacgcaccgagaggctccccttttccccatttgcttccttcggtcttttccactcccctttccttttctaaaaggggccataccggtgacctgaaggagtttgttcagccagggtctattgggcaggtgtggtggtgtgtccacacccagacagaaaacgaatggcatcttcaaatcccccatcccgaccgctctcccctactctaccagcccacccctccaaggtccgtctgcgtgagaaaaggggctcggaagaccgttgaagccctgcgcccacgagaggggagcccagccgccccaataggggacgaggagtgggtgctacggagaagtttggattgattccggaaaaagagggacagagataaaacagcaagagtagcaaggggaaaagggaggcaaaagagcagaactcactcaggcatggacgttgggggcggcggtggctgtcgagtgcgggcctgaaaccaagaacggctccccgggcgggcgcgccggcgtcggacttccgaggcggcggcttctgcctctcctgccgccgccgccgccgccggagctgcggctgccgcggaagttaattgcaacttgacttcaagttgtcctctttccccatacgaagtgggcgtttaaaggggagagcgaggcgaggagcgagcgagcgagcgcgcggggccaagggaaggaagagaaggagggggagggaggagatgttaacgggcgggggggggagaagggggagggggcggcggcgggggcgggagggggaaggggccggcgggagctgctctcgtctcgtcggtcgcggcgcctgcagtctggaggcgcaccggagcggccggggcgtcccccgcgggagcccgcagccacccgggacgcgcatccagacgtggcgcttcggaccgggcacgctgcgcccgggggctcggcggaccccgcgtagccgccgcttcggagcttgtgcggcgcgggctggccagcggggcggccagggcccggcccgcctccccagcgcccgcccggcttctccccctggcggtgggagcctcggcggccgctggcgacactaggcgcactgaagcccgagccgagccgagcccgagccgccgccgccgccgccgctgctgcgcaccgctcccgggctccctcccagcgcgccggccggggtgtggggggcggcgggccggaggggcgagggcgggccagggggcgcacacgggggttggcgcggaagacaggaccctcagcctcgaggggtaagtgtgggcgcttgggggtgcgcttggggtgcgcggcgcggttctcgtcgcccgccaaccctgccccctcacctctccgggggcccccaacacgcgcactcctcctcttgtcgcctgcggcttcctcttgttgcttgttgtttggctgggttttggggggtgagtagagggggttactgtagtgtgtgtgcaggcggaggaggaagtcaggtgagaggccgcgaagcacccccaccccaacccagcctgcgtggggtgtatgcttccccactaggggcatttgggccattttttttttctccgtcaatgttcggtcgagacgatgtttcctagagggcctccttcacttacagtctggtctgtccatctcccttcatcccaccctcgtccgtcttagccccttgtccaggagccctgcaccccaagtgaggagcacgtggcggaaggaggaggaggccctctcttgaagacccccacgctgtgacccagcccattagtttaaatatttatcctcacatcaccagctgtacttttcaacccactggaacaagacgcctaggcaaggtccaatttccccaaaaagctgggggcaaagcgggagagatgagggttttattgacattgggagagaaggggccaaggaaccttcccaagtggagactgaaactcaaaaaatctctacaaaaagactagggtgactggaggctcaggactgcaggcttaggagaaactggagctccatcaactttatttctctccccctgcctctcctccccccagctctgaggaagctaacaggtcttttgttttgtattgtgtagcctttgggaaatttgcattg

SEQ ID NO: 9557 - DNA, 6000 bp, Homo sapiens
aacacaggaatgaaaacaaaggctgggaagtccaaaatcacacaggctagaaggaatccgtgcaagttctacctataagcagtggcctcctgacacagcatcctggcacggcctcaggaacttcccaggtcagcccatgtgccctgatgtgcctgcatccgcacagagctataaatgtaagaagatcaagtgtgccagcagcaggctgattgctacaatgtgttctcagcctttatgcctgagagcatgtcactgacccccctcctggagctaggagcccaagcagaggctgagaagttatttgggggcaggctggggaggcggtgatgttagggagggggtaggttggatgtgtttatagctcatttccactctgacaatagagcaaaggccgcttgggcttggatccatgttgaaataaatgtgccagggctggaaaattcccaagatgctaaaactcagacccagttcccagaggcagaagtgggtacaggacaggtcattctctgggcaggataccttccccagagggcctggttctgcccatggagatgtttatttcttccctcctttcccccttccttttatccttctgtatttaacaaatacctgaaaggtgcctattctatagtgacctaggcctttcgaagtacaggtatagacaatattggccccacctttaagatgcttggatacaagaaaaaaacaaccccattaaaaagtgggcaaaggacgtgaacagacacttctcaaaagaagacatttatgtggccaacaaacgtatgaaagaaaggtcaacatcactgatcattagagaaatgcaaataaaaaccacaataagataccatctcatgccagtcagaatggtgattattaagaagtcaagaaacaactgatgctgtaaaggatctggagaaataggaatgtttttacactattggtggtaatgcaaattagttcaaccattgtggaagatggagtggcaattcctcaaagacctagaaccagaaagaccattttacccagcaatctcattactgggtatatacccaaaggaatataaatcattctattgtaaagatacctgcacatgtatgttcactgcagcactattcactatagcaaagacatgaaatcaacccaaatgcccatcaatgatagactggataaagaaaaaaatgtgagatatatatatatatatctatatctatataatctatatatagatatatatagattatatagatatagatatatatagattatatatatatagattatatagatatatatagattatatagatatagatatatatagattatatatatatagatatatatagattatatatatatagatatatatagattatatatatatagatatatatagatatatatatatatagatatatatagatatatatgccatggaatactatgcagccataaaaaggaacaagatcatgtcctttgcaggatggatggagctggaagccattaacctcagcaaactaatacaggaacagaaaaccaaacaccacatgttctgacttataagtgggagctgaatgatgagaacacagacacagggaggggaacaatacacactggggcctgtcacgggggcagagggagggagagcatcaggaaaaatagctaatatgtgctaagcttaatacctaggtgatgggttgataggtgcagcaaaccaccatggcacacatttacctatgtaacaaacctgcacatactgcacatgaactccagaacttaaaataaaaaaaaaaaaaagatgcccggatactcagacagatgaagacatttgtaaatcagggattgctgaatctctgtctgtgatggttcattttgtgtgtcagcttggctgggccatggtgcccagatatttggtcaaatattattcgggatgtttctgtgagggtatttttggatgagattaacatctggaacaaagtagatcacccaccataacgttggtgggcttatccaatcagttgaaggtctatatggaacaaaagactgacctccctgagcaagaaggaattccgcagcagaggacctttggacttgacctgcaaaatcagctcttccctgggtctccagcctgtcagctcactctgaagattttggacttgccagcctccataacacatgaaccaattccttaaatgaatctctttctctacatatatacatcccaatggttctgtttctttggaagaccgaaagacaccctgtaatgtcacatcttttgtccatgcctacagcatctcttgcctggatctccaaggccttcataatgccagtatctcctttcccatcttccctgtggctaccagcattctctcaccaagcacagatttgagtacgttgttttgcttgcagtccttccaggcaccccaccttccccaccaatgccttctaacctcagtcatctttacactagcaccttcatgatttttgttatatcagactttctctttgctgacgtcaaaagtaagcagaactgagaactgaatttcctccctgttattcagtatcactcaatattaaattcacatttaacactatcagaaagtattccatcccatattttggggaatgttgggttacagaataaaacccattctcctttacatggccttgaagttcctttagcatcaataagtacagttatctcttggtatccatgggggattggttccgggagccttcaaggtacacaaatccctgatataaaatgaagcagtatttgcatataacacgtgcatatcctctcacatactttaagtcatctcaagattacttgtaacacctaatgcaatgtcactcgtcactgcatttgtgtgcattcagtgttgtaggtggcacatgacaaattcaatttttgctttttggaactttgaggattttttttcctgaatattttcaatccatgattgtttgaatccactgaactcacagatacagggatatagagggccaactgtatgtattaagtgctggcaatgtgctaggcaccaagcaattcatctttagtccttcctccaaaacgccaaagtgattcccctgcaccactctctgagaagtatgccttttttctttgcttcctggagaactcattctggagctctgaaatccagctacctctttgtaaaacgatctcccaagtattacctcagcccccagcagtcctcacttctgtaacatcatttattgttgtcacactgcaaatattaggttgatgcaaaagtaattgcagtttttgccattatttttaatagcaaaaaccacaattacttttgcaccaatctaatatgtgtttttctccctggccgaagctcaaaggtgaaggagcatgtcttattcattgttaggagttttcaaggggacctctctatttcctgcctggtttctgcacacaatgagaaataaaacaaaagacaggaaatggggatcacactattactgttgttgttattgttgttgtttagattaaaactaagttagagaatttaccttttgcatgagactaaatagccctgttaggtgaatccagaattaggctgtctcacgggctacgcgaggaccacacaggtaggcaggcttccctacaaagggtagaagagtctgtccttggtgaagtggctcagtaaacttgctccctagaaagcagctgtcttccaggagaaagaagggcaggcttggttctacaggccagtgttttccttctcacattcaccggtcaggggctcatagggaaaaatctgccttcatccagccgtggagtgaggcaggggtgttttacctgctaggattgaaccctcagattgcacagattatacagtttcagaaaaccagagggacaggacctcagacattagctatcttgaccagtgctctcattttacatatgaggagactgaggcccaaagagaaggggcttgcccaaggtcacttcattctcacctgagtcgtctgtaactttaatctgtaattttcgaggccgataggtactattgactaatattgattaatactgcctgccaccccttggcaatgctgtcaagattcccagccccattctggaatgattactcagctagaaccctgggatccaggtgctgtaaggttggcccctgggatatctcggcatggggctgtaattgtggattaaggaaacccagtccttggctaactcaagtctctccacataataaaaagacggagaagtgaaatgtcaggaggaaatacacatttaatgcattttaaagagccctgtttatttttgaatcctggcctttttttctgacttaattcttggccactgtaaattacttcaaaaaatgattttagaatagagaaggggcagggaggctgagaagctgtctttaacattttatcttcctttggcatcatttagaattttaattccgaagcgcgacaaggaggcagaaacggctcttgggcgcagacaagcagaatcactttaaatgaagacagtgttgtgcttcagaatttcctctaaaactaccgaaaaaataacgcctctcccagcactgcttagaatagaggccatttctaattcctcattaacgggaataggaacaaaagtattccaaagcaaagacttatttgagttcactgctaaagccgctacatcaagctggaggtgtggggggagagaaaagcctgaaaattaacatcatttttgggaaataatcagtttaaatgcttttgtaacttcatcactatctacccggggaagaacattattattcaagcctcctatgtgtctcggagtcaagagcttctaaaccaagaaaggaagaaacgggcgggttattgacgagttccctccctctcgcagttttaaaccactgcaaaataaacccatttgttaaggctctgggaccaacgctgggcgaaccagctccgctccggaggggtctgcgcggctggcctcgcccgccccctagcggacccgtgcgatagtgcagcctcagccccagcgcacagcgccgcatccagacgctgtccgcgcgcgcagcctgggaggcgctcctcgctcgcctcctgtacccatccagcgaccagccaggctgcggcgaggggattccaaccgaggctccagtgagagacctcagcttagcatcacattaggtgcagccggcaggccatcccaactcgggccgggagcgcacgcgtcactggggccgtcagtcgccgtgcaacttccccggggggagtcaactttaggttcgcctgcggactcggtgcaggtagctgggtgctaagcaggggtggacgggatggctagggccggtggagccatcgggacccgagtggaggtggtggggtgcctcgcactccttgttcctggaggagctcggggtgttccgagagattgtaaagtgacttctcgggattgagactcagagtccttgattatctgggtccaaagcgcaagtcaggggttccagaactttcgaggctgccgggctggggaggagccccgcgggaggtgtctatgccagggtctgggaacagcgcttgggcatcttgggctttgaggcaggggttcccccagcagggactgcagaaccgggtttccaccgaagcaggtgctgtggaagttcagggagtgacggccgaccgtcttagaaaagggggttagacggggaaggaccagagctggggtttcccaggcaagtggctatttggggatttccggaggaagtacttgaattaatgtttactaggagaggggctggtttgggggtcccgcggcaggtggatatgctgagggtcggagcctggggcgagtaggtagtttggagattccctcggggaggtgatttggttttagattcccactcccggaggaacgttgctgattttgaccctcccttctcccccagtggaagccgctgaacatcccgaggaactggcacgctgggggctctgggcttgtggc

SEQ ID NO: 9558 - DNA, 6000 bp, Homo sapiens
ctgtcttccatgaaaccagtccctggtgccaaaaaggttagggactgctgagccatactctattttttgacagaggaaagacattcctgatatgaagtggaaaaaacagcagcctgcaaaaggataatcaggctgggcatgaaggctcatgcctataatcccactgctttgggaggctgaggagggaggatcattgagcccaggaggtggaggcaacagtgagctacgattgtgccactgcactccagcctggcgacagagtgagaccctgtctctttaaacaccaccaccaccacccataatcatagttaagattctgcttttgtaaaaacaatatataaacatatatatgtgtaggcataagagtatacctgtacttgcacacaattacagcttgtatatgaagagaaaaaatttggaaggatgattacccctgaggaatgggaaagagagcagagaaaaactgtattttttacatctgtagattccttgtggatttttctccacaattagcttgtttacctaagtttaaaaaagaaaaatatgagggctgggtgcagtggctcatgcctataatcccagcactttgggaggcccaagcaggaggatcacttgaagctaaaaatttgagaccagcctgggaaacacagcaagacctcatctctataaaaaataaaagaatggccgggcgcggtggctcacacctgtaatcccagcactttgggaggccaaggcgggcagatcacgaggtcaggagatcgagaccatcctggctaacatggtgaaaccccgtctctactaaaaatacaaaaaattagccaggcgaggtggtgggcgcctatagtcccaactactcaggaggccgaggcaggagaatggcgtgaacccgggaggcggagcttgcagtgagccgagatcgtgccactgcactacagcctgggcgacagcgagactccgtctcaaaaaataaataaataaataaataaataaaagaattggccaggcgtggtggctcacacctgtaatcctagcactttgggaggctgaggcaggtgggtggatcacctgagtcaggagtttgagactagcctggccaatatggtgaaatcccatctctgctaaaaatacaaaaattagccaggcatggtggcaggcacctataatcccagctactagggaggctgaggcaggagatttgcttcaacccaggggccagaggttgcagtgaaccgagattgtggcacttcactatagcctaggcaaaagagcgaaactctctcaaaataactaactaactaactaacagaattagccaggcctggtggtgcttgcctgtagtcccagctactccaaagactgaggtggggggatcgcttgaacccgggtgtttgagactgcaatgaactatgatgctgtcaccgcactccaccttcggtgacagagcaagacttagtctcttaaaaaaaaaaaaaaaaaaaaaaaaagagaaaggcccggcacggtggctcacacctgtaatcccaggactttgggaggctgaggtggatcataaggtcaggagatccagaccatcctggctaacaacgtgaaaccccatctctactaaaaatacaaaaaattagccgggcgtggtggcaggcgcctgtagtcccagctactcgggaggctgaggtagaagaatggcatgaacccaggaggtggagcttgcagtgagctgagattgcgccactgcctgcactccagcctgggtgacagagcaagactctgtctcaaaaaaaaaagagaaaacactgggagtgtattcagggcaatctgagtctatgcttccaggaaaaaaaaaaaaaaaaagttaaaaaggcaagcaggacaaaaaagaaaaaacaaattttactacttctcttaactgaatgctccacttcttaggacaccaaaatttagagtcattagaccagaatacagtcattaaagataacaatgaagacaaagcagaagcacatggagaagaaaatgttgagaaaaaagaatacaaattatatttatatttataaaatgattacaaatacgtaaaaataggtatgcaggcagtcaaggtgttaaatttgtgtttatctaaaaccaaaaacagtgtgtttggagtactttgatatttctcaccacaaaaagttattcatttttttcattgctttattcatcatcatgaaagcttttaagatagtcatcccaaaattggataacaaaactaacaaaaatcccacaaaacagattccaaccaaagaaaaatctttaaaggcaaccaatcagcacctaaggaactcaatcatctggctttttatcttttgagatggagtcttgcactgtcgcccaggctggagtgcagtggcgtgtgccaccaggccaggctaattttttttttgtatttttagtagagacggggtttcgctacattggccaggctggtctcaaactcctgacctcagatgatccgcctgcctcagcctcccaaagtgctgggattataggcgtgagccaccgtgcccggccaatcatctggctttttgatggaaggtatttctagaattaatagagacataagatccagtaccactgctttgacagtggacagactgatttactctagtcaggtctacatgagcaaagtaaagtaaaacatggaatgccattatcttgacagtggtgctgggtggaaggaagggcaattaggcagatatagggacctgagacttaggtggttattttcttcatctcatcagtggggacctggcttctttgactgcaccttgatgtgcttgtttacactgttagtatttccccttgtggatactgtaggcttattttatagccagagtgagtaggggcaggctatctggccagtcgccacctcagattatcttccccagacagctaatgtttattagagcaactagggaagagagagaagagtgactggagggaggagaaagaaagacagtgggaaggcaagctagccaatgtcattacttttaagtctgcaatactgaaaatgcatagtacatgaacattaccttgtgttcagatactgaggcagtgttttcaattgcctgaaaaaacaggagagtcacaaaaatattatgacacatcagcgaaacacgttacaccttattcagcatgccctgttatctcatctaagagccaatgtgtccatatggcaaccatcagctatcatttccacttgaatgagttttgagatttttatttcaatctacctcagttatacatctgtcactaattgccactcatttcctccttgataatcaaagttccaaagatcccaccttaatccaggcttctgaaatggttttctcatatctaatagctgactttattacatcaaagagaataatacggttctgaccgctgctttcttgatttcctgaggaattacaagtagcagagaggaaaaaaattactcttctacctaccagaaaagaacttacaagatgtgaattcctgcttagtagccatgtaccctggagtaaatgacaacctcatgtataagatggctaataaacttgcactgtagtctgcctgggattgatctgaatggctaagaaaacatatgaacacatacatagccacatacatatacgtaatttgaaaaacgatataatactagatgtaaatatcataatagtaccattatttgtagttgtaagtattaagctccaactctgactgtgggatgtcagagaactgtgacatcctatgtgaggaaaagggtggcaattatccatgagctctttaccttgcttgtcctttactttttaactttacttggaaagcctgcaacagtgatggcaaaacacaatgctgcaggatccaacttctcccgaagctcagagattacctgcagaaagttaatattagctatggtgttctgctcattcatagtgggtaggtacagtccagtctctcaaccatgacaatctcctgaaagactgaggaagaaaaaattttaaacgttggacattttgaaaaatagagttgtgagaatagctaaatgcaatgtcgtagaatgtcatatccaaaatttcagaattctgtgaggtactacacagaaagagtaaatgtaacttatagcagcttatatagatcaatgaatctgttgaatagctccatttcctcttctcaatgctatccggattagtcaacattctcagttagtcaggactttcggcttccagacacccgcctttaacacgtgcgataccatttggcttcccgagaagcccaacagacgtgagatgaggccgactgcctggactagttcatcgggaagggggtgagggtaaaagcctttctcatttcctcattttaacgacgcagaaaggtacctgtggggactatcccatctcagggcagatgaggaagccgaggcttggggcgcggagccccagagaagaacgccgaccgcggcccggacttaagagattaggtcgcaggggagcggggcctcgagagactacgaccactgctccatttactcaccgagaagccgtccccgcctgtagttttctttctttttttttttttttttttgagacggagtcttcctctgtcgcccaggctggagtgcagtgcagcaatctcggctcactgcaggctccgcctcctgggttcacgccattctcctgcctcagcctcccgagtagctgcgactacaggcgcctccaccacgcctggctaatttttttgtatttttagtagagacagggtttcacctgttagccaggatggtctcgatcccctgacctcgtgatccccccaccttggcctcccaaagtgctgggattccaggagtgagccaccgagcctgggccaccgccgatagttttccactttcccgccaggcccgacgccgctctgacgccactgaggtgcgccacgacgtgacgtcaacgttcgcgccggaagtggaagaccaggcagcccagctgaaggcagtaagctcggctcacagtcgcaggagagttctggggtacacgggcaaaggggcttgagaaggcccggaggcgaagccgaagagaagcaactgtgccccggagaagagaagctcgcccattccagactgggaaccagctttcagtgaagatggcagggccagaactgttgctcgactccaacatccgcctctgggtggtcctacccatcgttatcatcactttcttcgtaggcatgatccgccactacgtgtccatcctgctgcagagcgacaagaagctcacccaggaacaagtatctgacaggtcagcgccctcccttctccagcctacctcacaccgccgtgaccttgggcaaaaaagtgcaggagttgtgtcaatttgcctaggttcacgtcgcgccccctctgacagggtgaccttacccgttacctctgtgtttcacttttgtcctctgtgaaatggggatgataacagtacctgcttcatagacaggtaggaatcaaattaggtgatgtctgtaagtcccttagcacaggatctaggacgtattgagtgttgaaaaaaacagtactgttaatcctttaggttagtcgccgaccctcggtgggtttacctatgaactattccatcccacccttccgttgagaagagtgccaggtgcgttacagcgtttagtctttgtaacatccagtcaagtgagtgtgataatctgcattctaccaaattactgttccaggcgtcgggcctggtgggactgtcagctgagatgccaagtaccaaagcgctttgcagtctgtaaaactgccattagagatgtaaggaattgtaattatttccccccactagagtggaggcaacttcctcacatatttcattgcagtatttatttatttatctatttatttgcttatttttgagacggagtttcgctctcgttgcccaggctggagtgcggtggcgtcatctcagctcactgcagtctacgcctcccgggttcaag

SEQ ID NO: 9559 - DNA, 6000 bp, Homo sapiens
tgggaaacctaggtcccaagcagttccaggacccagattcaccccacctcccacagcgtttctgggctcgccacagggcctcctgcagttcctatttcaagctccaattcccctactcactctgtgaccttgcgctacaatgttttacctgtacctcagtttcctcatcggtaaaatgggaataaaaataggatccacctcccagggttttgtgaggaacacacgaggtgtgtgcacagaatgcctggcacatagtaggatgtcagtgtgaatggtggctggccagaattcgccagaagccaggcctacaacctcctccctgagggagcaaggaccagtaggaggaggggagaattggtgacctgcgttcaaatctcaatagactagagaccagaccagcctcagccctgcagatgctatctgggaacccttatctaccagccagaggagttggaagccacctactctccgccagcattttccctggggcctgctggagactctcaccttctgtttcttccactaataacagttgccattctcctttaacttgcaaccccgccaaataggtattatcatacccattttgcagatgaaaaaaacctgggactcagggaggtcgagtcacttgcccaaggtcacacatcctgtaagtgagagagctgggagttggacccaggtctgtgtggccacaaagcctccactcgagatctggttggctgagggagtttcaggccttggtgggagtggggagtggatgcgaggcttccatgtgactggagaggagatttcgggcaagccagcccgtgtggtcccctggatccacagtccacggcccgtcaaggtctggggctagagatcctgagttgtgtgcttcaaacttgggtaactttaggcaggcgcagagagaggggcctagggtttgagtgggaccctcaatcttgctttggtcctcactggctctgtaactttcacgtaaggccctgtggtctccaggtctcaattttcttttctgtaaaatgggaagaagcctgggctctttgagggtgatctgtgggggtcagaggagacaggaatgtgagagacctttggaaataccttcttatcccccggggaacccagctgacagctctttggggcagcagtgacctgagagctgccccagaactcctacccaggtgtctacagaccccgagccaggcaaggcaagggcaggggtagccctcatccatgcttcccagaaagaagagcaaaaacagagagcccacgtctcataccgaagacacagctggcctctaattacattcagtcctctcccctcagacctgcctggacctacctcctctattgccttcgtgcagagagcctcctctattgcccttgtgcagagagcctccagcagcctgggccaagttctgtgtccccattcctagacagactgaccctattcactcaccctgtgtctcagctccaggacccctccccaagggagaaaaacatggtctggccaactaaacacagagtaaaaatcagattggctggctcctccttccgtccccctcccctatgtctcatacctttccctaaccctgactctcaatcggtgtccaccataagccaaatcatgctggaggcagaagctatcagtaatcctcccagctggcctcttgcctctttccccctcttccctgtggctgaccctgacctgtcatttccaaccttcctggagttgcaacactagtgccattgtttgtctaatttcacaacacctctgcctgtccaataccccctgccccccaacacatcctggaaggccaggccagatgacccaggtgtatctgctgcaggaagagaaggcaaaggggacggggcaagggacagatgtctgcagccagattccaccctcaagaatgaccttaggcaagccctgatctttttcttgaggcttcggtttgctgaactgtaaaatgggagaattggataggagttctcaagggtccagcagactcattcaagcctttactgcaccatctaacacatgctgggacctgagacctggaatgctggagacatgtctgatgtggtcacagcccagtgagggagacagacgtgtagaccatcacaatacagtgtggtcagaggtagaacagaggcatgaaccaactcagttggtggaatcaggaaggactgtctggggaagcagaatttgagttggacttcgaagaatgagtagggtgggcctagaactggggtatacccacaaggaaaaaccttcaaactttgctgttcaatatttgcactgcctcaggagataggggcatccagtcactgcggggtggatgcaggcgctgaaagacatgggatctggaatgtcaaggagatgggaactcggccaggtggcagttctagtcttagggtctgaaaaccaaaatccacaactgcctgagagtttggctgctagtgtgcgttggtgagagcccagcccgtctcagacagggaccaccgggaaggtaagactcaagacttgggagcggacgagtgtcagggctcccagtgagcccacactcatgatggcctgcgcatgcaggcagccctgggcttggagtccagaggcctccgtcacaagtttggtctactctttactggttgtgccaccttgccctggccaccacatccccctgaactacacagagcttccccatctgtaccttgggtgctcacggcagccaccccagaggtagttgggaggatcaaatgatttactgttttgtaggtggcctttacaaactgtaaagtgtgccggacacagaaggcagtgtgattgttgaaatgtgtggctcataacaggctgcttctcgggctattttgtaagcagggaaagcagtttaccgccaaagatgttgaagtaataatggtgggattcctggcacagacatgtaggctggcaacagatgggaggtgcaatgggcctttccgcctctgcccgtctttgcccaccctcgctccaacatctcggaacagctttacacgggcctgttttggggaacggagagcctgtgggccttggggaagggcagatgcttggccctggtccctggggtggagctgactagggactgctgacttagaagaccacctagaggggtggccagtggaatccccccaactacacccctaagaggggtagagttcccatctgcacccgcaagatgaagcagagatgaggctgctttggaagcccccagtcttgggctattggtgtggggtcgagagcctccctgaggggtgtcctgggctgctctgtcagaaccccagcagggagccttgcctggcctctgactcacacccttgccccagtggaggccaaggccttgaatgaccacccggcccttgacatcgtagcttcgcagcatcctccctgcgttgaggccaccctgcgggctaaggggcaggtgggcacccttccatggggctgggggctgaggagcaaggaggtctcagcatggcctactggtgggagacccacctcaggcgctcccaactgtctccctcccgtggcccctctgcacggccgggttctgattttggtgcagtgcagactttcagcttaacgagacaaattggtattctgtgccagcccagggatggagcggcagctcgggacgctcgggcgggcagctcagaggtgggcaggaggtgggggcaggggaaagaggcagcttctgcctggaactgcctcccggggccgcctccagccctgcccctgtcccccatgcacccctccaccctgacaggtgccctgagacactggtcctgaaggtccttccaccttcagtgccctccctccaagcagggtacccctcctggagggggcagggcagtggaggccaaggcttcagaattctagagaagcccctcgcccccggtgacctcctaaccttgctcttagggctctcctcccacccatctggagttgaaagagcagcaagtctggcagagattaggcaggaagaggtgagcagctggctaggggcttccaaccctaccgactcctcacccggggtccctgggttcccgtggaagtgtcagtcagcccacagtcggcctgcaactcatcatagatgtcctgaagattaggtgggtgtacagacatgcagacacccctgctggtgggcaccttcttgaggcaggcccttctgccaagccagcccccaccaccacacccccccgagggcaggtggggtcgcacacaggcagggcgggtcgcaggggtagcgcttcagggcagcagagagctgctgcgggctcagctccactggccctggaaacacagatgtgtttaaaatgtgttgagtcgacttctccccatttgcgacctttgcccctttgccccccaggtctgggggtgccttgactgcaaagaggggggccagagcccctgaccaaataagtcccccagaaagcaagggacgacttggggccatttgagcaaaatcctcccctctctgctcccgttctccccaccaccactctcaggacccccttccctccagcacagcccagccctaccctctccgtgcccttgacattccctcctgcttctggggagcgggcatattcctgggactctgccagcttcggttcctcatgatcccacgggaggaattaaaaccgcaaacaacagcgtggtggttcggtccacacaccccccccgccccccactctcctcccccgtgccccctccagaaccggccctccctgtgtccctccctccctccctcctcccgcccccatcccccagcctccggcagcggcaggggcggcctctgcctcccccgagattgcattttgccggcgagatgctctcctagaaccggcgccggcgcctccgccccccgccccccacccgctcgggcaggatggtacagtctgcagaggggcccgggcacgctggctgggctcagccgcggcaccagctgccgcaccgcgattacggggctgcccgccgggaaaccgtgcaggattggtggtgattttcatagccaagtaagtaccggcatcccccagcatgagaaaataaaaaataaaaagcgccccactccactctccccttcctccctcacccattttattttgtttcatttcatttgatttttctcagtgctgatggtggtggcggtggcagcgtggagggggggtgggagcagggcttgtttatctggcagcagccgaggctgcactgggagccgccgctgagggagacactagtgtgagggtccgcgtgttgtgggggacggctggatgctggggactaggacaggggggcctcggacaagcggatgcccagggtctcaggtagattccggcagcctctggactgcaaatgccccctaaggatgttatgcaagggccagcaagctggtggcaggggacaaggttctcttctctctgagccggtcccagggagaccaagaggactggagggtgcccgttgcccaccctggtcagagtcccaggaaagaggcaggaggaggcccctgtgaagcgtccctttggtggggtgggcagctgtgtgctgggactcattgggtcaggccagccgggtcatgtggtggcagggacgtgttcctgggtcccctccatggccaggagggtggcaggaacgggtggccaggccattttgcagcagtcatgctgggtggtggagtcggcaccctctgcccagaagcccacttcctaggccagcctcagtggtctccagctgagggatagggcacctgaggctcctccctgccccctgcagggtcaggatgggaaaatgcagcagggggcctcaggactccctgagggtgggttgcggacagcagcaacccctttctagccaagtagctattccacaccacggctgtcctctgctcacccaggttgggggttgggggttgggggggtgctctggactggcctgccccaatcaggcaagggccctgggggtctcgggcc

SEQ ID NO: 9560 - DNA, 6000 bp, Homo sapiens; identical to SEQ ID NO: 3389

SEQ ID NO: 9561 - DNA, 6000 bp, Homo sapiens
aaactgccctgcacacttccacatgaggacttttcagtggctgttccctctgcctggaatgctcttccccaagggatccacatggctcactttcttcaagtcttttctcaaatgttgccttctcaatgaggcctaccctgaccacgctataagttctgcaacctggcactccttgttctctttactctgttttttttttctatagtacttaccattttctaatgtgctatataacatacttatttagtatattaattgtttaggatctgtgtctctccatgcgaatgtcatctccctgagggcaaggatcaatgtctgttttgtttatctcaggcactcatgtaggtaggtgcttaatacatagtttgttgaatgaacttaaaatcacaagcctaagtcatttgttgagttacagattttaaactggagtcatgagatgaatgtgttagatgctctaatatgccaaacactcttaaatccctcaaatacttaaaataccatatacacacagattgtttcaaatctgggttaaaattgaggttaacttctcaactggctgaaggtgcgtatctctgaagatgtaagtcagggaatgagatctgaagctgcagacaaccagcgtgactttttctcgtgacctgaggaccatgctgtgctcttgattctcctcctccctgcacttagggccaccgtgcaggttgtatgcagcatagttgggagtagggtgggggtgggggtaagtggatgctgaaatccagtatgtgccccatttgccaaatgcagggcttgagtgccagcacaaggttttgtccatgggagagaagggagtggtgcctctttcccatttgccacaggccccaatgggcttggagtggtcctgctttgtcaaagacaatgccagcccgctacctgcaaactgattggctttgaagctcacatctcccaagtcaattccatgtttcctgcttttcaggtttgctgaggctgttcccccacccactattggatttaatgaatctagttgctatgtgattctattctgagttctttttggagacatcccatctggcaaggccatgactctcaaagctatttctatgacaccagattggatcctcacaccctcatgctattgtctgactcagcgcaacacaacagccaaggcatgtgaattacactgctcttcctttttctttatttaacaaacatttacatagtccttcccctgtgccaggcgctgttctaacactttccaaatattaagctatttaaccctccaacctaagaggtgagtactataattatctcatttcacagataaggaaactgaagctcagagaatttaagtgacccgcccaaggttcacgtggccacaggtggcagggctgggattcaaacccaggtcgacttttgctccatcttcgcttttttcttgtcattctttccctccctcttcctcttcctttctcccctcgttttctcttccttcttcattccctgcttccttcctgacagggccacagcaactgccacctgcttccctcagacactgcccagcccagcacaccctccctccatcctccaggcaaggctctgccaggctgtctgtcatcaccctcatttctctgtgccagcagacagggtgtgccaacctcaatgccctcaacccgctggctcagaccacagcagctggcagaggcctgggagctggggccaggccagcctggagggcagttggcccttcgggaagttacatgatgtgcccagaccttccccaatgacgtttatgttatccatatcataatttattttcttgcccaaggattttaatgtggtgccaagatgtcttgtgctgcttgggataaacttagacaaataagggccaagagaaagtgagagagtgagatagagagagggatagagagacagaaagatagagaaccctaaggcagggggcaagggtgaagagacccagctgtccacgattctctcactagaagtggctgcctacagttttgggaacaaggaggagtggcttgatatcatccctctatgtgtgaatgaacttttctgtgagtttctcaaaggactcatgttcttctccataactatgcctttgcatatgctgttcccctggcctggaaggcccttcccaatcgtttctacccaaggaccatgctcacgtgctgcccgcttctgggaaacctttcgtgaattcctgcaggggactctgctggtctctcctctcacaccagagcatctgtgtgcacgtgcacatttctgttttgaactaattggcttacatcccctctctatgcccagtacaggagtggtgcctggaggaagctgaggaggtacaggaagtctatcagcacttcacagaggaaggaaaagtggggattgtgaaagcctcaaggcaaggtgactctgggttcaaggctcaccagctggtgaccctgggcaagtcacctaacctctctgtgcctcagcttcccttctatagaatgggaatattattacattttgtatagtttgtacatcattgggttgtgtgagaatgaaatgagttaagatatggaaagcacatagaacagtgtctggcatgtgcaaatccctcagtaaatattagtcatttttattattatcaaactggaaatagtcatagagttgcctaaaggattaaagaaagtacttttgatgaagtgtgaagcatataggaaggtctttgtcattatcattaacagtatcggccaggcgcggtggctcacgcctgtaatccgagcactttgggaggccgaggcggatggatcacgaggtcaggagattgagaccatcctggctaacacagtgaaaccctgtccctactaaaaatacaaaaaattagccgggcgtggtggcgggtgcctgtagtcccagctactcgggaggctgaggcaggagaatggcataaacctgggaggcggagcttgcagtgagctgagatcacgccactgcactccagcctgggggacagagtgagactctgcctcaaaaaaaaaaaaaaaaaaaaaagaaaaaagaaaaaaaagaaacaatatcaagagcagtgcccaatccactgtgatttccagaattaacttacaagttgaggccacatagctattgcttttttgagcaaatgaaatgatgaatatgatatttttttcttttcttttctttcttttttttttttttttttgaggtggagtttcactttgttgcccaggctggagtgcagtgggacaatcttggctccctgcaaactctgcctcctgggttcaagcaattcttctgcctcaacctcctgagtagctgggattacaggcgagcgacaccacactcgactaatgttttatatgtttggtagagacagagtttcaccatgttggccaggctggtcttgaactcctgacctcaagttatctgcccacctcggcctcccaaagtgctgggattacaggcgtgagccaccgcgcccgaccaaatatgttttttgtaaatgataaaatgacaagcaaaaatcatgatggtttaataaacgttcattgccctacccaaaacatagtcctgcctgtaagtgtggctcgttttgggacctcggtggcttcagactttcaaaagggtggttttactcccaaagtcctggcttttgggacctaaggcagaagctagtgatggagacggggagcttggcatgttgctttgcttctgacaggttaggaagcctcttccttgtctccatcagtaaacaaagggaagtcattattcgctcctgcagatgttgtaacgttaaaaaaaaattggccatcagattgagagaaaaggctaagtcactggagccaatttcttttgtacagatgagagaactcaggcgaagaaaggggaaaggacctgctcaaagccacaaagtaacgtacagccagggctagaacccagatctctagacccctagttcactgccctttcactggtgattgctttccaaaaactcaatgctctccaagtccggagccccatgtccttaaatggaaggtgatggaggctcagtgctcctgtccagagaccaggtggggaagactttttggaggcagggaaagtgagatgggcaaagccaatatgcaggacaccctcctacctacctacctaccgtgcaattacctcaatcttcacaacactgtgaagcggagactatcattatcatccccattttacttctgtaaaagggggccagtaacactgcagggatgtaaacggaggcccaggatcgtcccatcgtcccatcgttctctgcagctcttgctcctagaggctggctattgctaaggtccagaacgtgtgcagggcacaaagcaaataggtctccgggactgggatgaggttttgcctctctataccccgtggtacccagcacagcgtaggcacggggtaggtcctggctgatcaatcgtcctgccttttgaaaatgccatcttttccacaggcttggccatgctgtacaccccgggatacaccttctcataccaagtctccactctcatgtggttctattcttggactttccatcgcctccacgtcccctgaatattttttctgtctctagctctcaggaactttgattccttggctgccttattctttgtgcactttggtcaagagccaaagatctactggtctcagctttcccacctgtacaaggcggtgcagagccattggctggctttgacgcgctattagttcgaattcgggacgtaagaaccgcacaaaattaccgagccccactttctctccgctccccaccatcccctccctcgttcggaaagcgcctgcgcagaagccgccggcccgccctccactattcgaatccgtatccgcccttttcgcgccctcgaagactcggcgctcgacaggcgtctaccagcttgtcttccggtttcgtcgccgccgcaggcgcacctgccgagttccgagcgaccgatggagatggcggctgcggctgagtgacggacggtggaggcccagagcccgggcctgaagggggggacaaacctgggtgcccgcaggagcccggcagggtacatacagagggtcaggcccagtctggggggcggggacacgactcctccagaacggagacgggcgggccgtgtgtggttgtggtgggtgtgacgtgagaggtgggagatggggctttcaggccgtgcgtttcgcttgtgtgtgcctttgatgattgggctctgtgtggttgtgcggttacgcggggcgtatacacttgggtttggttgtgcagctgtgggtggagtgggtgggtgcttgtctcccgagcggttgtgtttgattctctggttgtgtaaagctgaagcgtttgtattctgagttcgtgtggagatgttcggagtgttttgtgtggtgtctgtgcgatgtgtgacgttgtcatgtctgcttcacgggattgagtcgttcgtgttgtgtgtggtcatgcgatgtgtgtataatcatgttagttatgtgggttgtggttgcgatcgtgaggccgggttgagtgcggctgtgggatgtgtcgtcgatgcggcatgtggcggggtgacattcatgctggatgtacggctgcagaacatgtagctatatttattttttttatttttattttttttactttttacgtgatttagagtgcgaggggcttgcttatgtgttcagttatggttgtggggtccaattcggtggttgtgttagatttctttatggtgtatgcttagttatatgattttggagttcattcatttcttcgttcattcatggagctttattgtgctgcttcattgtgtgtgccaggtactgtgctaaaccctggggagacggcgaagtggaaaacatatagagtctgtgccctcccagattttacagtcttacttggtcacttcacgtatgtacctgcggttataaattgagatgagtgctgtgaaggagaagtccattctgatg

SEQ ID NO: 9562 - DNA, 6000 bp, Homo sapiens
aaaaaataaaaattgggctgggggtggtggctcacgcctgtaatcccagcactttgggaggccaaggcaggtggatcacttgaggtcaggagttcgagaccagcctggccaacatagtgaaacccagtctctactaaaaatacaaaacttagctgggcatggcagtgtgcgcctgtagtcctggctatttgggaggccgaggcagaagaattgctcaaacccgggagacagaggttgcagtgagccgtgattgccccactgcactcccacctgagtgagagtgagactccatctggaaaaaaaaaaaaaaaaaaaaaaactcaataatcaatgttgctgtgtgaattacatgccaatatagaaatagtaaagcaaatgggaacagcttgtggggcggtcagggtatagctaataaagtgacccttaatattggagtaaagctttcccatcataaaggcattaggaagtgtttggtgtatttgaagaacaaacagcaaggagcctggggtgtggactgcagtaggacatgaggtcacacataaagtgggaagatcatgaaagctatcatgaggacttttgatttttttgcacgggagtgccatgatcaatttaataggatcccttggactactgtgtggagataaaactgttgggtagcaaggacaggaacaaggttttcttgtagagacaatgctgacctttggcccgaaccctttctctccttcccaaattagtcatgtttaaggattttttttgtttttaggtctcactatgctgcccaggctggcctcaacaaatcctccagcttgtctcccaaagtgccaggattacaggcctgagccaccacacccagctgaacagttttagataaaaacctaattcatgcaatgatcaaagaactgagagaataagtacattttatgctatctcaaattatattatttctataatcacattttgatgcctttttgctggttagggcatttggtttgctttaaagtacattagcactgtaagatgacaaaaaataacagaaggtccatttgttttagtttaatagacatttattccttcagttgaacaacctctacacaattaaaatgtatgacttaagatcttttctttttttgtgaagaaatttaggtctcaagaacttttatgaacttgctatgagtacttcctggaaatcaattaactgagtcttttgaaacccctagagaagataggagaaaattggttcagaacgagcatttaaattaagtcagcaaagtcagaatttaaaattgggcaattccttgtctacattttctttacactcaaattgaccctggacaacagtagtctagtctcctggaagacatggtgcaaacagaaatgcaatgtggtggtatactcatagtcaaagtgggtgcacaagtgatggtccaactttgtggaatggtaaggatttttagggttgtttggccagaacaagagaaataactgcagaaaacacatatggttggaaaccatgcgcttgtgactttttctgtagcctatgggagtggacagagtgggtaacccaagatgtttttaagactgactggactaagaatgacgtacttatagccaactactttccccctaatgtgactgaagggattcataatgatcacaattagcattacggttaagtattttagggttgacgtctaagctcacacttgaaaggtatttatctaatggccactggctcaccagcttcccaccctagcattcattgctagcttaccaatcttaaggctaataattttatcgcacattcaacttcaaaacacaccagtgtttaccattaccactaatcactgaatgccatgaagccatggcactgaaccaggagctttcaccttttatgtgaatttaaaatggtactgtggaggctgaggcaattttcttcaggctaacccagattttctaaagcccaacttaaaaagtctacacctgccaaactaaaaaaaacgcagccacttgaaaataaaccagcagagcattgccatcactccgataaagctgcaggtttcatcacatgcaccagacaaatctacagggctagtttcagttctctccttttaaagaatttattaagcctgttataccacacagtatgttttatacactgacatacaactccctaataagataaagcaaagacaaaaaagtttatcttattagaaacaagatacaccaccacttattgtcttcaaacattattgcactttaactttcttaatttgacaaagcattcaagaaacatctgcagactagttttaacagacaaataacacctgtaagcagacatgactgtcctaaattgtttattaagtatgaattttacaaactttacttatattagcggtaacggtggagctggagagtattgcgccttctccaagctgcccggcgagagccaccaatagtgtggtggaacttgtggccctttccaaggccacggctctttcggcctgcagatgtcagcccacgcatctccctgtgcttgtggactggtttggtgatccactgggtgtcaggatttcttctgatagctttatggaatggatcaatgaggataacctcaaaaaatttgtatgtggaatcttcaccaacccagtaagaattcaggactctcagagccccacagtggcgtccagctcgctcctagaataggaaaaaaggcccaaggtcaatctcccacattgcctatagcagcaagtcagaaagaattttaattctcaactctagttcaccaccagacaagagtcttttactactcaagttatttactaagcatttctccctagactatcacaagtgtaatgagataatgtagacttgctaaaacaacacacatagactgaaacacatcattccctcttaatactccattcctgactagggcaggaatatgttaatatctgggtaacaaaatttagggtttggggaccttatctttttccatacaactgagagctcagcaacgtttagctttaaaaatatttagtatatattttaggctgtgcaggccacatttggtctcttctgcatattcttgccgctttaaagcttaggttccacaagtacttccagtatatacacacgcatttgtaacaaagacaagtctttcaagcaattactcttcaccaagattagtaaaaatcacaaaccctgttttatatacgagacagctcacctaagtacaatcagaaaagttgcttaatctctctctcccaccatccccaggcagtattcaatataactgctactcaaaaccatttacctctgcaacggactgaaggcttcgagcaaactttagctggttaacaccatgatggacaggcttgccgtaagttgcacccttaggaactgggcgttttcggccaccacggcgaacacgaatcctatatataacgtaacctacacacaaacacacacgaaattagtgattttataggaagccgtaaggcttaagactcaatggcttgtcactaatactccaccaaaaatacttcaacagtaagttaatgctatctaatagaaaaaaataaaacacatcccagtctttttcaatgcaccttaggctactcacacagggaggcacactgtttattttgctttagtctgaactcattcagatttgtaacctttgacacacttgccactttagacaacagtgcatacagtaactgaccagtgttgctagcttttttctgccaaagccctatgcgaagaaagacactgaggcagcagtgtcttcctaacagctggtttccaacttttctcgaatataattttatccaagcatccacgcagtcgatcacgtaccttgcttggccttgtagcccagtcggcgcgctttatcaggccgggtggggcggggagccctgtggagagcagagagctggcggtactgccagcagcggaccctcagaagaaagcgcatgacatcagactgcttctttctccatagctcctggatgtacttgtatgcacccatcttggcttacctgtgaaatcaaactgtgtattaaatatcatccgctttaagtacaataagacgactgtatccgtccatcttagttccccaacaaaaacaaggaaaccgccgggaatgaaaatggctctgcaccaactgccggggacagctagcccaacccccaccactgcgcccacggagccgcgttcagtcacttccgcaaccccagcacagagcggtgctcggcacgttttggtggggcgaattaacagaaccagaactgagcaccaagggggcgggtggctgcggcaggcggcgtccccaaggaggacctgaaaggagatgccgctgacatcacaggacaaggtactgctgcggccaccgaggattaactctcgaggaaaatgcatctaccccacccaaccagcagcctcactttaggctgccttgtcccgggcgccccattcgtcagccccacgcctcctccaggatccgggcccagctcgaattcgcgccgccatcacatcttcgctcaacccgccccgggggccgcctctccacccctttgctgtcccgcatcctgaccaaactctggccgcacaggagggagacctatctccgaggacgcagggtccccggacctggatggctgaagaggaagacgatcaaaggcggatggaagagcaaagatcctcaacgcagcctacctgatggctgccgccagacggaaaggaaagagctgtactcccacaatgccttttgggctcctcccccacctcagccaccctctttccggtggaaagctgcggcctcccagagcgtcatgggacatgtagttccggcatcgcgcctggtggcggagttctgccgagtggggcgccgcggccgctattgtcccgccccctgctccgcaagattcgagcctgagcggcctgggcgtctcgagaggtgagagagttggcggcgaggtctcggcggctaagcgagcgtcggcgactgtctctccgcgagaggaggcaagttggggtccaggctccaaagccggtggccgcgtaccgcggtggagccgctgtctttgaggtctgaggagagaacaggtttgtttcacgcaccgcgggctctccccctgcggagtctctgcgtctccgcgtctccgcgctgcgctgtccctctctggccaccgcacgacgggcgcagaaatctgggccccagagctgcgctgagagatcccccgacgcttccccagcctcccagggaggccttcgcggagtcggggcgtcgcgggtcggggcgctcgctgtgtcccttcagctccagactgcgtgaagctcctccagcaggccccagcgcccagggattttgtcctaaaaaagggtcatggagtgggtggattgcgggcggcccggcgctttttctgcatacggatttcgtcccaaatttgctaacatgagaaccacagtttttcagaagagcagaatgtttatttgccaagacctgtttggcaggtgtgaatgttttagagaagaaatgccgagaaaatgctggcattttgcgttgcgggtttttttttaaattgagaaataggttactggcttactttgtttctccagaatattttcacttggctttaatttaagtcatgtggctttaatttccttccagattatgcgttcagatgtggcaaaggcttaagagaatcattatctcttaatcgtagcggttttgattatcttttttcccacatcatatttttctttctttctttttaaatcacagctttacgtttttaagagtctctatctggttcattgattgattcaacaaatatttattaagtgtctaatatgtgccaggcatagttgctggggatgcagcaggaaacaacgcagaatttttggccttcttggaaatgggcagtaagcagaagtaagctgtgttttgggtttggtggtaaatgctaaggaaaaaagataaggggagggaagtgatga

SEQ ID NO: 9563 - DNA, 6000 bp, Homo sapiens
tcctgacctcaagtgatctgcccgcctcggcctcccaaagtattgggattacagacgtgagccactgtgcccagccatggttcatattcctaatccatttttatataccatttttcctttttatttattctttttttttttttttttgtaaacgaggtctttctgtgttgcctaggctagtctcaaaatcctatcctcaagccatcctccagccttggtctaccaaagttgtaggattatcaccattcctggcctgttactgcttaaagaaaagctattggttttaatttatcttgtaattggctgccttcaaatgaatctgtttgtttgttttgttttgtttttgtttttttttgagacagtgtctcgcttcgtcactcaggttggagtgcagtggcgtggtcttggctcactgcaacctccgccttctgggttcaagcaattctccctgccacagtctcccaagtagctgggattacaggtgtgagccaccacgcctggccaaatgaatgtgttttgtgtgtgtgtgtgtgtgtgtgtgtgtgctaattggatgaatctgtcattctaggtacactgtcacatcatctgcaaataaagataattttgtttttttgttctgttttcattacattagctccacattcaaattgatggattttcctatagacagtggaatcttgcagctcgcgtaacaagtgaaatctttagtgttttacactttagtatgtttgctcttggtttctggttataattttattacttttgaacaggttcattttattttcattatacttgagtcatgttgtaaaggtctactgggagtcttgaaggaataattaaagacatacatctagacacatcttgatgaaattattgagccagaagtggaaaaacaaagaaacaaaaacctggtgggtattaggcttctggtcaacagcactagattcttaaaggccatggcgcagtacctgagagaaggtatctatccaaaatacgtatcgagtaaaatgatttttgaacatgaaaaggttttctttatcacccatatattcatcgtgaagcatatttctcaaggccttcttaaatgaaaatgagaaaggaataatatgagctgaacatcactcagacaaactaggggaaaacacccttgataataaattaatagagggatctactttactttagcgtttgaaatagtctcttgtgagcagtagggatttggtgacattgattcagatggtccaattttaattattggttctgcacagacaatacagtatttaattctagtacttcagatgctttttaatatgagttttcagttttagaattaaccagaggacagagcttagaaggctttattataaatattgaatggaatgtaaatgttatgcaccttgatacaaaaaaatataggcccggtgcagtggctcacacctataatcccagcattttgggaggcccaggtgggtggttatcttttggggccagaagtttgggaccagcctagccaacatggagaaacctggtctctacttaaaatataaaaattagctgagcgtagtggtggacgcctataatcccagctgccagggaggctgagacatgagaattgcttgaacttgggaggcggaggttgcagtgagccaagattgccactgcacccagcctgggcgacagagcgagaccctgtctcaaaagaaaaaaaaaaattatatatatatatgtgtatatatacacgtgtgtgtgtgtgtgtgtgtatatatatatatatatataaataacactgagatgtggaagagagattgtaaatgaaaggatatgggtgtgttggagaaaattcttttctttttgtggaaagatactgtttaaaattgataaaccaagacataaaataaagtatttaaagttataatggcaactctagcaactaaagagttacaagacacaacagaatgtaattatatctcatgagtggaagtgggaatgggaggaatgcttgcttatttgggggcacttctgtaaccttggattttcctactgtttacagattaatttgataaattacttaaaaatgtagtttaagtgaaaaaagcaagttatatataaaacagtaagtgtgtaatgaatgctatcttttttgtaagaatatatatatttccatttgcataaaaatattagaaggctgaaaatggagtgaagagaccaagggatcaaatgagatgtttgtgtgtgcctgctattaaataaaattatactgaaaataaatctttaaagaattagccaaacgaaagcctattggttaaagtttatttgttgagttactttatatttttattttatcaaataatgtattaaactaaaactaacttcaccatttcacctataaaccttgatttttaaaattttattggaatattggtttggtagtgtccatgatagtgttaaatgggaaacgttggagaagtgtgtctttcgtattttggtgtataatattttgttttgtatttgggaaattaaaaagtctacgtgcacctagtttcttcttcttttccctctggggttgcttaaccttcccttcgtcccactcaaatccctatgcttatggtttttataatccagtgggggaggaaaggacatgtgcttgaccaggaggttaagctcttaagtactggtggggagggccaagattttccataggaagtatgtttcaagaggtcattttggaattttttttaatttaattttttattttttagatggaatctcgctctgttgtccaggctggagtgcagtgccgtggcatgatctcagctcactgcagcctccacctcccgggttccagcaattctctttcctcagcctccagagtagctggggttacaggtgggcaccactgtgcctggctaatttttgtgtatttagtagaggcgggggtttcaccacgttggccaggctggtcttgaacctgacctcaggtaatctgcccacctcggcctcccagggtcctaggattactggcatgagccaccttgcccagccagaaattggtttttaacctgattgtttgcagatgttctttggggcttaatgtattgagaatttaaaaaaatcattgactgacatatgtcttattcttgtatttgattctttagatttatgtttatttgccaagtatatatcatacataacaagggtgaagatttcaaatatgtaattaattatatatgttatttagctgttggtgttattgggatttctgttcttggagaagtttagaagccttagttgtatttgaagtgtatgacatgtctatcacctgttacgtacagtcagtctccctatgtaaagttgtgaaagatttatttcttattttgctacttatttagtgcacgtcatcagtgaattctccaggatgagctgggtagtaagactttagctgtgggatataaatatttttatagaaaatattaaatatcatctattttgctagcttatagaattgagggtaccaagaaacaaatctgtatacacaaagagcactttgatgaagcagtaaaaactagttatcttattaaatttttgcctttgtgtattgctttaatattctgaatgacaaaataagcatttgtaaaaacatttctgctgcatatccaaatagaatgattgtttggagaaaaatcactggttaattgcctgaattgtgaactcaactagctgttattttcatggaacaccatttttacctgaaagaaaaaatgacagacttggttaatcatacttgggcatttgacagatattttgtcaaaaatgaatgaagtgaacttgtcacttcaagaaaaacaactgatagtgtttgttacccatgataataattcagactttcaggcaaaacttagaattttggaaaacttgcatctgctaacctgactttgacagtttctcaatacttggacttatgagattgttggtgatattattaacaagtgtgatttaaaaaaatttttgatattgtttaatgaaatgtgacatttggaaaagctctaataccctgtgaacacatacattccaaaaatgtgagagatccattcaaagtgcatagtagacaaatggattttgatgtaacaatgtgtaaaatgttcatttggaatggtttcagattctacgttgcaactattaagaaacaatatacttgttgagtttgatgaactatcagaggaatgtccataactacctgaagagaatattgaaatatgcctcccctttccagcagaatatctgtgtgaatatggatttttaaatatactttaaccaagggcagatcacatcagattgactgcagaagtagatatgagaatccagttgtcttctattaagttagataattgaagagatttgtaaaaatgtaaaacagaggtattcctctaagttttgtcttgtttttgaaaagttattttcattaaaatgttatgtatattaacatgtaatggctttattattgtgtaaataattctgaataagtactttgaagttttctgttttaatcctgatgtggtaacttatataaaccaaggtccttttcggtcttcaggaatttttaagaatgtagagaatcccaagtccagtagttagaggggtgctactcttttttttttctagctattgtccatattaatactttgttttttggttacaatgataattataaaccatactctcacacatccatccacatatattcttagagtatgcactctttgtactaacattgcagaaaggtttcagttgaaaacggattgctgcattcctcttggtatttttacttataactaaatgtgtatattactttccaaatctgttatgctgtgaccctgtgtaagttgtagttattagcttggaagattaggtaacttagaacacagtgattggctgtaccataaaagtaacttagaagaattcatctctgcaaagcacagtgacctaaatcagatatgtgctcactgtccctggaatcttcaagggagttactgcattacatcatcagaaacaaggcatttctatattactatggaaagatttcgtctggagaagaagttacctgtatgtacctaattatgatcttgtcttttatttacaaacgaatttgaatcagagtttaatagtgaagcttgaagaaatgtcaggcttattagcactggcttagaatagtatcatcctttgtgtccttggctgtggaagtcatctgttgaagagtaattccttgtgtaaagttaaaaataattgtagcatctttattcttctataaaactaactctttggatagttaatattacttgaacgagtctttaaaaattatttggttaagatattaggaaagaaatcactttatcttaatagttaagtgtgttttgaagctaaagtgttcgataactatgaatttactccatatggttcatcataatttatgggaggcattactttaggctatagccatatgtcttatataatggaaaaattaatttgtgacagggatctctgatggctgttttaatggatttttgtaaaccttagggtgtcaaaaggatattagacactatattttaaaggtgtcttttaacatcctttttttctaatactttgcttttggcatgttaagtgtcatttttgataatttgaccaacaaaaatataaattgtggattttgctttttcaggcaagataaataactatgagaggaattagtaaaatatcttatgaaggcataaatctgtttctaacaaaactagatttgattttgctgggattttcatgttgaattgaattttgattttgtaatgtgttgatgctgggtttttaaatttatgaactaggttttgttttttgtgtttttttttgagacaaggtctcgttctgttgcccaggctagagtgcggtggcgctctatgcgctcactgcaacctccacttcctgggttcaacccaagtaactggaattaaa

SEQ ID NO: 9564 - DNA, 6000 bp, Homo sapiens
cacagtcccgtgcagatcccagggcagccagctctctctcatggccaggactcccattgttgctttgtctggaaatgccctggacagcgcccctcccactcccaaccaaaccccttcacctaatgtccattaccactacttacaactcagcctcagaggcccctgcttaggaggcctccctccctgtacccctacagctctccatgacccttactgaggcacactcacctatcctgtcattgcctgtttacactggggtcaggagccaacatgggggcctacgcaaggccactcttgatgtctccactccttaggccagcacgaggcctggccctgcataggaagccaaggaatgccctctgagtgggtgagcaggagccgttctgagctcgtggacctcgctggttccatgttagccttcacccagcctctccaggcagatggggagggccaggcctgggaagcagacttggaagagccctgccctaaagcacccctcttgatggcctagatcagtatttctctattatagttctatttctctttttctattatctatcctaaggagtctctttagatactgttttctaatcaatccctccccttccaagaaatgttagtgcctcagatataccgtatctgtgtattgtgtactgtatatatatctgtgttttatacataaagagtaagatttttttcaccctctcccccagggaccatgtctacacccttgaaaattggtatcagccctgctgagaaggcatggcctagactgaggcttcaaattccatattagtgcagatatacagtatatgggctgcactgcatgagccaccattcagttccagcagagcattacagggagggaatggcccagtgtggccagctcatctgggtcttcaaaagaaccagtaagtctggaccagcctgggcaacatggcaagacccagtctctacaaaaaatgtaaaaactagctgggcatgctggcacacacctatggtcccagctacttggggggctgaggtggaaggattgcttgtgcctaggaggttgaggctgcagtgaggtctcaaaaaaaaatttcttaagaatatggtgcaagccatagaaaatctatctaaagatcagactctgtgtacaaatgccaatgtgtaacctctgctaagcccagagacaacacgcgtggggcaactgtgagacccggtgttttgccagtgcctgggtgtggctctcccccagtttcagggccctttgtgggaatgagggccaccctgctattatgtgtttggatgctgctttcttcgcctgttgtccccatggtgtggtaagtacctctctgaagcctctagaaatcttcagcatgcggtcaatgtactctttggccttgtcatggcggcctatgagccagaggaaaaggccagcatagtacagtgcagtcccactgactgtcttgcgtatttccttcaggctgtactcaagctcctgaattgcttctcggtctgtaaatccaagagcgaaggaagagggagagttaggatgtggaagtctgcctggttctgcatgggccaccgagggcccagggaactacctcggggtctcccccagacactgtggatctccttcaacatatgcagcacaccgcatgcagcccaaggcctggaaaccagcagtacctgcccttgagatgctgcaggggctgccctggtgtggactcacgtgtgctgtctgagattaccttctcttctctgtgcccagcagtgtgctgagcaggcaggccaaaccaaaatccttagcctcaggcccacaacttattgtgagtagggaaatagtagtctgtagtctctcttggaccctctccctgactctagaaatgtggagattaggggtagaattatatatattggcttggtttttctgacaagatcttggcaaagaagaagggtgtttccccaactcttgggatctggagcatgggcccctcccactgtcatgggctctgcctgcttccactcagttgggcccaggcatggagtcttctcccaggcctccagggggagaggagcagcagccacttctcactggttaacagcatctgcacagccaccagggcacatacctcctttggcagcccttgaggggctgtgttatctctggggcagggctttccttcccctggtgggtcaggcctggttgagcatggtggcactcaccaatgatttcacatcttttgtgagcataaatgagggccatggtggagcacagggacacgtctgggtgatgcctgatgctttccaggtcactgatggcatcctggatgtgctctgcaaagacagtccacatagttatactctcaagctccaggactagaggacatgagactctgtagctgacccaacagctcagcactactacctgctggactaactggtctgaaaggtccccagtgacccaagttccctgaagattggggctctttgaaagagttgctggtaacatggtccaggctgttaggggctggaaatcttggacttgaaaggttcaccctgtgagtacttgtggggatatgtgtgaggctgcaattattagctgcgtcagttctgaagaaggacctcaggcagggcattctcagctactgctcaagagccactgattacatttatccctccatgtcctcagacatttggccatgggctattctgccagtcctcagcctaggaccaccttctgaatgtcagcccatctgcacctgcatgggtctcactcctctccctgtacctgtaccatacccacctgtcctcacacctacctcttccccctcctttgcctgcattaccagttctcagcttccaggcctggaattacttcaagaatcatgcagctatctctccaaccactcattttacagagagggaacccgaggtgcagagcagggatagtcagcgctctgaggtctcaaaagtcaactagatatggattacgtaggcctctgtggattcccgtgggaatccagccgctgagtgtgaaactgtttttatgggaccataactaggatacaagaaggcatccaggtggagccagagtgttagggcccagctagtgcctggggtcacaagaccaacactgccaagtccttaccttctttgaggactccataggctttaaagaacttcaacacagggtcattgctgaatttttccaggcccacagctgcagcctgctgcacatggtggaagtacttttcctggctatagtaaatgatcccagcctgtatgaaggaagacataactgcaatagcccagtcccttctctgtctctgttctgtcccagatgggatgagacctgctcccttccctatcccctgctcctcctcagttctgcaaagggaagagaaagaggaaacattcaggcctcatcctgtcctctaacagccctgggagcagctccatgcagttttcccaggaaagagtttggaggtgtttgtttgggggattaccaacagattctggttcaactatgatggggaattcaaccaaggctttgtcttaggaagggaataaggggggaaaaatgaggacaaataataagaaaaattatacgaattgtagttacaagttattgtgggcttcatatccactatcctgtgcatggtcctctcagtatctttcacagctaaggaagcttaagcccatggaaactacagcttgacaaaggggctgagattttaaagttaagtttcacttcctctaaggtttgtgggtgctaggttgggagcagatgtggttggactgtaaacatcctcatgggccatatgaaagagcccagacaccatcctaagggtaacagaaagcagaatggttttaaggcgagggatgttttcagatgtacatttttgcaacaaccactctggctgcttttgcatgtggggggtgtgtgccgtggtggcagcagggactactgatgctgaaaagagccacagcagagaaaccagatgggagggaggctgttgcaggctctcaggggggagagatggtgctggttctgggctagaagataaaaagataaaaagaaaacccaggagacatcaaggagctggcatttcttgtagacaggattagaagatgagtatagggaagaggtatgagttaaggctaggagattaaatggtgaagccatcaactggggtgggaggcgcaggcgagagtgagctgggtggaagaagggatgatgacaagaagggataatgatagtgattggatgagctggtttggggtagctcaagaaacggggatgctaatttggggctcagggtgcgcagaagccaccggagaagacgcccttgccagggggagtggggcaagaaaaggcaggaccgcctgatataactgaggacagcgaagggtggcaggagagtagcagggcagacggtctctgggtcaggggcggggagtcacgagggagccctcggacagcgcccgggccacgcaccataagggaggagtcattgctgctcatctcgggccgctcgcggctccgagtccgggtctggtggggcggtgcagagcgggattcccgaggcagggtcgtgggcactctatcgcggcgggcggttgaaggcgttacagtccttggaaaccgagctgctagccggttgctaggagcgtccagtgtctggagtgggaggaacaaaacgcctcacgtcacaaggcgcaggaatcgagcgccgagagagcgagtcggtgctactggcgtcgggtcggtccgggtaggcgcagcgggactggacctgggtgccgagcggagccgctgccatgggcctgggcgtcagcgctgagcagcccgcaggcggcgccgagggcttccacctccacggggtgagttgccgccgcggcgccggtgaccttggcgaggcgcccgcaaccccgcgcccgggcgtccggtcgccggctggctggcgactgcggcggggtcccggcccgagtgtttccgcctgggtggcgggaggtgccccctgcccggtgggagcctcctgggagaggcggcctcgcgggactcccggaccctggctagtccgcggccgcggtcgggcccagcgcccgccccaagtgccagcagtgccggaagcggagcgttttcctggtccggccgccgggaatggcgctcctcccgggtgaagaatgcaccactaccagtcgggacgcactcgtgcacttagcacacatttacgctcgcctgccgcgggccgctctccgtgctgggcctgggaagagagtcagccacgccgaggacagtcccgggggccggggttaaccgagtggacgcagctgcgggggagcccgtcggcgcgcgtcctgccagtcgtagggtcgtaagggcttccgagggtagaggaccggtgcaaaccagccacgggatagtggggagcgggagggccgggagagtgctgcagaatcctcgaggagagcgtttgcagctggggagggtcccagcctttagatgccgctacatggaggtctgggcgagcaggcttccggagagtggagacggagtggggttcctagaacggagtgtgctgtgagggtgaggagagggtcccgcagccggatggagatttgtgcctgcggtgagggaagggctataatgtaggtgagaggggctgggggtctctgaccccggagcgctgcggggaagaggcgtccctgcaccccccctttccctagtgaaaggcagctggatgcagagatgagtggagacaggcaagcttgtcggtttgtgtgttttgaaggtagggtctgttgccagctaaccacatgagagggctaaaagtttcttaacgtgaaaaccaggctggcttggagaacccagagttgacaggatttgtgcttgggaatgggctttcttatggtgagacaccaaacagcaagcgtggacagtggaatgcatccagccaggagcgtcttccaacaggtttgattaaaggcaaaggaactcaggatattggc

SEQ ID NO: 9565 - DNA, 6000 bp, Homo sapiens
gagatgctggaatggaaatgaaggtgatatattcagttgtggaaatgtacagtgtgaggtgatgtcaaacgatgttgaggcttgtggctatttggggctgaaactcagggacaaaggctaggttggagatacagctttgagaaacatcacttgtagaaactgactggaactatgtagtggataagactgcctaaggagaatgtgatagtttctcttatggcagaggaaaagaagctgcaatggagactgaggggagaaagagactagagatataggaagaggaaaaccaggagagtgggggttatggctttttttttttttttaaacagtgactgaaaaggacatacaggacagcaatgacaaatgctgttgaaaggtcaaggaaggggtgggtgcagtggctcacacctgtaatgccagcactttgggaggccgaggtaggcagatcacttgaggtcaggagtttgagaccagcctggctaacatgttgaaaccctgtctctactaaaaatacaaaaattagccaggcatggtggcacaggcctgtagtcccagctacttgggaggctgaggctggaggatcacttgaatccggcaggcagaggttgcagtaagcctcagtgccattgcactccagcctgggtgacagagcgagactctgtctcaacaacaacaacaaaagaacaaggaagaataaagactaggtctttgaggagggcattttcagtgatatggtgaaacaggtatcagaactgcaggggactgagaaataatgaaaggtgaaggtgaagcaatggagtgttcacatatagaccactttttccatgaggtttggttgtaaaggggagaggggaaagaaggtggtagctggaaggagaggagttgtctggagctaagggacatcactttgatggttgctctttcttcagtaacggaggttcctgggagagcaagcgggggagggggggttgaagagtgggagatctggggagcatgcaggatatttggaagttgattttgggggagagctggagagagagctgccttggcaaataggagcgctgaaaggtgttgaggacctagttgaagttgacaatgtatgtagcactgatctgtgtggttgtgagattttgtccagcagcacttagagccaagaagcagattcagagaagacagaaggttggattcttccaggattgtagtgctgccagatgggtgttactatccttctagttatgccagaaagataactgtgcaaggaatataagtatattgggaagaatgtgatggaggtgataaaccctgaactctcagctgatggggaaggaaatgaagactcgatggagcttataaataaaacaaagtagagggacaaatgaactggaagtttctgcaggctagagaaaccatgaaaggaattcagagaatagcagaaggacagatgaaagatcaggtgtctgcatttataacttcagaggtggagctcttctgtggtccagggtgttaccctaggagtggaggactgaagaggactggaagagaaagactctggagttgactgtgaacctggagccaaagtgaacaatgattggagatgagagctaggactttaggtactacatctcacccctgttgtccaatctaccatggtgcctgaaccacaccagttgcaccagtcagagagtgtaaggtcctgttctaaagcactcgcaccacaagttttgagagcccaattccccatatttgtttgtttgttttgttttgttttgtttgttttttgagatggagtttcgctcttgtaggtcaggctggagtgcaatggtgcgatctcggcttactgcagcctcctcctcccaggttcaagtgattctcctgcctcagcctcccaagtagctgggatcacagatgtccaccatcacgcccggctaatttttgtaatttttcaatagagacggggttttgccatgttggacaggctggtccctgacctcgtgatccacccaccttggcctcccaaagtgctgggattataggtgtgagccaccacacctggccccaattccccatatttgaagagcacttatgctacagggttttcaattgcctttaccaaccctgaatctcctggtttttctccttctttgtgcctgttatgacctaccctcattatcagagactcattgtgggaggggactacacaagggtataaatcccaggaggtggtgaaccctggaggctatcttagactgtatcacaattctcttcagttttcattttgtaatttttctctggctatgtaagccccacttcgatttccgcccatatgatgctgactttcaaaagtctatgtcccggctaggcgtggtggctcacgcctgtaatcccagcacttagggaggccaaggcgggcagatcacttgaggccaggatttcgagaccaaactggccaatatggtgaaacccccatctctactaaaaatacaaaaattagctgggcgtgttggcagatgcttgtaatcccagctacttgggaggctgaggcagaagaatcacttgagcctgggaggcgcaggttgcagtgggccgagattgtgccactaaactccaacctaggccacagagtgagactcagcctcaaaaaaagtctgtgttcagcccagacctctacattgacctgcaacctgtatatgcacctgctgtgttgacatctgtattagtcaaggttctccagagagagagaaccaatgtgatatctatatatctacaatatagatctatatctatagatatatgggaggggatttattaggggaactggctcacatagttatggaggctgagaagtcccacaatagaccatctacaagctggagaaccagggaggctggtagactgcttcagttcaagactaccctgtcttagacttggcctcagaaccagggaagctgaatggtgtatctcccagtccaaggcccaagccgggagaacctggggaaccactggtacaagtcttggagtccaaaggctcaatacttgctaaatgaataaatggacggactctactacctaatctcctagagttaggagattaggggaacggggaattctgatgccaagggcagaagaggggtgtcccaactccagagtagagaatttgcctttcctctgcctttttgttctattatgtggtgcctgcgcatattagatgaggacagatcttccttactcagtccattgacttaaatgccaatatcttctgggaacaccctcatagacatacccagaagtaatgttcccccagctacctgagtatcccttaacctagtcaggttgacatctaaaactaatcatcgcaaaatcctaaccaagtctcaaaggtgcctcaaattcaacttgtctaagatggagctcaagatcaatcttatctcctcttccagtgttctccatatctgtgaatccctgcaccatccatccatttatccaaggctgaacagtggcatcatccttgaagctgcttcatcgccccttcacatccaactcatcaccaagtcctattgattttgctcctacatttctctgcagccttcttagatctctttttcttcactctcaccctagtccacactccagctccattctctcttgcccagatgactgcactggctcccaggccagtcccaccatagctctgttgagacttctccattttgatctgcactttagcagccaaagtgagttttataaaatgcaattttgaccagtgttctatggtcctaaactttccactatggtccataaaatcctacatggtcctgccccttctattcgctctagtggatctcactccactcctttattctctaaactctgagtttcttttctttttgtggtaaaatgtacataaccatttttaagtgtgcagatctgtggcatttggtacattcacattgttgtgtgatcatcactactatccatttccagaactgtttcatcttctccagctgaaattctgtacctattaagcactaactttccatttccccctttctgggtttcttttcatccctcaaaggagctctgctgccttccacagagttcttatatacatgctaatctctccatctgaaacacacttcctctcccctttgcctagttagcctcctgtgattcccaacaccagcctagaagcttctgtaaattctcccaaaacccctgctcctccctgaagagcagtttgtatttatacaggtgtttgattgtttgaagggtgctctcaccctgcctcctctcttaacatagtttttcgtgtcaggaattcctcgctttgtccacaacccctggcacatagcaggtgctcaatacttgctaaatgaataaatggacggactctgctacctacctaatctccttccagccagtcatccatctgtgggtgcctcggtccccagcttggggtgtgtccccctgggtcggactttggcgccccatccaggctggcagtaggttgtgctctttggtttgcctatctcgggcctcccgcccagccgcgcggaccgcagaacatacgccccgggcgttatcactctgtcacgcggagcctccccgcctccagacgtcagtccggttgctaccccggcaggaatcgagcttagatcacgaaggctccttctcacctccggacgtgagaattacaggcttggatctcaaaccgccgcggtgagagccgggaggtgggaagaaagttgggaggcgcgcgcccccgtcacactccctctccgtttgggtcgcagccctttaagaaccactacgttcgcgccttcgccgggacgggggctgtggaggcgcgccgggattggtcggtttgggtgcgggtgtcgcttagcagcagcgaatgcggggtaggggggaggtggggtggctcaagactcgcgcacgcgcaccacggcctacctgcgcctgggctgccggtgacctgggccgagccctcccggtcggctaagattgctgaggaggcggcgggtagctggcaggcgccgacttccgaaggccgccgtccgggcgaggtgagggctggcgggcggaggcgggtgccgcggcccgttagccaagagcaggcgggttagggtgtggcgcagggcgggcccagaggtggaggcggcccagggcccacccggccctcagtcccggccttgaccatggggctccccacggggcttcactgggcttcttggagtcctctgtcccctttctcccgtcagcctgttcccggaccccggggccacccaaggcacgcgcctgcaggaaccctgggctgacagatgggcgccaagggcttctcccagttggaagagatggggagtgagaaaggggacgattgtttctttaaccattcacgaagctcacgtcagagcattgtttaatctgaatagcaaacttcccttagcatgcccgtgttattagactttaaatattggatacactgaaccaacttttcagagcactaggtgtaggacgttccattacaggttttgtgttcattacagatttacacatgtacctccagagccagaaggataaagcactcggggaaaaattaggtttgtagaaataaaagccacggaagactattgccagtgtgaaaagtaattggtgaaatttgtgacatggtcagaaaaaaatacagctcagaaccaacatatagggtaatatttaattacattttgcagagaagagttgatcccactaaagataattttagtaaaatgaaaaatggaagcaactggaaatggtttaacgttgccagatagaattaaataaacaaatagtgtttcctctggaaagtacattttggacaatgttaatagctctgatttaagtgtttgcatttgcaacagaagccatcttggagtcagtgttttttattcttagaataacttagaaatcaactaaattcaaaaagtaacatgatcatagagaggacaacctgacttcaaggtaata

SEQ ID NO: 9566 - DNA, 6000 bp, Homo sapiens
tcaaagtcctaacccgcacagagcctgccggttctgcaccctgtggagattcttcccccttctccgagtgccctgggctcattggccccagggtggatatgctctcggtaccttgggaccaccctgctgcatcccctgaccagcacccctcttcggccgctagcacctccaccacacacaacacacattgactgggtcttgtggtcctccaggcctccgctgaatcagtgtggcccaatcagtgtggccttcctgactgccacctcccttcatgctctgctcttctttgcagcatttgtcacaattacagccataccgcgaagatattgcgggttgggtttcaaacctccatagtaaaatgagtcgcacgaattttgtttccggggaatataaaaattatgtttagactatacaccattaagtgtgcaaaagcattatatctaaaatacatatatataccttaatttttaaaaaaaactttattgctaaaaaatgctaatgatcatctgagccttcagtgattcctgtcttcaccctggactgatcagggtggtggttgctgagggctggggtggctgtgacaatttcttaaaataagacaacaatcaaggttgccgcaccagttgactcttccttttaggaaagatttctctgtagcatggaatgctgtttgatagcattttacccacaatagaactttttttcaaaattggagtcaatgctctcaaactctactgctgctttactaactttatgtaatattctaaattctttattgtcatttcaacagtgttcccagcatcctcgccaggattagtttccatctcaagaaaccactttcttagctcatccgtaagaagttactcctcatccattcaagttcaatcaggcgattgcagcaattcagtcacatcctctggcactacttctaattctaattctctatttccacccatctgcagcgacttcctccactgaagccttgaacccctcaaagtcattcatgagggttggaatcaacttctttcaaactcttgttcatgttgatatgttaacctcctcccatgaatcacaattgttcttagtggctctaaaatggtgagttctttccataaggttttcaatttactttgcccagatccattagaggaatcgccatctacagcagctatagccttacgaaatgtatttctgaatactaagactgaaaagttgaaattactccttgatccatgggttgcagaatggatgttgtgttagcaggcatgaaaacaacattcatctcttcgaacatcttcctcagagatctcaggtgcattgttaatgagtagtaatacattgaaaagaatcttttttgtgagcagtaagtctcagcagtgggcctaagtaaaccatgctgcaaacagatgagctgccatccaggctttgttttgtttgttttgagacagggtctcactctgtcgtccaggctgaagtacagtgacatgatcttggctcactgcagcctcaacctcccaggctcaggtgatcctcccacctcagcctcccaagtagctgggaccacaggcatgcaccaccatacctggctaatttttgtagagacagggtttcaccatgttacccaggctgggctccaagctctgggctcaagcaatccacttgccttagccttcaaaattgctgggattgcaggcgcgagccaccacacctagccttgctacttatagagtacaggcagagtagatttagcataattctgaagggccctaggattttcagaatggtcgtgagctttggcttcaactgaaagtcaccagctaccttagctcctaaaaagagagtcatcctacccttagaggctttgaagcagggcattgactttgctctaggaaagtccttagatggtctcttcttccaatataaggccgtttcatctacattaaaaatctgttgcttagtgtagccatcttcatcaattatcttagctacatcttttagataacttgctgcaacttcttcatcaacacttgctgcttcacgttgcacttctatgttatagagatggcttctttccttaaacctaatgaaccaacctatgctaccttcaaacttttctccaactgcttcctcatcactttcagccttcatagaattgaagagagttaaaacattgctctggattaggctttggctaagggaatgttgtagctggtttgatctatgcaggccactaaaactttcttcatatcagcaataaagctgtttttcttattattcatgtattcactagagtagcacttctaatttccttcaagaaattttttcttttgcatttacaacttggataactgtgtagtgcaacaaacctagattgcagcctatcttggccttcctcactaagcttaatcatttctggcttgtgatttaaagtgaaatttaaagtgatttaaagcgcagctcttccttacacttgaacacttagatgccattgtagggttattaattggcctaatttcaaaatagctgtgtcttgggaaacaggaaagcccaaggagagatagaaagaggggagaacagctggtcagtggaacagtcagaatacacacaacatttaccaattaagtttgcatcatatatgggcccagttcatggtgccccaaaacaattacagtactaacatatcacagatcgccataacagctgtaatgataataatgaaaaaatttgaaatattgtgagaattacaaaatgtgacacagagacacaaagttagcacacactgttggaaaaatggtgccaatagttttcctcaatgcagggttgccacaaaccttcaatttgtaaaaaacatagtatctgtgaagtgcaataaagcaaagcacattaaatgagaaatatgtgtataattactttgggcagtgatttaatatctttctccctccattagaccataaactgcaagagagcagggactgtgtctatctcattcatgattataatcccagatcgtagcaacatttctgccagtaagtgcccaataaatatctagtgaatggatagatggggcttctccaaggaaggagggaatgaatagatgagtgtgggttaatgaatgaggtaagaatgaatgtgaaataatggttcatccattaaaaactaggggacacggttcagttcattggatttggcccagtttcagaccgaattctaaggttgaggagagttgatgatgccaagtactgtggtggtcctgaacaattaaagagggattctgggaagcagagtgtggacagttccaactccctgccaaggggaagctcataggcaaaggaagctcactccagaggggatatggaagttccataccctcttttgtctgaagagccgaagtccctgttctcaggtcgttaggaagttaaaaagtaatttggaggttatcagaactgattgaattgagtttgaacctcacctatagcaacaatgggccaggctgcttgactaatgccttggcgtcaatggtacagttttctccctcttgagctgctggcagggacctgggctgacatgtctcagaaggcccttagtcaatgattagcttatctcaaggccccaagccagggcagctgtcaaagagggtccccactgcgttctgcacctagatcctcattgtgaaatgaagtatgaagtgattgagtgaggtctctattgtctctgacattttacaattccaggattctgccttcttgtcagagaagtgtataggcaagcagttgggcaggtgagagggctccgggtgagaggctcagagactgagggctcagcctctgcttgaagagtcatcatctgggaggctctgtggcctcctcagatgagttcattcacactcataccccaagatggagtcaacaccccctccaccatctcagccttctcagcatctaaagccccagcatcaatgcctctttttttgggttaggggtcagagctgttgtggaagggcatacagtcattcttcacttgcctttgactgtgtactctgtgcacatggaggtaggagcagacatgacttcaacaaggtcatgcccccttggcaagcatctttgagaccagagaggaagacagactagggaaagaatgaggagataagcacgggctgctgtgaggtccaggggagcaggcaaaggtaagagaaaaggctttaggatactaactaacatatatggagcactagcatgagccaggcactattctaagtgcttttcaggtgttatctctttttgcctcacaacagcacctacaaggcactgtaattatccctacttcacagatgagggagtggagccacagtgaggttaacttacttgaccaagggggccaagtaggaatggaggcatttgttgagtcttctaaagatgaggaaagagtggaagtgagattttgtaagtgcttgattcatttctaccaactgaactggcaaataaataaaagcatgagtaaatgggggtataaatagtctgtcagctatgggggtgggagtgggctcaaggcaggcttagagagaaggtgcaagagctgtctgaaaaggtcagagcaaagcatgaagctggtgagcagctgtgaccatagctggaagcttctctctgagctttctcctggttacctcctcctcccctacgtgaccagtcagccaagtgttaagtccaggggaacattttgctgcttccaagtactgtctcactagtgttatttgccataacttgcggccacagggcaaggtccaggtgctcagacctttacatcctggactttccaaggcctcccaaagctctctggcacccagggaacagtgtgcgtgtcgagagcttaatccgcaggagcatagccatggttctctggggtccagtgctgggagctctgctggtggtcattgctggatacctgtgcctgccagggatgctccgacaacgcaggccatgggagccccctctggacaagggtaccgtgccctggcttggccatgccatggctttccggaagaatatgtttgaatttctgaagcgcatgaggaccaagcatggggatgtgttcacagtgcagctagggggccagtacttcaccttcgtcatggaccccctctcctttggctccatcctcaaggacacacagagaaaactagactttgggcaatatgcaaaaaaactggtgctgaaggtatttggataccgttcagtgcaaggggaccatgagatgatacactcagccagcaccaagcatctgaggggggatggcttgaaggatcttaatgagaccatgctggacagcctgtcctttgtaatgctgacgtccaaaggctggagtctggatgccagttgctggcatgaggacagcctctttcgcttctgctattacatcttgttcacagctggctacctgagcttgttcggctacacgaaggacaaggagcaggacctgctacaggcaggagagttattcatggagttccgcaagtttgaccttcttttcccaaggtttgtctactccctgctgtggccccgggagtggctagaagtgggccgactccagcgtctctttcacaagatgctctccgtgagccacagccaggagaaggagggcatcagcaactggctgggcaacatgcttcagtttctgagggagcagggggtaccctcagctatgcaggacaagttcaacttcatgatgctctgggcctcccaggggaacacggggcctacctctttctgggccctcttgtacctcctgaagcacccagaagctattcgggctgtgagggaggaagctacccaggtcctgggtgaggccaggctggagaccaagcagtcctttgccttcaaactcggtgccctgcaacacaccccagttctagacagcgtggtggaggagacgctgcggctgagggctgcacccaccctcctcaggttggttcatgaagactataccctgaagatgtccagtgggcag

SEQ ID NO: 9567 - DNA, 6000 bp, Homo sapiens
tctgtattttgtaggtgagtaaaatgcacttcaaggcttcagaatccctgggctaagagggaggttagcaatggcttctcatggatgaggaaaacacacatctagcccagtaagccagaaaagaggataaatcctagattctaaaaattctgaagtctgctccaagttctgcatggtatgggcagagtaaatcgtttatgatactagtaagacaaaagctatacaaagaaatgcaatatagggttctaaaggaacttatactcaatgtgggaaaaatgcaaccaaaacaatacagcagtatatgccatatactatttaagctctagaaaaactggggagtgggaggtgtcaattagaactttctctttcccttccagtttccccacaagcttttagagaaagggggaaagaaaaggaggtagaggaagcaaagattctctcctgccttgatctctggatccctactgaggaaatggaagaaatgactttcactgcagcaggaaggtggcctcagagtcaagtatgggctttgcaatcagacaggtctggatttaaatcccagtgccaccactcaattactgtgtcaccttgacaagcgactcaacctgcccgagctcagttcctcatctatagagataacatttaccttcagaactgttgtaaatattcaatgaaataaaaattataatatgtacctaataagaatgggatatagccttcaaagactgaaagagaacctaacagaaaccaatcaaattatttatcaaaataccgatttaatccacctttttgattctctgttctcccctgggagaggggatctgttcaccaggttgactcaaattgtatcacctagactccctttgctggcttctggttgggtttgtccagtggaagataccagatcagagggtgcccctcacccccaatctagtggccacatttctgatagtgcctgcatctatcgaagactatgacttatgttgggcagcccttcctccacagttccagctatcactgaaatgtggtaatactgtttcctcccctggcccctttggaataggggcagtagccactcccagtagttgtcttggggctcctcaacatctcttattggttccctgaaaccccccccatactgctctagagtcccatcataaaagtctcctgaactacctgaagagggttccattttctgccaataactaaaatgatccaccctcccttctcacaaactgacttctcccaagtgtgacacatcctctagtggccatgtttgagcctaattattctgtccatcctttccctcaaccccctaaaagaactagagtttctttctcttggaaacatgagttcagaactgaacgagaaggaatggtctcttttacagaggaactgggaaggaaccacattttttctaccactggcccaagaaatagaaaaccaatctgtagggagacaaaaacaaagcaaagagggggaaaaaaaaaaccagcagagattaggattcctggagaaacacttgcagccttgtaatccatactgttttgcttgagccgatgtgttggttaccattactagcaactgaatcctcaacacatcgtgaggttaatttcaactgcttctaactatcaccaaaacaagatgaaatattccctgaaatagtaaaagaaccaaaggctgaagggaaagtgacatcagaagctgaaatggacgttactggaccaaaggtgaaaagtaaaacacaaaatgactaggactatacaagcaacaggagttcaggcaggcactgcttaaggtgcactgccggcactctataaccaacgcaacaaaagtttaggagatttcagaactgaatcagttgagattccatggtaggctcattcacctgcatcctgacctttatttggatggtgtaaattgtgttttgctcctctatacatatggcatattttgggccaacattaataagcccttatgaagacgttgatttgaagcccattactctgcatggctctgtgatacacagagctgagcatttaccaacaactgtgcccaaatatgtccatggtactggtgagagggaggtttaatttaaaaaataaaaacaccatccaactcattccccctttaaagcttacatcacccattcaatgctactaagaacctaccaagtgctagacactggctatgccttaagggtcccccatacagacaagtcaacaggctattgccttccaagatccatgatgagcgaatgactgaacctctaagacctctaggatcgtgcttctggccacctctgcaagctgatcttccaccatttcccccagcccaccccttgggctccacatgtcctccacctgaggatttacagactcaccaccccttccttctggaacactggtgcctacttaattctcagtcatgctgagaactcagttcaaatgctatttccttagggaagcctcctctgacctcccagtctagatcgtgtccgttttttccttcatagcattcagtacaattttatatataaacactcaagtacatttatagtttctgcatcttccttctagcatgagagctatataaggacaggttccttcctagcccctgagtctagctcagttctgtgttgaatgaatgaatactgagtcctgaagatacagaggaggaatccttgacatggatttaggggagcaattccacctccttagggaagccttcagagcattacaagtccctggaattctttttatttattaaaaaaaaattatttctttagagatgggctctcactgtgttgcccaagctggtctcaaactcctaggctcaagcaatcctcccatctcagcctttcaaagtgctgggattacaggcgtgagccacaatgcccggcccctggtatactttaacttcaacctccactaactataccacttccttggcatagatcttacattacctttgtttttattttattcacttttactctctgtttgtctccctcctatctttcatttatttcacaaccatgttttggcatccctgctgtttcccacataacatgccaggagctagatatatgttggtaaataaaattaactaatgaccatggtgggactctgctgctggatagctaatgaactgccgtgggaattaagggtgctggggagaaagctctaaccttgaggttacagatatatccatgcctcagtgccactttcagggatgaaatgttgagagaaaataggacacatgacagagtcactacatcatggtaagctccggtaacaaagaagaccaaaggtttttaaatttagaggaaaacggttatccgtaatgtgtccctaaaaaaatactttgaggataaaaatcacctgaacaaagtgtatacaaaaatatagcagggaaagacatatctaactgcttttgggcatttttatgccccctcacacacaaataacatacatgttaccctgtaatacacacatatgtcccactgttgttaatcctgaattataactaaaatatgcaactgtgagttctgactttattatccaggcataatatgctaaatattggcatttcttcatatataaagggcccagaagataacggcaggtcacgatttttaaatggacatgtccttaactcacgttgtgggacttcaatgatagctggccgcttcaatccgatggctacatcacgggaccactgactttgcagttggtactgacagaggaaaggcatgaggaaaagaggtaggagctgtcgccagaactctgccaaggatgggatgaagaactctgataggaggaccacaccgtaggttaacaagtggagacacagccggaggaggatacagggtagctcgttaccaggtccaacatttttcaaccctcgttctggagtggtcataaccagggatttaatatagaacacagaggacattaggttatagctgcctagggatcttagttcttcattggcaaaatggaaacagcacttaggctatcggctgcctagccgctttttttttgagactcggctcactgcaacctccgcctcccgggttcaagcgattctcctgcctcagtctcccgagtagctgggactacaggcgtgcgccaccacgcccagctaaatttttttgtatttttagcagagacggggtttcaccatgttggtcaggacggtctcttgacctcgtgatccgcccgcctcggcctcccaaagtgctgggattacaggcgtcctagccgctttttaaaaacccttccccctttatttgtacggcaatttgtattttcaaagtgcgttcacctcgcatgcgccctcctaaccacgaggtgaggaaaagcaggccagaagcccacctccaaactcccatttcctcgaagagaaaactgaggctcggacaagatctgtgcgcgaacgccgaatggatggccctggggccgatgctctctcactaagaaaaggcctccgagactgcccaagcttcctgcccgggttcggaatcttatagacccgcaaaactgcaaatgcgctaacagtcctaaaaacgtccacgttgccagctctgaattgcaaacgccggcagcagaaccgtttaatcacaaggtaaacggagagtcgccgcagctcggctgcctcctcactggcaaacccagggcaggccgcgacccgcagggccaggctgaacccggcggccgacccaacgccgctgctgtagctacctggacgccatgcacgatgtacaccttctccgcctcgctcagcgtcacggacgccatgctgccgagctgccccacgagccgcacgtcatctgcgcgcgtcccctcctctggaccgcgcccccacgtcccacccccccccgccccgcgtcagcgcgtcatcaacctgcgcggcggccgctcctgcagccgcggccgccgccactgccgggagagctcgatgggcttctcctgcgcgccgcccggtgtctggccgagtccagagagccgcggcgcctcgttccgaggagccatcgccgaagcccgaggccgggtcccgggttggggactgcaggggaaggcagcggcggcggcggcgggagccccaccggggtctgggactggggaactgcctccggcttcacggtcagttgggaagggaaactggggtaggggtgaagaagctggggtgaggcgagcctcacgggccgggggactcccagtgggagaggcgtgcggcgtagttgctcagagctggagttgacttaggagcgtgtgtgtgtgtgtgtgtgtgtgtgtgtgtgtgagagagagagagagagagagagagaccccgactaaggaggggcggacgtcgtgattggcccgggggtgctgtttccctgctcttctcccctccatttctctagtccctaggatggctggagaggcgatgcagccctccctaggtagttcttggtgggaagggtccgggaatgggggacactagtcctaaggcgtccccacccctccacccaggaatatctctcgctggctcgctcactctctgtgaccgaacgctgtcccattaccttgctgggacctcttgcctcgggtgcttaccagagcgttgtcccacagacgggggaggaggcgcttggtaaccggcactggcgaggtgcgcagtgcccggacgtccccaacgcttcctagcgggaactggaaaccccggcttgatggaagtgattactgggagctgtgagcagttgcccgaaaaaaagccaaccccaaccccttgcgatggccgagtgggagtatgggcattggatacccggagaggatatctgcaaggtgaagctggggtcaccaaaggaactcattaaggcggggctgacaaagtatggtgcaagttttaaaggagccgtgtggataaatgggagaaagttaacccaaattagttgaagcaaggagggcaggttaaagcaattctgatgactttcctgatgttccatttttgagg

SEQ ID NO: 9568 - DNA, 6000 bp, Homo sapiens
agtggctcatgcctgtaatcccagcactttaagaggctgaggctggagcattgcttgagcccaggagttcaagaccagcatggacaacatagtgagacctcatctctaaaaaaattaatgtgttaaaatttaaattttaaaaagaggtaataaatcatctgggtcaagagaaaggacaggatttttctgggttgagaaagcagaggtgctcttggctgagagacatcccagaagtataaaaatgcacattccggaaagtgaaaagtttagcttctcctggagcctaggtgtgcaagagttaaattcctcagggcccaattttaaaaatcctcaaaactttacagaccaggctaaggagtttggactttatcttgtggtgactgggagccactgagggtggttaagtaacaatggcatcactaggatgagcaaattattgaaagtggcatgaacttcatggtcggcagggtaatcaggaaccctggcacgggcccaggagcccacacccatacaactgagtcagggccctccccagtgtctccaccccttccggaaatcagataactaaggcatgctagccttctatcctgcaggtaagtctgtcctgagtgacatggggcacagtgagaccggtccacaggcagtgtcttgcatactagcagtggaggccccaaggagcactcagagtggggctcagctaagctgaaaaccccattgccatggggcaccagacaccactgagctgaactcactccccttgtccctgccatgcagaagtgatttccctagccccaatccccctgctgaatgccaaagccagctgccacacactcttgagagccaactggtaaattttctagaattctgtgggctggttgttaaacatggccactaagaattaaactacataagctagcaattgaataagttatttaaaacagaggtaataaatacacaaaacttggcacttcctaattattgactgtactattatctatgcctgttggatctggatagtggagactcagtacaatggtgtgctactgcatgtctccacgtttagtgacatcactttggtagcttagaatcagtcatagtaaggccaggtgaggtggctcatgcctgtaatcccagcactttgggaggccaaggcgggtggatcacgtgaggtcaggagttcaagaccaggctggccaacatggtgaaaccccatctctaccaaaaatacaaaaattagccgggcgtggtggtgggcacctgtaatctcagctactcaggaggccgaggcaggagaattgcttgaacacgggaggcggaggttgcagtgagccaagattgtgacactgcactccagcctgggcattgcagcaaaacactgtcaaaaaaaaaaaaaaaaaaaaaaaaagtcatagtaaaagtgtttacaccacagaaattggcaaatgtgacaaatcagagctttttctgcagagagccagtggttacatacctgccagcctaccactcctctccaccctctgtcttgctggctctctgcggaagccccccaacccttccaggcctgtcctctccactctatgagtcccagcagcacaactggccttgtcagatgagagctgtcacataggcttcagaaagtcatggggaccctaccaggagccctgattatctgccccattgcatttacttactgctctttggggttatctgggtgattcttcgtgctgcccaaagctaccacacagggtctcacatactggatgggctcccagggagtatagcagtatgaatggaaggaggtgctggcctgatctcagaggtagggaattaaagagaggccttgcctccatcaaaccaacaaggtcccagcagcctcatggtccaggtgaggcatctctccaaagtgcccagttcctgaaggtcactgcatagccaggtaccctctaggaataactcatatatgagaacaagaacatgcaagcagatagctggaggcagcaacaagccttctgcctaaacaatgcaaaaccactttaaaaaggcagccccgtcgaattggagcccagggaaccagcacaagaaaatgctggcactccgtctgctgccattgctgtgaggagtcctttgtagggggagggcgggtagccctatctatggatggctgagactcattttgcctgagtcttatatattctcaggaatatcttcacagccttggagttgataaaggagtgctttcttaaacaggacataagaaaaaccaccaaaggaggacactaaaggaaaagattgggaaattggactttgttaaagttaaaaatatctcttcattagaagacaccactgacagaataaaaggcaacacagactgagaaaagcaatttgtaatacactaaactggcataggacccaaatccagaatacataaagaactacaaatcggtaggaaaaaatcagacaacccaattaaaaactgacaaaaaatttgaacaggcacttcatgaaaaaagatacctagatggcccaattagcctatggaatggtatgcagccttactggtcatgagggaagttaaaataaggcacaatgggccaggcgtggtggctcacgcctgtaatcccagtactttgggaggctgaggcgggcagatcacaaggtcaggagattgagaccatcctggctaacacggtgaaaccccgtctctaataaaaatacaaaaacaaaattagctgggcatagtgatgggtgcctgtagtcccagctactcgggaggctgaggcaggagaatggcgcgaaccccagaggtggcacttgcagtgagccgagatcgcgccactgtgctccagcctgggcgacacagtgagacgccgtctcaaaaaaaaaaaaaaaggcacaatgaactatcactatacacctacaagactgggcagacctttagaaatagaatgacaagtgttaggatgcaaagcaaaagcaactgaaacccaaagggagtgtcagcttgtactaccacactctggaaaacagtctgacaatatctgctaaagccaaacacacctatcctaaggccaagaagttcccagcagtgagtgcattcatctacggaagaacgtgcactagaatgtgcattgcagccctattcatgacagccccaaactggagacaacacagacatctgtcagtagtagactggagcatactcacaccaccgacaagtatactgcagtgagagagaatgacccacagctacacaacacactagaacatgaatgaaccccacaaacaacggaaagcaaatgaagccaggcacagaaaaagtacatcccatttaattccattttcatcaaggtcaaaactaacccatggggttagacaccaggatggtaggttcctttggggaggaggcaatgggtaggaaaaaacatttatctagaatctgaagtttaaaaaaattaaagtagtttctcctgctgtgctgccttttttttctgctttgctttttcgaggtaggaagttccaggacaggtaatatgtctgaggaagcctccacctccctcaccctactcacccttctcctctgggaccagacaggcaggaactccagggaaagcccaacaaggagctgtcctagagcactgatttcattttggcttcaagtaagattttcactagcaactctgcttttcatctcttttaaattttattattattatttagcattttcttatctgttacaatgtattaggcactgttcaaagcgtggcattagtattaatatgttacccattcattcattcagcctgctggagacttggtaatggcctctttattgagaacttactctgtgccaggtagtaagctaagttcccaattaatcctcacatgagctcttccttgccaggcaggagagaggggaagatatctgttagcattacagaggagtacacagagactcagagaagtcaagtgccttgtccaaggtcacacagctaagtcagtagcagagttggtatacaaacccagattccacattactgcaaagcaccaagctctgtcttatctagtgaccaccctcaagcaaatcacgttgtaagactggcagaaatacgaggtttcttagttccctaccctggcctaatgaatcaaaatttctggcccctaggctggcctgagcagtagagtcccccacagcagttcaaaacctgattccgtccccggacccagtaggcacgcagggccaagctgttgggtggacggaggggacgggactgccgggaaggtccctcacttctttctggcccctggcaaatgttatgttctctcctctgagaagccctccctaaccatccctggccaccccccgcaactgcttacccctttactttgccttaggtgtcttcctcgcgtctctcagtcttatacgtgggctaggttgaaccatatgacattgtcctttctataaattaaaaaatggttgaaaatggggcatttcatgcagtccaattcaagtgtttccctctaccagaatgtcagctccaagacggagctgggaagtggttcacagccgtgtccccagacaacgcctggcacacagtaggcgctcgataaatgacaggtgagtggccgagggaaggcgcccacttcgaggagttccgcagcctgaagaaaggccccgccgagccggaggaccccaggggactccgccctgtcctctgcaatctcgggtgccttcccggccgcgacgatcgggcggggtggggctcgccgtcatccatttaccagcctcgcctctcggacgggcgcgccgttaatgagattagcaatttaaaaaccagctagctgcgtcggcggcggaggcgcggggccacccccaagccgagccggggtgggacggcgcgcctggcgaccgcgcactgagactgccgtgccggacccccgagccggagccgagcgcgccgaggccggggccatggagaaagcgcggccgctgtgggccaactcgctacagttcgtgttcgcctgcatctcgtacgccgtgggcctgggcaacgtgtggcgattcccgtacctgtgccagatgtacggcggaggtgagtgcccaccgcgccccggccccagcccaactctgtgcgcgtccccgccgtgtgtgcgagccggggttagacccaagttacagaacggcacactgaggccgggaaagcgagcgtgatttgtccgaagttacagacccgggagtgttcccaggacacctcgttccggagccggagctctctcccaagccgccctcccaagccctcgggaacccctcgccccatcccgggggcggccaagcccccaaccctcacccttgttggccaggctgcggctctgagagcgcaggggacgcggtctccttcttcgagagaagtgtcaatggtctgacgtcttagtgagtaaaccttacgtttaggtgtaaaaagtgagtaggaaattgtcttattcaacagaaactcgttatacaactttcagatccgaaacttaaatcaacggtttgaaactcaggttaagagaatcttgagccatttctttaaattttttataaggagattggtttgagtttggaacgacagaaagcaggaaatgcaaatcattctgttttgttttgtttttcttaaataaatgtttcctccgaagcatcatgcacgctccggggacagccagccagccacgcgctcttaccgcactcccctagcgttgcggaaagctgggaacaccttctacacatgtctataacctcgtgaagcccaagtacctttttggaaggcaatgtggcaagagggatttaagtctcagcatctaaaacactttttttctcggttgtctcgtttctagaattgtatctaaaggaaattgtcagagttctgacagaggtagaaggatggtcaccatcatttaataagagcaaaacattggcaacttcctaagccctcaaataaaggggattggttcagtaaattatag

SEQ ID NO: 9569 - DNA, 6000 bp, Homo sapiens
tgaagtggcaagggctgtgtgagcaagtgtggggtccagcattgcatagtgagacatgccagctatgctgtggggtgggcagctccaggtgccagcctggatgctggctctctgtgaagctatggctggaccagatgcaccacaagcagcttcccctgctagcgtaagggaatgcagtggtacacggagacttagagatgctaggaaccacaaggccccaaagaggaagtcacggtcctagcttggggagcaccccaggtctgggatccccaaaggaccacagcttttctctcctcttcgcccatatggcaagcagggggcatgtttcagcactgtttgtgttacagttcttttagcgtcaccatttggtgggtccaaagttcttgtcctgcaaaccagaagaatgaagtatgcagagaagtgcagcatgaacaagatgaagagctttatcaagcaatagaacagctcagagaagactcacagtgcatagctcctttctgcagccagggtgtcccaatgagtgttcagctcctaccagagaggagatgctggagtgggaagctcctctctgcaggcaggttatcccattgtctctgcggctctcagcagagaggaggccctagagtgggtagcctctcttagacaggtcatcccattgtctcttcatcatctctccatcctcttcccaaatctggctgagtccagggtttttatgggcagcagaggggagaaagtccatgggtggccatgggccagaacaaggaaaggcaccaaaaggtccccctgtggttcgtgggactgtcagcccagccacctggcttcaggccttccccagcttgaaggtggggcttcaccagggacctggccctttctgcccaggagcttgttcaccacccaccactgtttatgggactcaggctgttcatgccaagggttgcctgcaggccaggaatgagctgccctcagcgcccccctcctcagccttcctcctgtgctcatcggtgcacaaagtccagagggggccaaggtgacagggcctagcatgtcagcactgccccaagcatgcacacatctggccaggttgcaacagcacccaagcttggccccaaccttactccaagatcagagcaggcagtgacagtggggagaagccaaacagcaggagcaggtacttccaagcctgtgggcagcgggggaccttcccaggcccccgacagtgcagagatgcctggatccatagctacagcagggtggctgtagcagtgccttggagggcggggctcctgcctgttcctagctcccaagagcacaggggtgcccaagtcacagccatggcttcagcagctgcagttgtgcctggggagttccgtgtcccaccaacttctaaggggcagggctcccatttgtccccagctcctgccggctgtgtggagcatgcagccccagccacacctcctctccgcattttccccacagtggttctgggcaaggtgcaggtggcgtggtggccctggccaaccccgcacaaatgaacctgacactcccagggctagccctgaaagtcccagctacacctttggccagatactcacaggctcccagaacacggcagggaatgagttgaggctgcggcagaggctccaggcctgagagtaggtcctgcccggccatgcaagggtaggggtggtgtgcagtaagctgcctcagggatgcagggcatggggatgcagggcacagaggtcccaccacccccactgctgctcctgcagctgctcctgccaccaccgctcatgcctccctgctgcagctggcatgatggtagcagctgctctggatggcccaccactgccattattatcatataatccaatcacactcctagttataatcgagctcaaaactatgtgtaaacaaaaacctgcattcaaatacatatcgtgtataaaatacttttttatacatagtgtatagtgcataaagtatttttcataatttcaaagaaataggattaaccaagatgtccttcaataggtgaaggaataaaaaaatctgtggtatttccatacaataaactcaagagatgcagaataagcatttaacaaaacccaacatcatttcatgataaaaacactcaacaaattagaaatagaggggaatttcctaatctgataaaaggcatgtattaaaaacccacaattaacatcatacttgtagtgaaagactagaagcttttctcctaagatcagaaacaagacaatgatgtccattgtcctctcctatttgacattgcattggtggttccagccaggacaactaaacacggtggggggaaaagtacccagattggaaaggaagaagtgaaactatttctatatgcagatgtcatgactttatagtacatagagaactgaaagaatccaccaaaaaaacaaaaacaaaaacaaaaaactattaaagctaataaataagctcaaggtacaagatcaatatataaaaatcagttgtatttttatacagtagcaatgaacaatctgaaaatgaaattaacaaaacaattccatttacaatagcataaaaatacttaggaataaatttaaccaagaatgcacaaaatctactcactgaaaaccacaaaacaatgtggaaaaaaaactaaagaagacatatgtaaatagaaggactttcagtgttcccggattggaagacccaatattgttaaaacggcaatactccccaaactgatctacaaattcgatgcaatttccatcaaaattcttttaaaatttcttgatagtgtcctttgacacacaaaagtgttgtaggttttttagcccttgcatctggctctttaatccattttgagttaatttttgtatatgatgtgaggtaagagtacaactttgtcttgtatatgactatctagttttcctggcaccatttgttaagaagaatattcttttaacactgaatggccttgtaaatggtcttgatttttgacccttgtcaaaaatcagttgacaatcccagcactttgggaggctgaggcaagcagatcacttgagcccaggagttgaagaccagcctgggaaacatggtaaaaccctgtctctataaaaattagccaggcatgttggtgtgcacctgtagtcccagctactcaggaggctgaagtaggaggatcacttaggcctgggagattgaagctgcagtgagccatgatcgcaccactacactccagacggggcaacagagtgagaacctgtctcaaaacaaacaaacaaaaaatcaattgaccatagatgtatggctttccccattgtatttcattgatctatatgtctccaatcttgaatagaagaaagaacaaagttggaggatttgtgatttcaagacttactacaaaggtaatcaaaactctatggtactgacataaggatagatgcaaagaccaatggaatataactgaaagttcagagctaagccatagctataaatccctataacctgactaggcaaggatttcttaactacaacagcaaaatcacaagcaacaaaagaaataatttataaattagatttcgtgaaagttaaaaacaggtcaggcatggtggctcaggtctataatctcagagctttgggagggcaaggcaggaggatcacttgaggccaagagtccaagattagtctgggcaatatagtgagaccctgtctctacaaaaaaattaaaataattagctggatgtggtgctgtgtacctatagtcttagctacttaggaggctgaggcgagagtatctcttgagctccagagttcaaggcaatagtgagctgatcatgccactgaattcaggcctgggtgacagagtgagggcctgcctcaaaaaaaaaaaggaaagaaaagaaaaagaagatgtaaagcatttgtgtgtcgaagggtattatgaagaattaaaaagaaacccaaggaatgagataaattatttttaaatcatatctctgataaggatctagtatccagaatgtagaaataactcttacaatttaataataaaaagactaataactcaaatttttaaaaggcaaaggttctgaatagacacttctacaaagagatacacaaatgaccaatacacatataaaaagatgctcaacatctttattcattaaggatgtggaaaaactgtctcctactgttgcagctgtttcactcctgttgtttggtgagtgggagggagtgttacagctcttttactccccccactggtgagctccaagttcttgtcccacgaccaagaaaaataaggcacacagacactggagagtgaagaaggcagagttggatttattaagccacagaaaagctctcagcaaagagaggggacccaaaagagggttgctagctaaaagtctgagtcacaggtttttacaggcttagaatgaggaaatacgtgctgattggtttatgggtaggcttggaaaaagcactactcaggaagaggtacaatagtgtaaagaaccaattgggggctgaagtgaaagcttggactgagaccttggcccaggaccaatcaggggctgaagtgacgttacactttatgcaaatgaaaatttggcgagcagctaatcacagaaagataggtatatgttaaacaggtaaaaggtaaggaccaatcgggaggaagcatgtgaaatgagacaaaggcgtgccaaggagagggatatatgttcaaaaaaggagtggaatttgttcatctggattcatggagtaggcgtttctattcaaacatgcaggctcttttctttatccagggcttgcagcttgattttcaggctgttcttggtttgaaggagttccaccaaggatccaccctaactgcctgcctgactggcttcttccttcctcctctctcactagctgtccccctctggccccctggctctctctgagactcctcccatcctcctcctccagccttctgggcaggacaggtgtttcagtttctttaagtgaaatatgaaacagagaagcaccatttctgcctcaagacgcatgtaaagaggtgtagattcaggtgagttcctttacaaacattttaaacttatgttttcctctaattgtaacagcctatatcaggagttcttaagctttgctgcacatcagaaccacctggagggctagtaaatatgctgattcctgagctacctctgaaggctcttattcctttggtatagggatttcccaagaatctgcattcttttcagaaaagctgatctgggctgggcgcagtggctcatgcctgtaattccagcactttgggaggccaaggctggcagattgcttaagtccaggagttccggattggcctggcagatttcttgagtccaggagttccttacctaacatgatgagaccctatctctgcaaaaaataccccaaaaaattagctaggtgtggtagcacacatctgtactaccagctactcaggaggctaaggtgaggggatcacttgagctcaggaggttgagatgtgatcacaccactgcattccagcatgggtgatagggcgagaccctgtcaaaaaaaaaaaaaatcaaagaagaaaaattggctgggcgtggtggctcccacctgtaatcccagcactttgggaggccaaggcaggtggatcatgaggtcaggagattgagaccatcctggctaacatggtgaaaccccgtctctactaaaaatacaaaaaaatagccaggtgtggtgacgggcacctgtagtcctagctacttgggaggctgattcaggagaatggcatgaatctgggagacggagcttgcagtgagccaagatcacaccactgcactccagactaggggacagaacgagactccatctcaaaaaaaaaaaaaagaagaagaagaaaaatggatctgggaaccatactttgagtagacctaacatataaataatatttttcttatgctgaaagaagtagagaggtttatttgg

SEQ ID NO: 9570 - DNA, 6000 bp, Homo sapiens
tgagcagccacataaaggtgaattgacagttgacagctggccccaaccctagatgtgggagtgagagcaccttggacgattcatctaactcacagaatcacgagaaaaaatgtcactgtgatttcaagcccctgagttctgaggttgtattttaggctgtaaagacgaatagaaacatgtgaatagtgaaatcattaagaattattacaagagactgttaaagagtaatttcaaaccagagctaatatctagatttgtgagaaaacaatgatttcttttctttttcttttttgagctattttgagtccattgctttgttatttgctgtcaaaagtacccaatgtatacaatgaggtttcaacacaggtctccccctacccccctaagaagtttaaaaacctcagaggtgctacgtcagtctttcattgatgacttcctgtcatggaggatgggaaggcttcagggaggaggcagcctcttggatgatccatggtgagggatctcacactgatgtgcccaatgccctctttcactttgggacacgatgaagcacagtgggatagatgagcaggacagagagtagggagagagggggcaaagaagtcttggcccctttctccttggtttgtcaagttggagtttgtagaatgggaggtgagagagcaccttggagaggccagaggccaggcaggcaaaaagaggcagagatgcaggaggaaaaatgaccacctggatagaagaagtatgcagtgaggaggggaggtggaaagagaggctggggaaagaaattagacaagacaagaggagtgtggtaggggggccaagaggggggaaatgaggtgatgtcgagggacctggggtgctactgcctaagaccctcttacatctcccaaaaccacttttgcccatctgtgagacagtaaccaatctgactttggtgttctggaaatagcctgggatcagaagcaacctctttcgtcatgcagacagtgtgccccaagattaggcaacagggacatctcacatctctgtgatcacggcaccaccaaattaacctattcatgtagccaccgaacctaaaaggtttgcatcagtgaccaccagggtccatgcagttgaggtgcctgggccctgccccgtcttggttaaatcagaacataaggtttctggaatgttgaggttgtatcacgaaaggagaaccagaaacagggccaagtcaaaattggatgccatggatgatgtgtgcaggtcatgaaaggcaaataaataggtgagaaggaagaggaggaacgagcaggccaagtcatggggctgacacaggagggggtatcaaattaaggaatcagagacctagacaaactcaaggttagaatcttcaggtgtgcaccttattgatatttctctgtttccaccacatcgagaggctatagtcactgcctacatgcttattcccaggtgcttgctggtggagaagaatcttctgggtatgaggttcagtgacaaaagcaatggaagacaacgtgtattgtattcactcaccagtgtaaaaaaaagtgtgtgtgtgcgtgtgttctatgttcaaagtgacatgagaatctgatactgttgttccttttgggaagagaaatggggaaaataaggcgccaggggtaggcaaacttagctcttcaccttatattttgtgtacttacaaatataaacaaattacatctcagagaattcctgtagaccagtggttctcgaaacttattagaaatgcaaatctaggtcaggcatggtgggatcacaggtcacacctgtaatcccagcactttgggaggctggggcaagagggtcactagagcccatgagtttgagaccaacctaggcaacatgataacacacccatttctacaaaaaatatatatatatatatatacatattttttcaaattagccaggtgtggtgccatgcacctgtggttccagctacttaggagactgaagtgggaggatcacttgagcccagaaggttgaggctgcagtgagccatgatcatgctactgcaccccagcctgggcgacagagcaagaccttgtctaaaaaaaaaaaaaaaaaaaagtaaattctcaggccccattccagacctactgaacttaatctctggagataagtccagaaatctgttttaacaagccctctgtagattctgatggatattcaaattcgagaaccattgctttaggccagggattctagttctcagattttttaacatattaaaattccaatgcccaggctgcaccctagaccaagtacatcagaatatctgggggtgggcctaggagtcaattgtccttcaagcttccatgtgactctaacatagcggaggcaacactggtttcacctaccttcttccaattctgggatccacctcttcccagcctcaaatcttgctcaggctttagatgtgataacctggagattgttttcttggagttcttccacaatggcctctggctcctcagttccccaccatcgctgatttggagagagtgtgtggccagaagacaaggcccagcagttgaatatgaggttgaacctgatgacggccagggtccatgagctctgcaggtgttaaagacagagtcatccacatccaccactggcagggtcccctgcatctcttccctgaacattggtgccaaggctggggtggaaggctgtctcaggacagggtttggcttagtgctgggcttccactgcaacctctctggggcaaaggaagctgcccacatctcccccttctctccaaggaagaggaacattgatgtggatcaaggacaatacggcaaccttgagagaacactacagcttttaaggagaggagtcaaagggcttttaagagaaatgaatggagcaaggtcatccctctttgctggtttctctcttgtctctctgtgctgcccccattgtacacatctgctgtggtgagaggggtgtgtgcactaaggggtttgcaaggccataggagacctgagtgtgggtgtgggaggggagacagagcaggcaactgagcagcctcttgtttaggccttgagctaaagagagaaagaaggcttcctagctcatagctggtccagcctaactcttctgaagaaagatcacatgggactctgagccaaaagcattgagaaaatctagatccatgccccccaaatttaagcatgcatcagaatcatgccagtctttgtcaaaacctggattgcttggccgcatccccaggatttctgagtcagtatatctggcatgtaaccccagaacttgcatggctagcaatgtcccagggaatgtgaatgctgctggtccagggacctcactttgagaaccactgctctaaaggacttcctcaccccttcccaccctcgatgcacccttccttagcccagggtatttcccaggccactacaaaagctgttcctcattgtggtaacttggttaattgtttgtgatccttcctaagctataagctctcaaagaatggatccagcctctttcttcaccactatatcccaagcacctaacacaatgtccggcacattgtgagtactgaataaatatttgttcaatgaacaagcagatttgcctggtacatcccctctgtggaatgaaacctagagcagagctggaagcctggtcaaggatgaggtactgaccatgtcccttactttagacaggatcaaggaaaaggcaggcctcacaagcctctgttctctttggaaactgatccaccagcaaagtactgcaaatagccaggcacatgcagacccccatttatttctttggggtgaagctgagtgatgatcagatgtcaagcttaggccatcttgtctgaattcttcattttacagataagaaaactgaaccatgaagagacaagtgatcttttcaaagcacattcacactgatgatttctgaaacagtgctttgtagcaatgccgtgaggaaggttaggggtgtccccactttatagaagacacaagggcagaggcagagtaggtgttggcagttgtgaggagagtcacagtactcatcatttgtcagacatttttcactgtgccaggcactctgacatttttcatgtacaagttgacttcgtgcttctcctctgaggtaagcattcaatactcccatttagcagagtaggaaccaagacttagaaaggtgagtgatctgcccatgtcacaggtggagagctgggatttgaacttggcccatgtttgaccatcacgtaaaacaggaatggggcatcagaaagggaaggtcaaaatgtaaccaacagacctatattcccttcatgctggaggttcctggggcaaagccactctctgaggtttggtggggagggacttggggagcagagagcagagggacaatgagctcccagaagccgaggggcatagggtgccaaagagaagctgctgcctctgtgagcacccatgtcagttagttttgaggaacaggactcagggttccagtttaaatccttccattcacaatctttaagaagaagaaaaaaaagaagtctgccgctgaccacaagagctctatgccctgcccccatcccacatacacacatcccacacttcaattgctccaaacattctgggaacatctcactgccacccacctcacccaactcagcttcacctgcccccaattcccttaaggctgagctcccagggccaagactcaagaggctcagagtgagcagagaaaatcctcgcagttaacttggcttccaggaagtggccactggtgggcgttgtggccattcatgagcaccaaaccacacaaaaagaagaactttgtccctttcttgtcattttgaaagactgtgaaactggagccaattctccatcatcacacaggaagctgagtacttcctacttggtcaggatcttgaaacttgaattcataaaaacccagaaagccccagaaacaaagacttcacggacaaagtcccttggaaccagagtaagtgtcacttgtcttttctgtcttatctgttactgtggagggcagtgttgttcaaagacatgcatgcagctaggggctcctcaaaggtagggggaattctttgagtaggctgggcaaatgtctaagtagcccatggatgcatctccaaggcaattaatactgtagcaatactgagaatggtggatttataaagctgggtgctcagatgaaatataggcttttttgctaaaaaggaagcttacttgaaggattggcttttggttactgattaagaaagtcagtcagtactaagggacaaaaggtgttttctgtggaaacctattcaataagaaattacttggcggggcgcagtggctcacggctgtaatcccagcactttgggagaccgaggcaggtggatcatgaggtcaagagatggagacaatcctggccatatggtgaaaccctgtctctactaaaaataaaaattagccgggcatggtggcgcatgcctgtagtcccagctactcaagaggctgaggcaggagaatcactcgaatccgggaggtggaggttgcagtgagctgagattgcaccactacactccagcctggcgacagagcaagagtctgtctgaaaaaaaaaaaaaaattgcttgccaaattcccccatgtaaaggaaaaccaaacatggtgtatgaagaaattatagcaagagggaaatattagctagaaaaatcttggcagatgcaaggatgatttgatactgaacctatctcttaagaagactagaaccaaggatcctcaaaattggcactgctatctttggaagaggtaggctttcactcacccaaaggcaaggagctggccaggtgatcttggggggcatctgttctgctctactaacaaagacacaggtcaggattttgttctgaagatagaggggcatggtggctccgtataggtatctacttcataggtggtcttggtgggtcccagattt

SEQ ID NO: 9571 - DNA, 6000 bp, Homo sapiens
gggagagttgcctgaggccaagagttcaagaccagcctgggcaacagagagaccctcatctctatttaaaaaactctgaaatttagctgggagtggtcatacccacctgtggtcccagctacttgggaagcttgcttgagcccaggaggtcaaggctgcagtgagctgtgattgtgccaccgcattccagcctggaccatagagcaataccctatctcttaaaataaaggattgatacgaaatcacctttgcaaaattatggcagtaagaaaaacctgacatggttgactccatgttgcttccttttctttttcttttttttctctcagcgtgttgctcttgttgcccaggctggagtgcaatggcacgatctcggctcaccacaacttctgcctcccaggttcaagctattctcctgcctcagtctcctgagtagctgggattacaggcatgcgccaccacacctggctaattttgtatttttagtagagacagggtttctccatgttggtcaggctggtctcgaactcctgctcaggtgatctgcctgcctcggcctcccaaaatgctgggattacaggagtgaaccaccgtgcccagctctatcttgcttctaacctccaacctggggataggcgaaggtaactttgggaggaatttatagttcaaccttaaagcaaggatgacattagccctctccaaaactaaaccgcctttgtaaaactaatgaaaagccacaagtctaggatttttataggaggggcctgaattctgctaaggtgtaggtgtagttaaatgataaccagtcattgctctggaagtcacaagatttgtaacttcctcagttactcctatagataacatcactattgtagaacctaagacttgccttttgagatgtttcttttctttctttctttctttctttcttttttttttttttttttttttgagacagagtctcgttctgttgcccaggctagagtgcagcggcatgatctcggctcactgcaagctccgcctcctgggttcatgctattctcctgcctcagcccccagagtagctgggactacaggtgcccgccaccacacccggctaattttttgtatatttagtagaggcggggtttcaccgtgttagctaggaaggtctcgatctcctgatctcgtgatccacctgcctcagcctcccaaagtgctgggattacaggcgtgagccaccgcgcccggccttgaggtgtttcttttcagacttttgcatttctgctgactccacccagaggctgactcagcgcttgaggactcctcctatgattgcatccccaaccaatcaacatttcccattccctagcaccctgcctaccaaactatccttgaaaaaccctgacctctaagcctttggggagactgatttgagtaacagctccatcttctgcgtggccttgtgcatcgccagccttgcgtcagtgaaactctttactgcaatgccaaggcctcagtgaattgattttgtctgcgcagtgggcaagaagaacccttgggcaattacagatagatgaataaaaggatagatttttttagatagacatgagatactaagcaaaacattaatagttgaatctagggtatatgagtgttcactctatggttctttcaacttttctgttatgttttcatattaaatgttgtaggaggctgggcatggtgggtcatacctgtaatcccgggattacagcgggtggatcgattgggcccaggagttcgagaccagcctgggcaacatggcaaaaacctcgtctctactaaaaatacaaaaataaacctggcgcgatggcgcaagcctgtagtcccagctactcaagaggttgaggcacgggaatcgctggaacctgagaggtggaggttgcagtgagccaagattgtgccactgtgctccagcctgggtgacagagacttggtctcaaaaaaaaaaaaaaaagggccaggtgaggtggctcacgcccgtaatcccagcactttgagaggctgaggcgggtggatcccacctgagatcaggagtttgagacagcctggccaacatggcgaaactctgtctctactaaaaatgcaaaaaaaaattagccaggcatggtggcgcacacctataatcccagctactcaggaggctgaggtgggagaatcacttgaacctgggagggggaggttgctgtgagccaacacctcaccactgcactccagcctggacaacagaatgagactgtgtctcaaaaaaaaaaaatgttgtgggagaagcccaaaaatcatgtccacttcattatattccatggggggcattctgtagcagatttaccagggccccataaaccccagcttccccagaggctccacaggattctcagtgggttctcttagggcagtggaggattgtttgccatgcttcaaggcacaaaggtacttagctaggtgcttgtcagttttggagcctcttattttttgtgggggagtgtccagacttcactgagggtcagtcctctgcaaacacagctttgatggagtggttgggtgggaagaggtggtgagtgaggagaatgacagcagttcccaaggcagtctggctaagtcctgccatggaggtggttaaaagacaggctcctgaccctctctggagagaagactttggtacagtgggcccagggctcaggaggactccttcatgcccaaggtttctgaggggacaaatgatggtatttcaagggatcagacctggagagagtgatgtcaggataggtaaggggtgtaggtaagttcccctgaatgctctctattgttgcttctctctcatttaatacaacaaacaggatgggcacggtggctcatgcctgtaatcctagcagtttgggaggccaacatgggaaggctgcttgagcccaggagtttgagaccagcctgggcaacacagcaaaagaccccatcttgataaaaataacaaaaacaaaaatggcatggtggcgctcatctgtagtcctaccttcttgggaggatcacttgagcccaggaggttgaggctgcagtgagctatgaccacaccactgcactccagcctgggtaaaggagtgagacctcaaatgtaaaaataaaaataacctaaaaaattctttctttctttttttttttctttttttttttgagacggagtctcgctctgtcgcccaagctggagtgcagtggcatgatctcggctcactgcaagctctgccccccgggttcatgccattctcctgcttcagcctcccgagtagctgggactacaggcacctgccaccacgcccggctaattttttttttgtttgttttgtatttttagtagagatggggttccaccgtgttagccaggatggtttcgatctcctgacctcatgatctgcccgtgttggcctcccaaagtgctgggattacaggcgtgagccaccgcgcccagcgaatactttctttataggatcaaaattcccatattaagccaaaagacaatgctgaaaatgtcataaccctgaaagtcactttgggccaaggcccactgtccccattgttactttcattgtgacaatagtgtggtgggcaaggagggaggccagagtccggtgggaactgggttttaggaggaggtatctgaagaatgtgtagtgggtcgggggctggtgcggtcagaagggccacctctaatttctgccttgcattggtgactagatctgcactttctggaactcccagagaagtttgctggtgcctttgagggcaggtacagggcctgccttatccaggtagccctggggtgggtgcgggtgtctcgggcagtaggcaggggctgaggggaggcttacctctgacacaagacctgggtacagcaagggcatgcagtagcatgatcaaagtccccccagagtggtccgggcagcgtctctagttgggccagagctgggcaggtggggacctgtgtttccctcgaggggaggcagcctccccttccccttctgtgaggccctgtaacaagacctacctcggattttcaggagggccaaatgcgaggacatgtacaataccagctccgcaactgacacctagtaaacagtgaacgtagctgttgctattataacaaatacctgttccctgtggaaaatggttaaatgtcaacttatgcttttaaatgtctatagggaaactagttttatggacattatttattcttctcatctgcatttgcagtgtatctcggcccagctgcttctaattttttgccattataaaacagggaacatgagcatcttgtgcagggtgggttttttgttttttgtctcactgtggcctcgacctcccgggctcaggtgatcctcctacctcagcctcctgagtagctgggaccacaggtgcgcgccaccacagccggctaattaattttacttgtggagacggaggtctcctacgttgcccaagttggtctctaactcctcggctcaagcgatcttcgcgccttggactcccacagtgttgggattacaaccgcgagccaccgtgcccggctttctgcaagttcttgatgaccgatgagagccggtgggcccaaacccggcgggccctaacccggcttcacgctccgcccggcccggcccggcccggccgtccatacttccctccggtgtccaccagagggcgaacgggagacgcgaatgtggttcgactacgcatgcgcacgccgctgggcgcacgtgcggagggcggcggggcgggagggtaaaggtaggaggtgagaggtgaaggggcgggcacccggcggccaggagagagagggagggcgccacgcaccggactgcgggccgagagcgcgcacgccgcgctccgcccctgctgccgcccccgtcgccgccgccgccgccgccgcagcttgggaggtgctgccaccacaggtaccgtcacgcgggtgctcagggcgcctgcccgcgggccccagctcgaccccagccgcgtggagctgggagttccggaatgggggccgctaggttcgggggtgcgtgggcatggcgctgtccagcagccgtgcgggccggccctggagaccgcaggccggcaaggaggcagggccgcgcgtccccacccccaacccggccgtgtccctgcaccggccggcccctggagctccgcgtccccaccagacctccgcgggcccctggtgtgacggggggagatgcgcggcgtcgcatcccctggcctagttgctccgggaagctgttgtagaacctgctttggtgctgtttgggttttccggagtgcgggggagagcaggttctccactttgcctcttttggaagatcttattgagagacaacgctagttgctttgctggttttgcttggtttctagttttccgtattgcttaaacctcaactttgctcactaatgttgcttctgtttacttctgagtgggtttatgacctcagtatttaaccggcttataatgtcacgatagcgttagttgcagggagccctggctccggactgtttgaatcacagaaagttgtgcagatgggaatgcggaggggggggcagtgagtcgctgtgggggctctggcaggggtcagcccctggttcgggtcactcactgctccaccttgtatggcgacagtcggagctaggtgaataaactctttctggggattttgtaatacttatcgtgaagcggccatagaaaaggtttaatgttagcgttgcgtgtgtttcttttatttggccaaaaatttgtggagtttggttatgccgtgtctttattggtttgctgtcaggtcaggatattgagcaaaagactgacgcttttattagggagtcagggtcgagggtgtctagttagtgctgtatccattttaggtgttcctcagtgatgcctaaagacttgttttttgtttgtttgtttggagacagggtctcactctgtctcccaggctggagtgcagt

SEQ ID NO: 9572 - DNA, 6000 bp, Homo sapiens
gcccccaaaggcctttccatgcgcttttaacctatagagggcagccagttgactaattctgacagcaactttacccttcaggggagataatcccaccacccctctggaaaatggccatgccttaatacagtgtgacaaccaccttcagacaagtgacaaggaaaatgcctcctgctctggttctgtggtaatctaccatctaaggtgccttcttggggcagttggtccagaagaatgtaaggaagtggcagcagtcttggatgatgatagccactcagtttcattctgatcctccctagcagatttctatagcagtttcagaactgggcaggtggtagaaggtgggtccaaccaaaccggcccaggctgattgatgtgtctggtttgtttcagacatggatgagtttcctgtggcatccctgtttacagtcagcttattccacagtagctacaggatgcccgagaagtgcttaggtcacctgctgaggcagcaggtctcttctgcagacaaacttagttgcttggccgtgcgcggtgggctcacacctgtaatcccagcactttgggaggcccagctgggcagatcacctgaggtcgggagttcaagaccagcctggtcaacatggcgaaaccctgtctccactaaaaatacaaaattagccggtgtggtggtgcatgcctgtaatcccagctactcgggagcctgaggcaggaaaatcacttgaaccctggaggtggaggttgcagtgagccgagatcatgccattaaactccagcctgggcaacaagagcgaaactctgtctccaaaaaaaaaaaaaagttgctccacatggtgaggccctgtgtttgcttgtgctatgtggctttctcccagctggtttggctttggggtaatgaaattcaagaggcctttccaatctgtttgcagacccattgcctgaacaagattatcaccttcaggttgtgatgtccttagatgacagcacttgctcaactgagaatccagagttttctgcagtccagaggtggtggtcagcacaaagaactcagaccccctacctcttagcccttccctttctgggggatggtgtaaagaggcacatcgcgtaaaatggtcacagagcagattgccatgcagcctagaaccaggagtctggtcttgttgctgtgttccctggtaagagatcatggcattatttcttaaatggctaagtgaaggtgggagagttggggaggggaggagggaggtcctctgttctgccaattaatagtctacctctgtgtcctgattcctcttctcaagcaggaatgaaaagcctccatattaaaacgaaagggtttggaatcagggtcttagttcaaatcctgtccttaccacttcactagcgtactcttggacaaaattgctaattctctcagtttgcagatgtgtaaaataggactgacgatatttgtagtgtgattgtgaagaataaggcaaattagcacaaggaaaactaaaaactcaatatgtttgtgttagcctgtttgtgttgctataaaagaataaagaatatctgagattgggtaatttataaggaaaagtgtgtttggctaacggttctgcaggctgtacacaacatagagccagcatctgcttccagtcagggcctcaggaagcttacaatcttggcggaagacaaaggggagccagcatcacatggtgagagcaggagtgagagagaaagtactaggttcatgtaaacaaccagatctcacatgaacccatgaagcaagaactcattacctcgagcaccaagccattcatggggagtccacccccatgacccaaacacctcacactaggctcacgtccgacactggatgtcacatttcagcatgagatttggagggaataaaacatccaaaccatatcaatgttagtggttaatactgaggacttaaagccaggaatttccagtccacacagctatgcccccagccatggcaactggagcactcctctggactgcagccccctggtcaagccgggggtttttcatgcagtcggaggctggctgcattcgtggcaatggaccttgagcctacctgagctctggaggcaggctgccaacccagtaagaacctcagaggcatgaagaaactgttgacacataaaacatccctgatgcccaggtgcaagagacataaatacggggacatggatataaggacgtcagtttccctttctttcactctgtggttcctacatcttctatctcttctttaccctaccacagtcctgtgctcagaagaaatactcatttgactctctggttaccaagcattttcacatatgagagacaggttgctaactcaaagtcacgctgcagctgaatcctgcccttcccatcacgttccactgactgaattttcccattcatcttgtggaggtgttacccaaccaagtgtgctatgctcagttctcaaactgctagtgagatccactagggaagatcagaatgaaactgagtggcaacaattgatttaaagtctcaagttgggccgggcacggtggctcatgcctgcaatcccagcactttgggaggccaaggcgggcggatcacctgaggcctggagttcgagaccagcctgagccaacatggagaaaccccgtctctacaaaaaataccaaattagccgggcgtggcatgcctgtaatcccagctactcgggaggctgaggcagagaatcacttgaacccaggaggcagaggttgcagtgagtcaatatcacaccattgcactctagtctgggtgacagagtgagactctgtctcaacaaaaaaaaaaaattccaaattgaaggaagcgttagcagacttcatctccaggaaagggaagaagaagatacttaaataattaacaaaatatatttaaaatgagtgggagaacttcctccattaaaccctgttgaaaatgtgtgagtggttgtcatgccccagacatcaaggaacccatccatgaggtcttcccacacagactggcctcaggaagggaaggaggaggtaggccgctctgacagccacaacccgagttgaggaaacaagcaaaggaacacagagagtctacatacagtaaaaggtgacaggagttaagctgcacacaagggaagcagagatgggttggaggcagttaagggtgcgttgctgcctctgtggctgaggtgagtgcaaagccctacatggtcccctgtttagagaaggctattgtttcaaacatattttacttggtccccggaggcagcatgaaactatgaaagaaagagccttaccccttttttcaaggctctccagaccacagttctgggatgggtgtgggtggttgccattcgttcatttatgcctgtctgatatggagcctccctctgttaccagccctgtgcactcaagtgccttgcagtccagtgaggaataactgtagataagatgagatgatgggcattaagtgtaactgctgagaagccttcatagagggaaaggtgataagaactgagtttttctggcatgaggagtttaccaggcaggagaggtggagacgctaggctaggcaaataggctgcagccatagttctgctgagaaacaggttttgaaccaaggcaactccatctggagatatgtatcagaaagattaggagatagaatctccatcttggtcacttatttggtcttctaagacagcaatgggaccgtctcttaaatactggagttgtcctatctccttgggctgataccctgaactgtcatttgggtgagtaacacattaaggggtagacggtcggtttgggggaataaactaagtaactaggttgcggttcctcctgccgactaagcagacctcctggtgcgtggtcttgggttgccctgtgagccctgaagctgtgaatgggccccacagatcactctaaagccaagcatccatgtgtgcccggctggggatctagacccccctggtctacccaggaacctgagttttggtggtctgagacacctgggggacgacgtatcccggagaagggaccaggattaaaggccgctccccaggctgcccggagactagaaggaaggcgaggtagccgcagtcccagggagggtcttaccccttgctcccgggatgcgttatggcgggcctggctgtgcgagatctaggctagtggctttggctgcgaacggattagatctgatccgattagagcctgggcggtcggcttcgcccccttgccaggctctgccaacgcccgcccctccctcgtggagacccggagacctccctgagagccttcccgcccggaacacgggattggtgcagaatccgagaggctccatgcgccccgggcctggcttgtttccacagtgggggctcgtgcttccgccccctgcggctcttctggaccccgccccgaccctgcgggtaactgggcccgcgacgtccccgcctccgtgcttgccgcgtggcgggtgggttcctccgggtcggggccccgtgccgcctgttcacctggggcgggaccgtggccccatcccacaggtctcccgcccgtgcacctgccgcctaacgccgcgcgccgcgccgtgcgcctgcctcgcgctccccgtccgcctgccccgcactccccgtccgtgtgtctcctagtccccagcgaggggtctgtctgttcccctggcaggctgaccaaggggccggcgtcaccgctacgtgcggcggggccggcgcggcgggcggggtgagggcggcgctgagcgcagcggcggcagcggcggcgcgggaggcggggaggcgcggcgcgccggggacagcggcggacggcggcggcggcggcatgcggctcctcgcgctgcccatcgtgggctgaggcggccgcagaaccggcgggaggcgcggcggccgggcgagccgagggcgcagccagccgggcggaccgcggacagcggtcggggcgccgcgccatggggcgagccgggggcgggggcccgggccgggggccgccgccactgctgctgtttctgggggccgcgctggtcctggcctctggggccgtgccgggtaggtatgactgcgcccgggacccccgcggccctcgtgccccacccagggcaggggtcccgctggcggcggggacaggtggagctgtgagctgtggcaagggggcggggcaccgcctggccgcggccgggcggcggaatggtcccaggaggtggtgggggtccgggaaaggccgacccgcgtgggggccgaccccggttggggtagccgggacccaagcgcgcgggccgcggtgcggactgggggcggggccgggggcggggccggggcggggccggggcggggcctgagggtgagacttcggggcgggacctggagctgagggcgggagccagtggacgcggctcagggtgggttcccgagggtgagacttatgggtgggccgagctgggggccgccctggcctggctcttcagacggcggggcaggtcgggcggggccgagccgcgaggcgttgggcggggtgtgatcctcgtcttgggggcagactccgggacggggcttagaggtaccgggtggctggggtcacactggggcggtggggtctgagggtggcgaggtctgggttgaccaggtctaggcgagcgggcctgaccggggcgggccggggctccagggctcctcagcgcgccgccctgacgtcccgccccttgccctcccgcccgcagcgcgtgaggcgggcagcgcggttgaggccgaagagctggtgaagggcagcccggcgtgggagccgcctgccaacgacacgcgggaagaagccggcccaccagcggctggggaagatgaggcgtcgtggacggcgcccggtggcgagctggccgggccagaagaggtgctgcaggagtcggctgcggtgaccggcaccgcctggctggaagctgacagcccaggcctgggaggagtgaccgcagaggcgg

SEQ ID NO: 9573 - DNA, 6000 bp, Homo sapiens
ggaggccacagcagtgcctttcatggcattgttataaggcataaataaggcaacacacgggaaacagcctaccaacacaggtttgatggacacaaattgtgtgcattgttagctgttttcaagttttttcaggggcatgttatttctgcttgaatggctaaatctcgtgattctgatgggtgtggcccaaggctgcactttgagcaccactgggtgagccaggattagtgtctaaggaattccgtttccaccctttgcagctcacaccccagtgacctcttctgggaatgcctcgctgggaatgcagctgagcctgtgtgggtgtggagagaaggtgcagatggcctccggttttctctttgcaggctgagaaagtgttcatggtggctcgagggcttgtccgagaggctcgggaggacttggaagttcaccaggccaagctgaaggaggtgagggaccgcttggaccgtgtctccagggaggacagtcagtacttggaactggctactctcgagcacaggatgctgcaggtaggcacctcaggaggcagccctttcgcacctggacagtgaccctagcctggcagatcatggaggggccgggtgggaaccctgactggtctgtagtcagaggcctggtacagaggtgagccagaagctcctatggatggacagaaccccaagcttccagagtctatccatatactttcttctggagtactggggccaactcttcagggcagcgtagcctgggactcagaatgctgaggaaggagaactatggaggggctggcctagggagtgctggacacttccctttgtgtagacataagtgcacctctggtcaaacccagaactgctcaggtgggacgatcatgcaactcactttgatcactcccaattcctttgcccttctgacccagccaggttggtgctaccttcattcattcagcatgggtctatggaacatgtactctgccaggcacaaggtagtgagccatctgctggtggctatagctgcagggccaccttgtgcccatgtaatccaataacatggctttgcttctgcaggaggagaagaggcttcgcacagcctatctgcgtgcagaagactctgagcgagagaagttctccctcttctctgcagctgtgcgggaaagtcatgagaaggagcgcacaagggctgagaggaccaagaactggtccctcattggctcagtcctgggggccctgattggtgtggctggctccacctatgtgaaccgtgtgcgactacaggagctgaaggctttactcctggaggcgcagaaggggcctgtgagtctccaagaggccattcgagaacaggcgtctagctactcccgccagcagagggacctccacaatctcatggtggacttgaggggcctggtacatgctgctgggccagggcaggactctgggtcacaggcaggtagtcccccgaccagagacagagatgtagatgtcctttcagctgccttgaaagagcagcttagtcattccaggcaagtccattcatgtctagaaggcttacgagagcagcttgatggcctagaaaagacttgtagccaaatggctggggtggttcagcttgtaaagtctgcagcacacccaggcctggtggaaccagcagacggggctatgcccagcttcttgctggagcaggggagcatgatcttggcactgtcagacacggagcagagactagaagcccaagtcaacaggaacaccatctatagcaccctggtcacctgtgtgacatttgtggccacactgcctgtgctctacatgctattcaaagccagctaacccctggcccctcctccagagggtctgaggcaatagctgtgaatgtggatttaagtagagaatcgtagcaatgaagcgagcctttgggggcatgtacaacctcaatctgaaggagcagtatctgtgtggctcaccagcaggcatgcttcgctttgtagacaaggttcatttacattaattatcaaaactttgtgctaatgtccaattaaaatatcctgagttttattatttaaaacaatcagactgagtttttttcattaagaatcaagatccaagacttgaaggttgggcctggagttggggtagtcaccccctttagttcctctctcatctcctctctgtcctcttttctgaactgttatggatgcactcctgaggcctagattttcattttggatttcctccagttacctgactgtccggtgtcagatggcctgggagttccagtgagtggaacctagcctgctgcctactcatttcgtgaccatggttgcttcccatctcctggatcactttctctaccatgtgggggagaacttcctggttctagtactggaggagtgatcagaggagagcagggaagggagattgggagaatggttgataaatgttgttggggacataagtatagggattggtggccagtctggatccctggtacagagattgctttgggcagcagtggtgtgccacgggggctgggtgcacacccccacacagcccggggatatcttccacaggcataggcagagctcaggacaccgggagtgtgcatggagaggcagtgatagggagggggggggtctcccacaggtgggaggtgcagtggggcatatgtatgatctcttttcagaggggaacagtgacccttgaccttgactaaatggccatgggtggccttgtgtgccctgagtaaacaggagctttgggctggtattcagtcctggtgttggagtattggaagtcaggcacattccagagaacccactcccctttgagagcgcagggtagctatatgcaggggggccgcaggtggggactcgttcactggtgcctgtgcagagctctcagagcctgtggagtcaggagtgtttcccataaggcatactttcttcttggagcctgtgttcagtcttgggcagtgagcatggcccaaatgccccccaccccaggttctcagcacctggtccctcagtcaatctatccttggcgagtaatggctccccagaatggcatgggatggaaagacccctgtgcttagagtgttcacattccttgtagggcaggaggtagcgtatctgtgtacagatgaaaggggttgtggggtttggaagtcccagtttcctctggggtgagataggtcctgaagtgtgtgcttggatgaatggatttggggagggagggattctgtgcatgtggagggggctgctacaagctacataggcaggaaagccaaagtgggtgagggactggggcagactgtcctggctggggtggtgatgggtgtgggggagttgtgcagaatgatgtcacaggcccggggtgccaggttggcagtctgaggtcagaggctaagggtgagggatccagggagggattgctatgctggtgcagacaaggtgctaagcacctggactcaggtgctggaagtgggagtggaggaaaaggggtgacctgacaggagacccttgatagctggtgggaggtgggaagagggtgtctctagctctagggcagtagccagtgtggatgacctgaacctcctgattgaggctcccctagcctgtggaggccttggaggctttcagatgatgcctgtgacgtttttgcctcccaggaagctgtgccaatggctttgagccaaagtcctccaaaagtcctaataggatgggccaggttctggtcctgagttagccgtgggcatgccagggtgtgaagggccctgcacagggtacaaatggtccccaggagagaacctttctgccagcgtttcctcccgcagaaggcccaggtgtttgccagtgagggagcccagacttgcccaacgcttctcagcttggggtgggtccaggtctgggtcctgggctgggaagaaaggaaggaagtgagcccttgcttgtgcgcctctgcagcccaggttccctgccttcacagccccgctagaggtgggatcacccccacttactggtgagcaaataggctggggggggttggtgtcaggttacatggtttagttgatggcgcaagcccaggtccaaagcccatgctcttctcaaacagccagaggtgggggccggaaggagggattggctgttggggagtagtgggagcaggggcggtgagcaggggcggtgggcagggccaggtgcgcaggggagaaacaaggcgccttggagttcaggtaaagaaagttggggaggatgaccaccggagccgggtaaggaagggaaagggagctccgggcgcggggcgaggccgggcgctggcagaagaacgggtcgggctggtgagggactcgggtgctacccggctctggacgggcgggaagaggccgggacgctgttccaccagcacctgcgggtgcggagcgcgaccccccgcctcggctcctggcaaccaggaaagttcccagttccggttccaaggaggcgagcaggtgaggccgacggggcggggcggctctggctcccggggttcactcctcacccctccgggcgacccgcgttgccatggcgaccgccgcggtgcagcccgcccccgccctcccccgtgcgggaggggtcgggtccccagccctcggccgatgcggagcccgcggggctggaatgcggggtcccgggcggttcggggccgcgcgcccggctctccgggctgcttccggcctggcccgggcggcgggcggggggagggcagcccggcaggcgagggggaaggagcggagacgagcccggccgacgcggctttgtctcctttgttcccggcggtggcagcgccgcgcgggaggggcgggcagcgggcgcagttttccgcccctcggtctccgggtaacagctgcggctccaccagacccggggagaggccgctgcgcgcggagcccgagcccggagcggccgacgcccgcctcggcgcgcacatcccgcggggcccggccgggtggtgagtgcggggctcggggccagggcggcgaggaacggggctcccgaggtggaacgggccggggccccgatcccgccgggcaggggcggcctgggtgagtggtgggcggctttggttttgagagttgggaccacacttctccgcgcgaagggaaactctggcgactccgcctggaacgcgattgggagactgaggaggtggagctgctcctccgcgccccctcctcgccgtcgccgcgggggaccggccggccccttccccgccctcccagggccagtgatggggtcctcgcctcggggtctgggggttggggagggtcaaggacgagccgagtggggaggtcggggcttcccctcagtagtaacagccctttctggctgctcccggtgggactgacaaaggcggacctcgagcctcctgacccccgggcgggtgggggggaccctcctctccacacacagacatattaagtgggtgatcgatgagcgccttgggtcatcgcaggtgcctggtaaatggtggatctccccacccctcctcaacacacagaaaacagggcgggcagcgggcaccactgcactgtcaatgaataactcacctctgtagtgaaccctgggagctgagcaggagggtgaaacgggaaggccggtttcccactaactggcaggcaaggcaaatgtgggctgtcctatggcccctctgcaggtgcggaatggcggggtttgtgagccccttttgttgtcgaggacagctccacgggggtccgggaggtgcttgctctacagacagaagttgggcagtcttgcgccccctgaaaaggttcagagtagggtggccccagaagagactccagggcatgtgtgggggagcactgggcacaggcagagttaggctttggctgtgagtctgagcagggcctcagatattgggaatgggcaggagatcctggctgtgtaagttggggatgtgaggtctggttctagatcagccttttcagtctgccctggcctggtca

SEQ ID NO: 9574 - DNA, 6000 bp, Homo sapiens
tgtatcaaacagagtaagaagggtaagttgagtgccagagccctccctacagaacacagcctgcatggacctggtacaagtttgagaatctatgggatgatagagggaacaacagagatgggtagggaaacagggcctcatcaagaaacggtgttacaaaatttagtttgccttttagggggagagaggatattttgaccttacctcactctatataccaagtaaattccagagaatcaatgagtcaccaaacactgttgcaaaattattgcaatgatcactgcttgcacttaaccttttagtaatatttcctgttttgaccaaccccttgaaacgcatcgttcccaaccagcatcagacttcctagttgtctcctacttcaatggccttcccttcttagcccagggtagcagtgggtataggtagggaggctaggtgactgggtttaggaatatttcatttgggaggctgaggtgggaggatcacttgagcctaggagttcaagaccagactggggaatatagtgagaccccatctctagaaaaatgtttttaaaaattagctgggtgtgatggtgcatgcctatatagttccagctactcaggaggctggagtgggaagatggcttgagctggaaggttgaggctgcagtgagccatgatcacaccactgcattccagcctgagtgacagaaagccagaccctctcaaaaaaaaaaaagaaagagagagaaaggaagggaggaaggaaggaaggaaaggaaggagggagggaaggaaggaaggaaggaaaggaagcaggcaggccgggtgcggtggctcacacctgtaatcccagcactttgggaggccaaggtgggtggatcacctgaggttgggagtttgagaccagcctgactaacatggagaaaccccatctctactaaaaatacaaaattagctaggcgtgatggcacatgcctgtagtcccagctactcgggagactgaggcatgagcatcgcttgaacccgggaggcagaggttgctgataagattgcgccattgcactccaacctgggcaacaagagcgaaactcggtctcaaaaataaaaaaggtcgggcgtggtagctcatgcctgtaatcccagcactttggcagatcacgaggtcaagagatcgagaccatcctggccaacatggtgaaatcccatctctactaaaactacaaaaattagctgggtgtggtggcacatgccttagtcccagctacttgggagcctgaggcaggagaatcgcttgaacccaggaggcggatgttgcagtgagccaagatcatgccactgcactccagcctggcaacagagcgagactccatctcaaaaaaaaaaaaaaaagagatcacgtccaggggcggtggctcacatctgtagtcccagcactttgggaggccaaggcaggaggctcacttgagcctggagtttgagaccagcctgggccacatagtgaaatcctgtctctacaaaaaatataaaagttagctgggtatgatggtgtgcacctgtgttcccagctactcaggagcctgaggtagaaggatcacttgagccagggcatggtggcgtgtggcgtcccagctacttggaaggctgaggcaggagaattgcttgaatccaggaggctgaggttgcagtgagccaagatcacgccactgcacttcagcctgggtgacagaatgagactctgtcaaaaattagcgatgttggcatgtgcctgcagttccagctactcgggaggccgaggcaggagaattgcttgaacctgggagatggaggttgcagtgagcagagatcctgccactgcactccagcctgggtgacagaatgagactctgtctcaaaaaagaaagaaaaaaatagagatcataagactgagagaatgaaccctttgtagcaataagataccaaagtataaacaagacattaaggccatgccaggcaagagttaagccgttcaccaaagaataaactatgttctaactgctgcaaggtttttctttttctccagcagctaaacaagcactggccttgagataagcaatatagaaacaattgcagttcatccatcaccagacactgaccccacaagccataactatagctttgattgcacaagagatggattttggtgactttttcctaataagagaccactgaccagggactggcttcagttggtttatggaacctgtgcactgagtgcttttgtatccttcattttgacatatggtgctaattgtatttcttttcttttttttttttttttttgagatggagtctccctctgtagcccaggctggagtgcagtggtgcgatcttggctcactgcaacctccgcttcccggtttcaagtgattctccttcctcaccctcctgagtagctgggactacaggcatacgccaccacgcccagctaatttttgtatttttagtagagacggggttttactgtgttggccaggatggtcttgatcttctgacctcgtgagccacccacctcggcttcccaaagtgctgagattataggcgtgagccaccgcacccggcctgtaatgtatttcaatgttaagtctccaccccaaagtgaacatgggtcatatacaacacacatgtttattcagtatacttgcattaggacccccttcatgagtatctatagctcttcctgtaacctgttgaatatggtattttttgtttttgttttttcttttttgagacagagtctcgctctgtcacccaggctggagtgcagtggcgcgatctcggctcactgcaacctccgcctcccaggttcaagcgattcttctgcctcagcttcccgagtagctgggattataggcacatgccatcatgcctggcagattttttgtatttttagtagagacggggtttcaccatgttagccaggatggtctcaatctcctgaccttgtgatccgcccacctcggcctcccaaagtttgggattacaggtgtgagccaccgtgcccggccgaatatgtatgtttagccaagccattcgacataaagctcctgcctctttttaagggtctgtctctggttttgaccagaagcccacctcccagcctgcaggttgtaaccctttataagaaataaagtcagcctggcacggtggctcatgactgtaatcccagcactttgggaggctgaggtaggaggatcacttgagctcaggagtttaagatcagcctgggcaacataatgagacccccgtctccacaaaaaataaaaaaaaattagctgggtgtggtgtgagagcctgtggtcatggcatctggcatgatttttataaagatagttttattttaagtataagagtagtttttgggtaaggtgtggtggctcacccctgtaatcctagcactttgggaggctgaggtgggtggattgcttgaggccaggagtttgatatcagcctggccaacatggtaaaaaatgcaatgatcctagcccttgcctcttcctgtacttaagatactgtctgacaggattaatgattatgcttctgtgacctataaacagatgtactcttgcacccaaaccttgatgagatttatgctctaatgtaacttctgagcacatttgatgtaatttctgagcacatggagagccgccaccaccagtgtataaactgtcggaaacactgctttggagcagtctagcagaaactccctgaaaggctctcccgggttgcaattcttggtaagacttctgaatagaactaactttaaatatttaaaagcttgtttttttttttctttagttgacataacaaagcataccttagaagtctttttttttttttttttttttttttgagacggagtttcgctcttgttgcccaggctggaaatggcgcgatctcggctcaccgcaacctccgcctcccgggttcaagtgattctcctgcctcagcctctggagtagctaggattacaggcatgcgccaccacgcccgtctacttttgtatttttagtagagacggggtttctccatgtcggtcaggctggtctcaaattcccgacctcaggtgatccgcccacctcggccttccaaagtgctgggattacaggcatgagccactgcacccagccagaattctttttcctcttacagaaaaggaaaggtttcaccatgttggccaggctggtcttggactcctcgcctcaagtgatccacctgcctcggcctcccaaagtgttgggattacaggagtgagccaccgctcccggcctgtacttagttcttttaaagagaaaactggcagggcgcaaaactggccaacatggagaaaccttgtctcttctaaagaaacaaaaattaccgggcataatcccagctactcgggaggctgaggcaggagaatcgcttgaagccgggaggcggaggttgcagtgagccgagatcgcgccattgcactccagcctgggcgacagagcgagaccctgtctcagaaaataaaaaataaataaagagaaaaaaatactgactttcagcaccaacttgtggtcccaggtaagtttccacgctggtactttagccctgggctcgaacctgcggacacgctgtggctgcaactccccgcccgccagacctcagtacgcagcgcggctggtgagaaacataatgcactctgacttccacgcgtggaatggggagatggactgcacggcgggcggacctgctcgggctgatggacggcaggtggactgatgtgcgcagggactggcggcagcgcggtcagagccagtcagccaaagccaggccagcacaatagactgtcccggttcccgccaggaggcggccgagcaccaactgtacggtactgcgcctgcgccgcgaccgccaacgcgcccagtctacgcttgcgcggcgcaacagggccgactgcagctggaagatggcggcgtccgtggtctgtcgggccgctaccgccggggcacaagtgctattgcgcgcccgccgctcggtgaggtggtggcgagagcgcggggcttcgggacagggcttcgggaagcggacaggtgtgggctgttagcagtggcaggtcgaggtggggaggacgcggggtcagggccgtgggaaggtcacggcggagggcggggaaaggtatctcgccgcttgcctaggggcggggttcgggggtcctcctgaggacctgggaggtggggagcgatcccctgaccgagtcctcactcgcggctgttcccttccacagccggccctgctgcggacgccagccttgcggagtacggcaaccttcgctcaggcgctccagttcgtgccggagacgcaggttagcctgctggacaacggcctgcgtgtggcctccgagcagtcctctcagcccacttgcacggtgagttggggacgcttttggggagagggcctccaggttgggcctgccgtcttttccctggttggggtgtgaccttgggctcgagtcttcccgtttgtggtttgggttcggacccaggaccactcaccccgagaatggccccattccctaccctagccacgccttggcttcacgggacaatcttcactataagccaacattatttagcatataatgcccgttaagtaggcggccaaattcttttccagccttttgttaaggagcccatataagggaagtgatcatgtctcctcttataatgcggaaaatgggattcagacaccttaggtgacttgcaggggtccaggtctgtcagcctcactgcccaaggtcataatctccaggctagaccagaaatacattttaggaagcaaatgcattttaacagtacaatgaaatgtgtgattttccaaaaaatacaaattctctaaattgacacaagaaatcttgagtcacagatagatatatgaataggtgagaagattcccaagaaataattatctcctcctcctttcagcccccagccccagggccagatgtttttat

SEQ ID NO: 9575 - DNA, 6000 bp, Homo sapiens
tgggaaggacctggttcttttgcttctcggggaactgtaagccctcgcgttctgggaatcgctctctgctgctctttcctggaagctaagcctgtctccaccgcccgaggcctgcgccggtggctcccgccgcagttgcgtttgctttggaccttgcgtgcgggggagggggtgctcggtccgagcccgctcctttctgtacacctagcgctgcccgccccgcttgtgtctgaggtcgtgtatgtcaaaaataaagccgctagaaacggaggcgagtctgtctttgtgaaaatcccgtggcccgggagccttccctggtcaccctcggggcgaggccggggccgtggggcggggccggcggctgctggaccgcggcgaagcagggaacaaggcctcgcccttggcgccagttccgcctttggatccgccaatggccagctgacccgcgggtcccggcccgggtctccatggcagcccggcgtactcgggcgctcattggctacgtctgtcgcagcgctgcgctccaacgttccgacgccggcggccgtgccacgtacgcggcagccgattggcccgcggtggtcgcgtcactgcccgcgccgggtccggcctgagttcggggccagcagccgtctacccggtgtcgcgttctgtgttgtggcggccctggatccggcgtcagggcgaccgggcggacgaggtggagccagagtctgtcaggcgggttggtgaagggcgcggggccgggcacggcgttgggagtgcgcggcagggaccggccaggcgggctgcaggcacctcagagcccgggacaccccctcaacgtccgcaggcgcgatgaaggcactgatcttagtggggggctatgggacgcggctacggccgctgacgctgagcaccccgaagccactggtggacttctgcaataagcccatcttgctgcaccaagtggaggcgctagccgcggtaagaccctgggtcgggatcagagtcgcgttcggatctggcgggactagggatggccagcgactaggggtcaggggctcccgtaccttctgactgagcccgcccgtcggcctgcgttctgacaggcaggcgtggaccacgtgatcctggccgtgagctacatgtcgcaggtgctggagaaggaaatgaaggcacaggagcagagggtgaggcacagactcttggcccttattctcggtccccgcccaacttcccatcctggtagaacctgactgggggggcctcttccttccagctgggaatccgaatctccatgtcccatgaagaggagcctttggggacaggtcagtagaggcagaaaggtcccttgggggagggtttaaggccaggaaaagggtaagacccagcctggagtgggcctgctgagcctgaatccagggactcagacctccagcaaggtggtgacctgtccccttcccccagctgggcccctggcgctggcccgtgacctactctctgagactgcagaccctttcttcgtcctcaacagtgacgtgatctgcgatttccccttccaagccatggtgcagttccaccggcaccatggccaggagggctccatcctggtaaggcgccaggtcttctctctcttgacactttcaccctccatgcccagcctcccatgccccctagccttcatctgccttcggatgttatggatacagagctgtgcagtatgtatctttaagcacttggggcagagtctcttgagatctggaacggcatgtgtatcaaggcttaggaacactggactaggtccgaggtccccttccttgcattcaggtgaccaaggtggaggaaccctccaagtacggtgtggtggtgtgtgaggctgacacaggccgcattcaccggttcgtggagaagccacaggtgtttgtgtccaataagatcaacgcaggcatgtacatcctgagccctgcagtgctgcagcgcatccaggtgtgtaggagacagctgttggtgggctggggtggggcaggccatcaccgccatgaccctgctcacaagctgcccactcccacagctgcagcctacgtccattgagaaggaggtcttccccattatggccaaggaggggcagctatatgccatggagttacagggtgaggcagggaggccacagggtgggggtggtctgtggctgggctgaggcccctgatgcatccctccctacaggcttctggatggacattgggcagcccaaggacttcctcactggcatgtgcctcttcctgcagtcactgaggcagaagcagcctgagcggctgtgctcaggccctggcattgtgggcaacgtgctggtggtgaggcccttgcccagcccatcattaaccccctcagtcttgggagacaagtggcccacttgtatttttcccaccgctctcaggacccaagtgcccgcatcggccagaactgcagcattggccccaatgtgagcctgggacctggcgtggtggtcgaagatggtgtgtgtatccggcggtgcacggtgctgcgggatgcccggatccgttcccattcctggcttgagtcctgcattgtgggctggcgctgccgcgtgggtcagtgggtaagcctgtgggctgggctgggtggggagaggggcggggagtgtgcctgcctccctgacaaggcctatcctctcctggaggtacgcatggagaacgtgacagtgctgggtgaggacgtcatagttaatgatgagctctacctcaacggagccagcgtgctgccccacaagtctattggcgagtcagtgccagagcctcgtatcatcatgtgaggggatgcagtggggctggccgagccccggttttcccatcagcaaggggagtgctggcctgacacatcagaagaccctggacttgtcattatttgtctggggggcactgggtgaagctgaagctgttggacacctgccttctcatgtggacatcatctggcaggatccctgctgggcacaccccacaaaccccactccctcaagaagggccagggccagggctgtatggaataataatttaatgctcactgtggccctgactgaaagtcaagctcaggcacaattagggccatggctgggctcccaccaatgaggatacaggcaggcaaggaggttggatgtggtggtgtgggatacaggagaagggcaaagggagctcataaatagggcccagcctggctctgggttcaaaggtggaggttccaggatggcacaggctgtgagggctaggcagctgaggaggtagtactcgtattggctcccttctcccagtcctctacagacacgatggtggttttgcagaagaagcagtccttgttgttcatcaggtgctggttgatacaggctctacaacaggggaggggatgaggactgccctgcatgtacctactgctctccccaccaccaagctgtggggcccacttacttgcaggacttgtggccacagggctggaacacagcagagatggggtgggcatagcagatggggcagaggtcctcctcactggtgggctgcagggaggagagtgaagggtgggctggagttggatgcctggctatgtggatgtccgttgtgcctgtgtaggagtgcacacatattcaagtggcatggacctgtgcaccgtgttcccactcaccagggaggcagctgctgcctgggcagatgcagaggtcaggtgcgccagcatctgttccacttgggccagctcatcggcactgatataatccgcatctggggagtggtaggtagtgtcaagtcagaggtagctgaggatgtgatgcctcttgaatattcccagcctaggactttgctgttcttaaggctcctgacccgacccagccccagatttccctgacctgccccaccagcccactcacagctctgcagggagaagcgcttccggtcaggggctggcagagcagtgccaggtgctgggggctctggctgtcccaggagatagcatattgagcgtagctggaagcagggatctgccaggagcactgatgtggcttgctctctcctaggtaggggagggtgcaagggcagtcagaaggcttggggcctggctaaaagtctctcttgggattgccaatgaggagtgccatggctcgtacatgatcaccccccctgcatcctttccgtctccctgcttcccaaaccccaagtcctgtattctagtaaggtgccacacagcctgttttttttttttttttcttgagacgagtctcgctctgttgcccaggctggagtgcgatggcacgatctcggctcactgcaacctccacctcccgggttcaagtgattctcctgctttagcctcccgagtagctggaattgcagacgcccaccaccacgcccggctaattgttgtatttttagtagagacagggtttcaccaggttggccaggctggtctcgaattcctgacctcaggtgatccacctgccttggcttcccaaagtgctgggattacaggcgtgagccaccgcgcccggcctggggtaccactttaagaaggctcaggcgaaccaccttaagatagtgagagtctgcctgccccataatattatcagtccttcaaagtcacttcaaataaacactaacagcagcttggagacattcttccagactcccccttttactccccgaggaaaaacgagcggcggagagctgccagccaaaggctgacggggactttggggttggccttgctccccatctggcggtcatgcggggccattgggcacaaagggatgtagccgccccgcctcctcaaacgggaaccaataggagcccgggccccgcccctggggggagtatttaggagccgatcaggaactcgcttggagagggctagcgaagccgaagggagcgcggctaagagtgccgcaccgcctcacaacctgggaaccggagagtaggggccgtcggctggcaagaacccgccgtgcctcctcggcaagggccatccggtgccacccatgtcgcactagagcagaagagggtgagtcctggaactgcaacctgcacagagctgctctgtactgtccctggtggtcgccgccatgacctggttggtgctgctggggacactgctctgcatgctgcgcgttgggttaggcaccccggactccgagggtttcccgccccgtgcgctccacaactgcccctacaaatgtatctgcgctgccgacctgctaagctgcactggcctagggctgcaggacgtgccagccgagttacctgccgctactgcggacctcgacctgagccacaacgcgctccagcgcctgcgccccggctggttggcgcccctcttccagctgcgcgccctgcacctagaccacaacgaactagatgcgctgggtcgcggcgtcttcgtcaacgccagcggcctgaggctgctcgatctatcatctaacacgttgcgggcgcttggccgccacgacctcgacgggctgggggcgctggagaagctgcttctgttcaataaccgcttggtgcacttggacgagcatgccttccacggcctgcgcgcgctcagccatctctacctgggctgcaacgaactcgcctcgttctccttcgaccacctgcacggtctgagcgccacccacctgcttactctggacctctcctccaaccggctgggacacatctccgtacctgagctggccgcgctgccggccttcctcaagaacggcctctacttgcacaacaaccctttgccttgcgactgccgcctctaccacctgctacagcgctggcaccagcggggcctgagcgccgtgcgcgactttgcgcgcgagtacgtatgcttggccttcaaggtacccgcgtcccgcgtgcgcttcttccagcacagccgcgtctttgagaactgctcgtcggccccagctcttggcctagagcggccggaagagcacctgtacgcgctggtgggtcggtccctgaggctttactgcaa

SEQ ID NO: 9576 - DNA, 6000 bp, Homo sapiens
ctgccctaccctacccccacccccatattcagtctgagcttctgctgtctgcctctcttatcactcctgggaggggccccctgctgcatgccacaaaagactactcaaccaccttcagagccctcgctgtggctctgtttaatgggttgctgtagttcagcagaagctgagttgagtaagatacagatggtcaaaatggggggagtctgagccctggtactggatggagcccctggtgaggcaacccagtcttcagctgaaattcagaatccagtctccctttagctgcaggcctctgaggaaactgtccctgctcaggccttcccatgaagggctgtatgcctcagttctcctacctcagccagtgcattcctccaaatggtcctcaagagtgagctgagggtctgagagaaggcccagttgaccctctaaggcagaagtgggcctgccataataagagctaatactgctacgtgcactcggccctccttagtcaccctagtccctggcatggcataggcagacctgcatggggcaccatggacatccaggaggctcggcagtgaaagcccagccccatttactctaccacaggacccagggcacaatgcagagagcttccactttgctgccgggggatcttctagttctggccccagggaacacaaggcctaggaagtacttattggagaaaactgtcctctgaatgtggtcttcagactgtcagagagaatcaccctcatgcagtttctgagagttgagccaatattttctgctactaaaatcaagccatattgaagaatgagcctgtgtgggtgacatggacccagggtacactggaacagttgtatttattgtcccagaaaatggcagcacagcccctgcccttggccccactgtggctcacattggaatgggcatggcagcaggctaccagcccagattccaaagcctccggggagcagccataggcttggtgggtgctgttcaccctgcacacatgccctgggtctcttttatgcctgttttctgcttttgttcctcccctgctcctagtaagaacaccaaaccactgcctctggggcctgggtgatgccaagccagctgtccctgattgttactggcattctggtcaacagtgagcccctaagtgcctcttttggttgccctgactcttgtaggtttctcagcttctgtgtagttcagcatatattctggggagatcatagttggataaatgtgtatacctaggactataggcacctaggagtgtggggtgtacctgcttggagatcaggggtgggaagacagacaaatagggaaggtgttcgtagtggaagagccagcatgtgcaaagggaaggacctggtaagaacctagtacaggccgggcatggtggctcacgcctgtaatcccaacactttgggaagccaaggattgtatatcactggaagtcaggagttccagaccagcctggccaacatggtgaaaccctgtctctactaaaaatacgaaaattagctgagtatggtggcgtgcgcctgtagtcccagctactcaggaggctgaggcaggagaatcgcttgaacccaggaggcagaggttgtagtgagccgagactgcgccactgcactctagcctgggcgacacagtgagactccgtctcaaaaaaaaaaaaaaaaaaagaacctaatataacttgtttgcagtgaagctggagtggtccacacaagggctggggttctcaaactccaggtaacctgcagtgtgatgtggtcatattacagttagagagactcccttgctactgctaaggtgatcttgggattagagaaagaggttagacctagttctctagaacagtgttcagaggggactgagagctcaaggagggaaaagtggctagtattccttcaaggcgtcaggtgctagggcagtcgagcaggttcttagccagctatgttagcttgggggtgcccttgtacttggcacttaagagtcccattagctgacctcccccacacaccttgactgccccctcctatagaggcggcagatggcgagagggggaaggggtgctcctgtgtacccctgctgttgagaaccaaggctgccttacaggggacctcagcctggggacagccattagcgcggccacacggtggcagcggagaactaacggatggttgccgcaacaccacccccaaaaaggggtgggtggggtgatctaagagggcttgtgaagtcttctcccaaccaccagagatccctctgaaagtctggaggtgggatttgggtcaccagaacccctgtctgtgcgccaggctgagaatgtttcattttagttttgccttgcctatctttagatgtgttgactgtggaatgcaggaaccacgccacggttttctccgggtgtttattcatttcctggccaattctgctttggaaaaggagtgtcttttatgtcacctcagggcacagtatcaaccctgcactgggtgtggccgcccccacttccatttcctctttcagtcttcaggtgctcatggagctccaggctggaaggagggggagtcctgcactggggatggaggaagtgaagtatccagagtaaactgtgctggggtgagtgtagcactgggtctgtgagacccaggagaggggactggcaaagtctggatcaaaaaggcttcctggaggaggtgccatttaggtggcaaaaggagaaaagggaaagagtgctcctggaaggaggaacagcacttacaaaggtcaggttaggaaggggatgcaggcacagaagtatgaactgaaaggggagtgaggagatatagctccccaagccaggctaaatcctgttgggctgagggctcctctctcccccagcctccttatctacagccttggggcccatagttcacagcccagacccaccctgtggaccttccctgtcttctagggtccaggcctatctaactgaggggtctgtcaggctaaggttgtcccccaggggcctcagtctagtgttgggggaccagttaccaaggggcagctgctgagatccaagtgtgggactaggctcccccacccccactcctcataaacagaagagagaactctgggaaatcacctagtcggaactacgttttctttttctttttttggagatggagtctcgctctgtcacccaggctggagtgcagtggcacaatctcagctcactgcaacctccaccccctaaattcaagctattctcctgcctcagcctccctagtagctgggattacaggcacccaccaccacgcccggctaatttttgtttttagtggagatagtttcaccatgttggccagatctgtctgttcaccatgttggtcttgaactcctgacctcaagcgatccacccgcctcggcctcccaaagtgctgggattacaggcgtgagccaccacgcccggtcacatattttattttaaaaacatttttagcagtttttttgttttgttgagttttgttatgttgcccaggctggtcttgaactcctaacctcaagcaatcctcctgccttggcccctcaaaggagtgctaggattacaggcatgagccacggtgcccagcccagaactacattctcattgaagagaataagatccagcaaggcctacagagcatgttggaagtgtcctgagagccaaagcccatgattcctccatatcaggggggcactgggtagagccaggaaggaagggggagtccccaaggcccatactgtggaccccattatacagcttccatatactgaggctgcagaggaggtatgggcctccacttacgtgcctctctgactctgaggtccagtcagcaaggccagatcccatcctaagacccttatggccctgggagagcagggcataacacaccttcctctgacaccatcttgtcgctgatagctcaggagaagcacatggaagaatggtcccggccgggcgcggtggcttacgcctgtaatcccaacagtttgggaggctgaggcgggcggatcacctgaggtcaggagtttgagaccagcctggccaacactgtgaatcctgtctctactaaaaatacaaaattagccgggtgtggtggtgcgcgcctgtaatcccagctattcaggaggttgagacaggaggaggttgaggctggagaatcgcttgaacctgggaggcggagtttgcagtgagccgagatcgcgccactgcaatccagcttgggccacagagcaagactccttctcaaaaaaaaaaaaggacagtcctttcccacaaagggtggcgccccataacatctcttgtaagtgccccacatctcccctctggtcttccacacaatcctggtctctgttctccacatggtgggcccccaggccacctctgggcaccagccactgagggtgttgctactaagtgcaaactagttccaccgcaagcaaagagcccagtgtcctgccccccttctcgctgcgaaccagtcggtagtggggggatgggatgggacggctcagactggctcacctctctccaggccacaccatgcacatccacccacaggccgctgagaaaaaggcgccaagacgccaggtgaaggtacaggagccaggcctccaagggccggaagagtcggatgggcggagggcctgggctaggccaagccttcctcgcggccccgcccccacggcccgactccgcccgcccagcccggcgccctcgggtcggctgagcgctaagcgccagtgtacagcggcggctggggcggcaggtgaggcggctggggcgttgctgtcgtgcgtccgcaggcgtcaggtgctcagacccgagggccgggaagggatttgggtttcacaggaacctggggcgggggtccgctatcttggggctgtcgggaccgctgcttaaatttggcccagtccagacctcgagtcgggcccccagccaggcccacgcccaggtccaggcccaggccggtagggatcctctagggtcccagctcgcctcgatggagctcctcccgccgctgcctcagtccttcctgttgctgctgctgttgcctgccaagcccgcggcgggcgaggactggcagtgcccgcgcaccccctacgcggcctctcgcgactttgacgtgaagtacgtggtgcccagcttctccgccggaggcctggtacaggccatggtgacctacgagggcgacagaaatgagagtgctgtgtttgtagccatacgcaatcgcctgcatgtgcttgggcctgacctgaagtctgtccagagcctggccacgggccctgctggagaccctggctgccagacgtgtgcagcctgtggcccaggaccccacggccctcccggtgacacagacacaaaggtgctggtgctggatcccgcgctgcctgcgctggtcagttgtggctccagcctgcagggccgctgcttcctgcatgacctagagccccaagggacagccgtgcatctggcagcgccagcctgcctcttctcagcccaccataaccggcccgatgactgccccgactgtgtggccagcccattgggcacccgtgtaactgtggttgagcaaggccaggcctcctatttctacgtggcatcctcactggacgcagccgtggctgccagcttcagcccacgctcagtgtctatcaggcgtctcaaggctgacgcctcgggattcgcaccgggctttgtggcgttgtcagtgctgcccaagcatcttgtctcctacagtattgaatacgtgcacagcttccacacgggagccttcgtatacttcctgactgtacagccggccagcgtgacagatgatcctagtgccctgcacacacgcctggcacggcttagcgccactgagccagagttgggtgactatcgggagctggtcctcgactgcagatttgctccaaaacgcaggcgccggggggccccagaaggcggacagccctaccctgtgctgcggg

SEQ ID NO: 9577 - DNA, 6000 bp, Homo sapiens
ctatgaggagacaatcgtcaccaagaacgggcagaagcgggccaagctgaggcgagtgcataagaatctgattcctcaggtgaggggctgggcagcggtcacagagcctacactaagcgtgtggaggtggacccagatgggatctgttgtcatggtgggggcttttgcggggggatctgggaggaacaaggaagcttcctgaagtagaggccctgagctgacccttactagcctctgtttccatggcagggcatcgtgaagctggatcacccccgcatccacgtggatttccctgtgatcctctatgaggtgtgaccctgggaggtggcagacagaagcaccccctgccccggcaagaaactcccaggctcaatcaaggtgtggcttccattgaggagcccaggctggggccacaaccctgaataaactctgttggcccataaccttcagctgtgagcgggtcggtcccacagtattggttgggtgttggtttgtgtgtggacaagaggtggttggtgggtggtgaaggctaatggcagagttagcaccccactctcccaagccacccctgcaagcagcacagcagggcatataccagtcaggaatgcccgttacctggttccttgcctggtctgctttcttccaagtttgcctggggcctagccctgctagaggctacagcactttacaagcaaggtatgctttcttccagcccctaggctgtgggcactgtatacaagtaggaacttcctttccttcacttcccttttaacccctagtcagagcatttcagccgtttgctacctcgattcctcctgtgttggacagaggctgggggcagtgccagcctgattcttccgacctacctgccatttgttcccgccttcagatggatggacagtttgctggctattgataggagtggggactgggtgggggcttctccctctacccagggctgggctgatccccctactgcaactaactgttgccccccaaccccgaacccccagttgaggagttgagagagtgcaggctggggtcaggacaggctgcggatgcttgtgcctatggggagttactccaacccacctattctgtctaatctccatggctttgcaccaaatcctccacccctccaattgggaggggactgttcaccaccttgtggtaagggacaacaccctaaggctggtgccagtagttatgagtagcctaccaccccctcccttacagtaacccccaccccttcaggatcagtcaagggaaagcactagaacccctgggtagggaaagaaaggagggaaaaaccataaaaggaatacttataatgtgaaggtttgtaaatagtccatgatgatgtcgtggcagagtctgatttctatatagaggtgactttttttttaagtactgtgcaagctctgtgcttctataatgtgggaaatggcttggggaggatggcccctagcttaggaagactgttgtgttatttgttcaatttcaataaaatgatttgtagatcctgcacatgagagtggcatcctgtgggggctctgacacccagtgtctagactaccacctgggttcaataggtaggcctggcacaggactctggcaggccccctatgaccagcaaagcccaagagtaagtctgagcccagcctgtggccatcccaactgtggccagcaggtggctgtgtgttcacacagacctcactgcaggccccctgcagggtgggagggcactcatttatctgttgtgatccatgtggtggtgacccttggaatcagaaggccctgggatacttcactaaggattggccccacctgcctgatctaaggtgagagagtgtgacccaagatagttctggaatatctgtcttagctgtagcatcgccagctgatcctaagtggggtcatggcctgacccccatggacctcaaaggcccagctttaatggacagcagccagataggtgtccccacgcctttggcctactgccaggctcagcaacccaaactcatgtgcctcctctgaggcctgcctgcggacaccatgggagaatgagctcaggctgctgtttcagcaagcaaggctcggcccactagtattgcccctgctgtctgttgcccccatcttctcatcacctgcagcctgcccactgtggtcattctgcctgcacttctcaggggctgctataaggcagattctctactaggcttaggctttgactatcagtccaactcccagttaaagaggggagatttcagggacaggcttctgagtgtagggagctggtctgccagtctttcggaggtttgaacttgtcaaggctagggcaggatcaccatatccagcctggacttgcagttctgtggggtgcctccccatacccccataagatgccaaacatgaggccctgtcatcctccatggtccccctctactggctgttcaaggcccagggctctcccatgccagatagcatcctgtctcctaccaccactgtcccagcctgagggaactccctgtgctgggcctacccagctgaccccatcgctggaaacaatgggggtcaggcaacacttccccactctctcccgccgggctgtgctcacttccttcctgctggctgcctgaggaagtgtccctgccctgggacagtctggcctagcctttgtttccccgggggtccccacccatggagctttcaaggcttctggcccctgtgaagccagcacagtggtacagggacactgcaccttcccctaccatgtcttggactccttggtcctcagggccagactcctgggtattcacctacccctcacacagccttctgttgggggagaggctcctgggcattgggccattgggttgttgaggggttggctctgggtgatttgagggtaggtagatttgcacccctggagaggtctgctggaaccttgctgcagtcctccctagggccagccacaggaacacccctcccagaggagtatacccctttcctcatccatgttgtaaggagccccctactctgtatagtggactctgaaatccatccaggaatgaactccagcaggaaagcactctgcagaaccctcccagtccatcccctcctccccaacccacacagtcacactcactaacacattgtcctgtcacacaggatgcggaagctctcagtggaaaaaaacggactcagctactggaagtccccccgaccctccccccaaggctagttcccttcttgggcacctgctctgggggaccatcagctgaacgacccccaagtattttgactcccaaaagcaccaccacctgaccccatcctctcacaccctactggatttgaggatgggccccaatcctagggaaggagtgaagaggttccctagtgttggaagctgtgggtgtgggggagattggcacctgatcctgagcccatagccttcctgtcacctggcgcagctggcggggccagatcctactcgggaagggtggggagggcagccagccagcagggcattctggagggaaacagggtcaaggcgatctcctcccccacgcctgttcctggccctttcctctcagggggcagcaggaagtgaggagaaagggctgggatgggaggcgggagcggatgggagggaatggggtttatcaagtcctcggcgagctgcccaacgggcagcagctggcgcaagtagcctagctggagaggctcaccccaggaaggagggaggccaccgacctactgggccgacggactcccacacaggtgagcccagagcagacggctggtctgcacccccacagatgcgctcgcagttgcactccctccctctcctggcgcccgggagggttaggggctggtggtgcagacgcgggcccttttgggagttgagtctcgcacaagggagcggacctaggaagagccgaggtggtttcgcacggggctcgccagggtctaagcctgccccccaccgggagaggcctgtggagcgtagggggcgctggatacgggatggaggccctgggagacccctcttgctggctttctcggaggtccagccagaaactgctgcaaggaatggaggcctcctcggggttgagagggagccgggctcccaaaggacctcagagactgggcagaaaaggacgggatctcagggatgactgtcccgccctgatgcgagtcagggagaggggcggccaacctcctagacccctctgagcttccctgaccccaaccctgcggccacgccgcgacccagagccgggctgccaggataacgactgcctcggcccttcctgggccggctaagaagcggtgcttggccccttccctcagtctggcagggggcggggcctccctttagacggcggaccagagaagggggcccctgattcgtgggaggcggggcactactctccaggagaccagaggtcgcctcaggtcaaagtccctttttccacacaaaggggacccacggctggcgtctacgttagggggtgcagagccagatctggtgctgccccctgccaacctcggagtaccacagcacctcctgatggccgaacggggcaacgcctcctcctattcccccccccccccttcccgtccccctgccttgtccctcacactgtctctttaaagggctggcggcgccgcggagctgggaggactgaaccaccggcctcgggctgcaggggaaacatttcaggctgactggcgctcgtggctgagactcccatagaaagcccggctcagaggggcattagggtcctaaatgggcggccacgtccctctgcagaggacctggggctcttcgagcccgaaacgaggcaccggcaccgagaaaggtggaccacaccttcccgccccgtccgcaagtccaatcccgggcccacctccgcactggagtcttaaagggccagcgtgcctgggggcggagccagcagaggcgctgagccgggccgcgcctgggcgaacggccggagcgggctgggctgggcccgggatggcggtggccctggcgccggtcccggtggcgccccgcgcgaggtgagggcgggcggtgcaaacctggcggctctctccccttgggctggggtctgaatccccgggggtgctcgcggagaggcgtcccagaaaccccacccccacccgaccgggcgcaggccccacgtgtggggcgggggcggggtcccgcacaaagacccggcggagcgcgctctagccctgagcggccgggcgggggaggcgagcgcgcgcattcccggtggcggtggagggaagggccgggcggccggcgccgccgtgggaggtccgctgcccctttgtccctacggggcctcctccaagccgggagagtgtcagcgctcgagagaaagtccggagagcctcactcttctgccgggcgagtgttacacggatagaagcctcccggcagcgttccttccagtttcgtagcctcttgacgagctgttccctgctttacccaaatgctgtcgtttctctggatcaagggttcttcacggtgtacagggtgggcatcagctgttcagggttctctgaaaccatgtactggatggtatgcaggcatatatgtgactctggtgagcccaaattatctagttcttagaagggtcacagacctaatagagatttgtgccgagccacaggctacctgctccagaaaagagccctgtgcttctggcagtgagttcccagggtgccttgtctgccctgcagtggcctgtggtctctcaaacctattacagccatgagcacagtgcccccacacagcatgggctttgggagcatagatgggcttgaggtgggcacttccagtattccctagactgacttgttctccccaacccttcttccagttcctgagctggtgccaggcaggtgacacctcctgcagcccccagcatgcgggcaggcccaggccccaccgttacattggccctggtgctggcggtgtca

SEQ ID NO: 9578 - DNA, 6000 bp, Homo sapiens
tgttcaagtgtccccagacccttcttgcctgctgggctccccccagtgggatgggacagggaggccacacgcactggtgccaaaaccaggcctctgctgccgcccttcctggaggctgcctatgttgggggggaccctgcctcagctgacccggcctctctgccccacccaagcccaaacttggtttctgtgagaatagtggaggaaggtgagatggccagtttgaagcctgtgcctcccagcttaaatcctagcaggagagaggctctggggcagcccccatgggctcctgcccctttcaggcctacagccacatccccaagcccaccaggtgtcaggatagtcacagtgataccagttcagacactaccccatatacacctggaacattgaggatggaaactggactcacattcgacataccccactgggcacacgcacaaacacacacactatggggtggggtgggtgtaggggcttacaaagccttacacagggcgaggggttggtgggagggttggcacctgcacactccatctcctgctcaccacctgcctctaatctgagctgcagcctggctggtcctcccatttctaaagctgaatgtcaaacagtgccaaatgctggggcagggggtgaagaaccctctgtcccacccctagccaccagtgtcctccaagtgccccctcacctctccaggtgctcattgtaaccatttctcactagtgtcaggcccccagtgggaccacatgccactgcctgcacctttcggcagaggaacccccaccagacatcaccctttgccttagcaggggtgactttgtctctcctggctgggccatccttccgccaatctggcccttacacactcaggcctgtgcccactccctatctccttcccacccctacacacacactccctgcttgcaggaggccaaactgtccctcccttgctgaacacacacacacacacacacacacaggtggggactgggcacagctcttcacaccattcattctggtcatttcccccaaaggcatcccagcctgggggccagtggggaactgagggcaaggggatatagtgatggggctcagatggactgggaggagggggagggtgatgcattaattaatggcttcgttaattaatgtcatgttgcttgtcgctttctcagtgtgtgtgtgtggtccatgcccactgctggtgccagggtgggtgtccatgtgcacccggcctggatgccagctgtgtccttcgggggcgtgcgtgtaactgtagtgtagtcaggtgctcaatggagaatataaacatatacagaaaaatatatattttaagtttaaaaaacagaaaaacagacaaaacaatccccatcaggtagctgtctaacccccagctgggtctaatccttctcattacccacccgacctggctgcccctcaccttgggctgggggactggggggccatttccttttctctgccctttttttgttgttctattttgtacagacaagttggaaaaacaacagcgacaaaaaagtcaagaaactttgtaaaatatcgtgtgtgtgattccttgtaaaatattttcaaatggtttattacagaagatcagttattaaataatgttcatattttcacttcaaatggttcccatccactgtatcagcttgggggtgaggactgggtagctatgaagacagttggccaagacctcagagtcccacttagtgctctgcagggggtgaagaccatggtagcccaggtccctgtcaaccacagggcatggcacttgcttccaccagttataataggtgccaggcccttgacatacattgtctcataacatctcaaaaagctgtcttttaaaaacaagcaagacaggctgggtgcggtggctcatgcctgtaatctagcattttgggaggccgaggcgggcagatcacttgaggtcaggagtttgagaccagcctggccaacatggtgaaaccccgtctctactaaaaatacaaaaaaattagccaggcatggtggcatgcgcctgtaatcccagctacttaggaggctgaggcaggataattgcttgaccccaggagacggaggttgcagtgagccaagattgcgccaccgcaccccagcctggatgaccgagcgagactcttgtctcagaaaaaaaaaaaatacaagcaaaacaaacaccctcccagagcctgaaagccaggaccctggagggaagaagacagatcagagatgctggtttagtggggaggtggatctggcagtctggtcagaccaccagggcctgacagggcctctgccgggagctatgagtgagcacctggccagtgtccctacggcccaggaagccctgaccacaagtgcagcaacggctccctcctggcccacaggagcttgaggccgcagctgcttaaactggagccataggccaaacttcatttttgtgaatcctctcaagcttaggccctagttcattttcaccctagaaggtgtgacctttgcgatcttctcatgtggagagaattataacctgtaaccaccagagcacaggtgtccctgccttcccaccacagtcctctctctcctcccaacactctgctctctgcgcactgacctggctgagtcctcgccacagtctctggggtgggtactagtgtatccccataccacagatgagcaaactaagaggagaaagcctttccccccaggtgagaaggctaaaaaccagcaaagattttagagaagaggtggccaccaagggttggggagcttggatgctaaatagatgaaggggcttcgaggcctcagccaagatggagactttttctgtctcctctgcagggttcggctgcagagcaatgcctaatccacaacccccaagacagctcccatggcctgcaagagaccgtgcaatcttggatagggttgtaagataaaatacagaacaccctattttgaatttcagatcatgaacgagtttttagtatggaagtgtttcaactattgtgtgggacatacctatactgaaaaactgggggctgggcacagtggctaacgcctgtaatcccaacactttgggaggctgatgcaggaggatcgcttgagctcacgagttcgagatcagcctgggtaggatggccaccccgcccctgcccatgtctctacaaaataaaaaaattttaaaaattagctgggcacagtagtgtgtgcctgtagtcgcagctaatcaggaggctgaggctggaggatcccttcagcccaggagttagaggtggcagtgagctatgattgtgccactgcactccagccttggacaaagctagaccctgtctcaaaaaaaaaaaaaaaaaaaaaagggggcagggggacatgattatactcgaagattactcattgtttatctggaattcaaatttgactgagcatccttattttgatttgctaaaactggcaaccttacccagatgtggcaaccagtgggaacccagaccccagaaaaaaagcatcagcaccctttttaacctgtaggccatgcacacatcagcacacactgaaatcagtggctgaaaggaagggatcctgtgttttataaaagcactttgtcatagaattattttaattatatggacagctttttgttttgttttgagacaaagtttcgctcttgttgcccaggctgtagtgcaatggcatgatcttggctcaccgcaacctccgcctcccgggttcaagcgattctcctgcctcagcatcccgagtagatgggattacaggcatgtgccaccacacctggctaattttgtatttttagtagagatgaggtttatccatgttggtcaggctggtctcaaactcccgacctcaggtgatctgcccgcctcagcctcccaaagtgctgggattacaggcgtgagccaccgtgcccagcctatatgtacagttttttaaaagtaactccatatacaaaaaaaaaaaaaagacacagaacacaacctgtcagaagtcactgtggcgtgaagtgggaccagaacaggcctagcccaggcttgtggagagacctggcttgtagagagacctctcatcctccgcagttatcagaagtccctggtggggaggagggtcactgagggctgcccagcctcgtccctatgcgggagggagccctaggttcgtgctccaggtccacctcacttggaaaaagggcaacgtgaaataacaaacaaaaaacttttccaagtgggagaaaacaaacaaaaaaaggcaacatgtgcagcactcgctgagcacccagggtggactggcattttacacccctttcccctttgattattaggacaggaagatcatgtcatcagctacattttatggcccatgaaactgagtttcaaaaaggttcaggaacttaaccaaccaatgccacacagcctccgaggcagagcaagggttccagcctgggtcaggtcccattcaccagaccacggaggttctgtttctcacacagtgacacctacccacacgccagccaacaaggacacactcgctcagaggtacacgcacaaatagagctactcttcctagggaattcagcaagtgtgggggctagagctgtgttgcttcccgaaccctcaccgccgctttcaggggttagagatgctaattcatcccttcccacctcctgagaaccgacggaaacggtccctgagaactacaactcccagcacaccccgcgctcaccacaacgggaccggtccgtgctcatggcctcctgggacttgtagttctagccagaaccctgttcaactcttccccggctgcaaccaaggactccgtatcccagcatgcagaggagccggaagacaggcgcttagaggacagcccgctgccgccggggacgcgcaggcgcagcacccctgtttgtcggccccccgagagaagaggtacggtcgaagccaggagccaggccgagcgggagctgaccaggcttgactcgggtacagaacgaggcaccagtccccttgcgaaccgaagggcctcgcagtggatggaggaggcccagccctgaggtcaacgccaaccaggctagcctggcacggggcctacagggtgggtaggcgggcgtgccgcagccgtccagggccttccctcaggtcccgggcgaggggcctacgctgcggcccggcaacaaggcccgactcggcccctcgggaccagagccccacccgatcggaagcggatcctttaccagggccataggccagtgactaggccgggcctgggcctcccatcggggccggactaggacgaggccccggggaggcccctggcctaccagacccttttctcaggccgacagccgccaggaagatgcaacgtgccctgccaggcgcccgccagcacttgggggccattctggccagcgccagcgtggtggtgaaggctctgtgtgcggcggtactattcctctacctgctctccttcgccgtggacacaggctgcctggcggtcaccccgggctacctctttcctcccaacttctggatctggaccctggccacccatgggctgatggagcagcatgtgtgggacgtggccatcagcctgacaacggtggtggtggccgggcgtttgctggagcccctctggggggccttggagctgctcatcttcttctcagtggtgaatgtgtctgtagggctgctgggggccttcgcctacctcctcacctacatggcttccttcaacctggtctacctgttcactgtccgtatccacggcgccttgggcttcctaggtggcgtcctggtggcactcaagcaaaccatgggggactgtgtggtcctgcgagtgccccaggtgcgcgtcagtgtgatgcccatgctgctgctggcgctgctgctcctgctgcggctcgccacgctgctccagagcccggcgctggcttcctatggcttcgggctgctctccagttgggtatatctt

SEQ ID NO: 9579 - DNA, 6000 bp, Homo sapiens
aggtagtgacagcttgcaatgtctgaaagggttaaactccagccccctccatatattatggtaaatggtactaaactgaccatcggttgatattgcgccaaggatccttgaaaaattattgacgtgtccagaggtagggtcctgtctgattgcatctggaggccactgagcatctgtaccatgctcagacaggggcattttggggaacattgcatccctgggtatccccaaggaactgatgagcgagccatggcagccactggcaggtgcaagtgctggtagtcccccatacgtggaatgaatcccagctgggggcccttggggaccaacaagtccagcacaaagcaggcagagaataggtaccttagagtgggctggatgaggcagggacagcagaacactggccaaggctggggccagctcaacggacccaggtggaggcagagctgggtaaacagggctcagaagggaaaatgttggctcaagtcatgctcacccaaaagaatgtcccctcctcctctccctaatgtgcccatcccaacctattcaacttgcaagactgagctgaaatccctcccccttttccaggaatatttccctgtctgcctgcatacacggcctgcccttcttggggatggctgagtctgttgtctccccttcgctaagcccttgctgaagtaccaagtcttccctcagggtgttagatgctttgggtcttcagaccatccctgccacatgggggtgtctcccactatatggatgaagaaatgggcttgcagaggcaaaatcacttgcttacacaacctgtgatgtctgatgtcaaagctgacacacctcatgcccaggccagaccacccttcctgggcacatccctgggctcccttgacatgccatcaaatgattctttgtttttgtttgtttgttttgagacaaagtcttgctctgtcacccaggctggagtgcaatggtgcgatctcggctcatggtaacctccatctcccaagttcaagcgattctcatgcctcagcctcctgagcagctgggactacaggcgccggccaccacagctggctaattttttttttttttttttgtatttttggtagagatggagtttcgttatgttggccaggctgctcttgaactcctgacctcaggtgatccacccacctcggcttcccataatgctagggattacaggcatgagccaccatgcctggccccaaatgactctatatgttaatacttcctgtgccctcccatggctaagcactgcatgaggcttggaaggggtgacaaggactagggagcctcagggctccgctcgacaagagtccagaatgggctgggcgtggtggctcatgcctgtaatcccagcactttgggaggccaaggcgggcggatcatgaagtcaggagttcaagaccatcttggccaagatggcgaaaccccgtctctactgaaaatacaaaaattagctgggtgcggtggcacgtgcctgtaatcccagttactgaggaggctgaggcaggagaatcacttgaaccagggagttggaggttgcagtgagccgagatcatgccattgcacttcagcctggcgacagagtgagacactgtctcaaaaaaaagaggccagagtgcaggtgtgtttctgaacccaaggcagaggccacagcatactactggccggggcaggaagcaggagggacaggaccaagaggaggaggcccatccagttgggggtggtagtaccccaggaaggcttcctggtataagtggtattaatgggctcataaatatcttgagttcaaatggtagaggtaaaagagggtgttccaggcaggaggaactgcaggagtaaagcccgaggcaggagttttctctgaataaggagctgtccagcctgttggtaaaaggtgagactgggcgcggggcaggctagggtgaaaatcttgccaccacaggcgtcctggatgttcctgatgggcttcctctgaaagggccacaagctgtggagtcaaggttgacaccagccccagtattctccccacagcagggaagagccaggggcctccaggacagaaaggactagggtgtgcagagatgaccttcctggctctggaagaatctaaatagaggctgtgcaaaccccgggagctggggcttgggacgggcctcgagtggcacaactgagcccatggcctgcttggcacatagtagtttctccctatggctctatcagtctcttctgacctgctgagctgacctcccatgcagaactggcacctaccaggccccctgtcagggtagcttcacctgcccctgccaccctacgtcttccagcacaggcaacttgggccaggtgggcagccccacatttaccaatgtgcctgccatggaagtccccctattccttgggaaggctcaaatttttctcccaagatcttaacgtgtggctgtagccagccaccaagagggctgaggatgttgtaagcctcaaaagttataattcgtaaacacttaccacttgtttactcttaattaccccccccctccttatttgtcttcctttaacggcctgtcaaccaaaatctcccgcctttcccttggtgccagcagcctcaattagatgcacatctgtggaggctagaactgaaatacccaactgccaaaacccacccactgtacctagactgacttcatgtgcctgacggcctgggcactttggggatagcgttgctaccctggtgttggagggcagggaggctggccctcacatttctcaggccactgcagagtctgccttgggaaggcgcccacccccgacagggcacccaagaggaatgatgtcctttatgatggtcccctggggccatgggcacaggtattatatgtccagcaaacaggtaagagaggatatcacaggccagccctaccttgggcatgaggaagacagagatgctgggaacaggtctcagcaggcagggctgggaaggcagctgttgagctcacgcttgtcgactcctgagcaggacccctgcccccctgccctcccattgtgtccagaggtggcaggggggcaactggctcagtgaggaccctgcttgtccccccaaagagctggactatcgtctcccatagtccatcaggtcccacctgtccaccaggcccctggcccctgcgttgccttcctctgatactttttttggggtctcatggtttgggatctgctggcaaacctgtctggcccctgaaggctcattcaggtcaagggaggaggacacttcaagaaatgaaggaaactgttccctgtcaagccctggtttgctgggattggagaagccaaggcaggactaggcagcaagggaaggctgtcctaggccctatttccagcccctacccctacccttttcagtccaggggctactattccctttcaactgcaagccctccttgggctgacttgtgagtgggtgataggagagccactgataccatgaggtggggcatctggacatttccgaaccatcctgcccagctggttactatccctcattcctcgtgataggccaggtctgtgggcagttattgctgagggggtcctgccctgtgtcaagttggtggggagcattctctcatcctatctgcaccagaggcagagctgggttccagggtaacttcagtagaatcctagggatggtctcccctcattgtgaatgcttcagtttaccaagagattctccccattctcacttcatcctggaaatgggagtgggcacccacacaagcattcacaagcgaggacactgaggctctgaaagggccacaagctgtggagtcaaggttgacaccagccccagtcttctgcccacagcagggaagagccaggggcctccaggacagaaaggactgggttgtgcagagatgagcttcctggctctggaagaatctaaacagaggctgtgcaaactccgggaactggggcttgggacaggcctgcacacagtgcctgttcagcccagggaagcgaagcgagtggctgcagagggctgcatcctgccgtccccagccccccacaaccgtacagccgtgcccaggtttccgcttagggaaccaggaggtccaggccctttctgccagcagccgggcgtgcaagcccccgacagagagaaatcttaaagatagctagagccacgggggctgtaagttcagcatgcctccttttctggtctccgctgaagctgtcactccaccattaaacctgtgactctaggccttaagcctgttgaaggtcgagcccccaaaagggtcacatatgctcctgccttgggccgcggggcccgggactcttcccgcgggtggggtggggaggagcggcagggtctgaggtgtgggggcgggggcgcacccggggcgctcgggtagcagctggggcgcaggacgcccgagccagtagggcaggattcgggctgcgcggggacgagaggcgcgcgggcacgggtgggcgcgtggccgcggcgggggcgcgcgggggcgggccagcccgggaagagagagggagggagggagagaagagggcggtgccggcaggttggcggcggctgctatttgagcgcaggtcccgggccgggcgctcagagcgcttggagccagcgctgcagggagatagcagcgcgcagcccgcagaggcgctgcggcccgtgcagccccggaggcccctcgcggagaaggcggcggcggaggagaggccgagttaccgcccgccgcccgcgcccccccaaccccgccgccgccgccgccgccgccactgccccccctccccgcggcgccgcatcttgaatggaaacatggcggtgccggctcggacctgcggcgcctctcggcccggcccagcgcggactgcgcgcccctggcccggctgcggcccccaccctggccccggcacccggcgcccgacgtccgggcccccgcgcccgctgtggctgctgctgccgcttctaccgctgctcgccgcccccggcgcctctgcctacagcttcccccagcagcacacgtaagtggcctcggccggccgcgagaccccggccgagccttgcgccccgctctgcccccggtccgcgctactccttccctgcgctccgcgccagggcagaggcgctgggtccggctgcccgctgcgcccgggggcgacggccccaagccccgaaggctggcagccgcggtcccggcgctctggctgcgtcgcgaaacttccccgcggtgcccctgcttcccccaaatcccccgaatgaggcaaggcaagatcttcaagccccgggaggagttgggggggggcggtccgagcttgtcagctgattcccctgccgctgacccggtgagagggaaacccgggttgggtgagaggggcggccagcgacccctgtccggcggagttggagccgcgcatctgccccacgttccctccctggtgggaatccggcgctttacagccagaggtgagggacatctccacacctgccttcaagggccttttcctttagtggggagctgtatgctgatgatgcgagcaccttcttgctgtggccagtgccacagaggcagtgtcccctgttcttggcccccctccacctgaggagagagtaccctggagagcccagttgggaggtgaaggcgttggggtccgggcagaaggtgaatggtgggaaggacccctgcctgcgcctgctgctgctgccaacagagtaatagcttctcctggctctgccagcctccgcaggttttttggtccttctgagccttctcctcctccccaagagccagcaaactcgggctgcctcctacgggtgagcttagccagatgtgtctggggctgggagtggatgttcagtgcatgtggcctttaggacgtatcagtttcctgacactgtgcttcagccctatgtcagtgcccagaccccctttggggcacggtgaccaccttgcttctgttatctgtctc

SEQ ID NO: 9580 - DNA, 6000 bp, Homo sapiens
gggtactctgagctatttttgcaacatttccgtaagtttaaaattatttcaaaaactttttaaaaaattagcctgaaatgttgccaggtttttaaaaaaggaacccaatctatggacttgcataccattctcaaccttggcctcatgatgatatatgcatgcttttgaaggtataaactatgttgagagtagccaatgtacatatggctcacttttatggagagcagtttggaagtcatgaacaaagctggaagagcacccaaagcagtaaatgagaccgcctggagggtccctgggaaacactgtgagacattacataatggcagccagcagcaatggaagaatttattttaggtttcgggttttaatgtatatctttagtcaagctgagaaaggccaatggaagttaccatctgatctctccagtgaagagtgaaccactttccttcacactcctccccaccctacccatgcctttgccaacctgcaggggattccacctgtcccaggcaggggtgcagagctgctgtcccacctgaatctttgggtggctcctgtgggaggaggaagcagcctggcagggagggtgcttggtggatttcattgctggcatggggctgacttttgctcatgaatttggctcaatgttttgctctgctgctgtttttgagatctgtaatccttgctccacctctagcaaaatttagcttacattcagaaatttagaatttgttttcttttctttttttgagacagagtctcgttctgtcacccaggctggagtgcagtggcgcaatctcggctcactgcaacctccacctcccaggttcaagcagttctcgtgccccagcctcccgagtagctgggaccacaggctcgcaccaccatgtgcagctaatttttgtatttttagtagagacagggtttcgccatattgcccaggctgatcttaaactcctgatctcaagtgatctgtctgccacagactcccaaagtgctggcattacaggcatgagccaccgcacctggccagaaatttagaatttcttgcaatttcttgcaatggcactgggttggctgagagaccagagtcacagctcattgcatattttcacaactgagggacattggccttccccctgcaatggagaggacaccctagaaggctctgacccacccagttgccagccactgcttctaggtgtgtaagttattcaatttgaggattattgcccacgaggatttaactctaaaagagtagagaaaacattccctgcaactgtaaaatgaacacagcatgtcttttcttctcctctgtcctctctttcccagaaacttctccttgtctcctaggtgctcctgcaggccctgttcccccactgagtgccctgagccagtccctgctaaaatgtaaacaggggaggctagggcctgagcaaatactttgaaactctttttccccttggtttcctcttagttctccccctgtctctctgaactctccttttgtggttcattttctctggcttctatttatacccgagcttttgaaacaaagagtgtaggagaggaagatttgggttcatgatgcagcacagtctccaaatagctgcgtgtcattaggcaaaccagggaaccacccggagcctcacatccttcacgtctgttaaatggaactgcaagtggctgcccctcagtctcactggcactggactctgctaagtgtaagggactgccctggagagtgagttcctggagggcaaggacatcatgaccttgatcatattcctttccagtgccttgcacagtgcctggcatacaggagacactcaataaatgcttgctagattaacagttgaatataaaaacgctattcattatgattatgtattcatttatatcacaagtcatatcatttagattcatgatggtatcagagaaaacaaaaaacaattcatctaggtgaagggagagctaaacattataggtgtgataattcacagagtaaaatggctaagagttgccacggttgctccaggttgtttatcaaccacatctcatttgagtggttcagtggaacctctttcctcttgatatatgtgacctatcttcgatccttgtggatgtcaattacccagtttaagtcctaacctgctaatatagcatatctattttccacttttagaggagccataaaaagttgattctgttttaaaatttcaaacaaacagaaaaaaggcatttggaggaaacagaagagaccttcaataaaactatttcctcagagagataagagaaagaattacttctttaagcaagaacaagatgctcagcaaaagggacaacaactaaataagaaagagcttctgttggatagtaagaaatataggccaggcacagtggctcaagcctgtaatcccagcactttagaaggctgaggcaggaggattgcttgagcccaggagtttgagatcagcctgggcatcatggaaaagccctgtctatggattttttttttttaaattagcccggcatgggactaacaatcaaggaaatgcaaatcaaaaccacaatgtgataccacctcactcctgcaagaatggccataatcaaaaaataatagttgttggcatggatgtggtgaaaagggaatacttctacactgctggtgggaatgtaaactagtacaaccactatggaaaataatgtggagattccttaaagaactaaaagtagaactaccatttgatccagcaatcccactactgtgtatctacccagaggaaaagaagtcattatacgaaaaagatacttgcacatacatgtaaacatacatatataaacatgtatgtttatagcagcacaatttacaattgcaaaaatacagaaccagcccaaatgcccatcaatcaatgagtggataaagaaactatggtatatatatatatatatatatatatatatatatatatatatatatgatggaatactactcagccatagaaggtatgaattcggttgtgcacagtggctcacacctgtaatcccagaactttgggaggccaaggcgggcagatcacctgaggccaggagttcaagaccagcctggccaaaatggtgaaaccacatctctactaaaaatacaaaaaaaattagctgggcatggcggcaggcgcctgtaatctcagctatttggcaggctgaggcaggagaattgcttgaacctggggggcagagattgcagtgagccaagatcgcaccattacactccagcctgggtgacaagagtgagactccgtctccaaaaaaaaaaaaaaaaaaaaaaaaaaaacctgtcaaggtcaccaaatacaatggaagtctgaaaaattgtcatagccaagaggaacctgagacatgacaactaactgtaacatgataccctggctgggatcctggatagaataaggatattaagtaaaaactaaggaaatttgaataaagtttggactttaatgataatgtatcagcctcagttcattaattgtgccttactaatgtaatatgttaataactaaagaaactctggtttcttttgtataagaactcctgtaccgtcatctcagtttttctgtaaatctataattattcttttaaaagtctattaaaaataagacagaaatttacaaaataaaaataacctcaaaagatgacaagaaaatgtttctgcagtttgtttcattcgcattatttggagctttagtagggttggatgttttcctagggtttttaatgagtcttggattcattcaagacattaaaactcagaatttcagtaaagatggtgatcattcattcattcactcaacagtatttatcaaatgctggctaaatgccaggaaataccctgtgctcagcacttggaatacaggaatcttttcaaaatatagccccacttctgcccttaaagtaatcctaagaagctgttagctacttttaggttcaaaccaggacataaagtactgcctggctgcccctgtaggcctcaccagctcaccttgcaccattccgccacacctgactgctctccaaccacattagcctctttcagctccttgaagttgccacattccctactgccccagggcctttgcacatgctattccttctgcccagaacagttctcctctctctgctcccctcccctttgcccaggtaactcttatatttggaatcttagctcagggatcccttcttcaaaaacaactcatctactagtaattcctccctagtcatagggctatttgagtaatgccagtgtcctccatggaatgtttgtttgcaggttaatgacaactatgacagtgccctgttgttcactctgatccccactcctggcataatgtctgatatggtgcagagattccattgatacttgttaaatgaattaattaatgaatggaaaacaggatatggtccttagccttccagtatagtgcggatccaagccaggatgttatctcctgaagattagacgtggccatttccccaggtcttaactgaattgcaaataagagctggccctggctgcatcaactcctggtccactacctgcagtaacattcactcaggctctaagtcatttgcttacttcaggttcggaaaaaaaacaaaaaacaaacaaacaaaaaaaacccgaggtctgcatccccgtcattccagtattgccatctgagaaaactgacatccagagagatggagttgcccaaagccacatggttactgaaaggacccatttgatccgttttcttacgaccccctggactctacttcccctaaagcttagcaccagctctgaataacagcagagtactcccacctgccctggcggctttgatctagaaagacttgttgtgcggtcgcagtgcagggtagtctggggcggcggtctccgacctggactgcgcgcgccccctcgcggttaccttggagactagacatccgctcttcttttcctccgggaaaagaaacgggaagtggccgtgggccggtgaattccgtgtagtggccaaggtacgcaccgctccagaactatggggtgggcgtcctgggatttctgggcgcagggttgggtccgccgccccaggttttctgttgtccgccgccctgggtctctgggctgtgcaggaggcgccaaggctgggtttaggaaggccatgtttttggcgtcctagacaggaagagtctggaggaatcagctgagtctggggcctttcgtcccaggcaaggcggtcccaggccaggcgatcggggtccggtttgaaccccagctctgtgaccgcgagcagacttcccctcgctgagcatcagcttccccatctgtgcagtggggatgatgacgcctaccccattggagccaagactgccaggtagcctgattgacatccaggcagtcttgtggggtctcagggactaagggcttgcaggtgggtaccagttctccacatactgctccctccaaagcctgggaaaccttgcaccctcagccctctgggagactggggtcaggggtacagtgacactctttacctttaatgtctttattaatacagaaaacatacactaatttctcacaataccaaaataaattagaatttgggccgactgcttctaacactgttcattaaaatagtatttagttattccctgctcaaaatgattcatgatacaaattacttccaccatcactttatctttttttatgtttcacgggataatttgacccctaacaaaatccaatccttgcgttaaggatttttcttatctggctaggttataattagagtgggaaaatatatttacatttcatcaacagcttattttaaggtgattttatctgtttaattctcagctttgttccaaagagggggaggtggtgacagtctcttgcccactgaagcgtgccagacagagtgctaggcatgggggcagaggtgaatcagatgacagccacctctcacc

SEQ ID NO: 9581 - DNA, 6000 bp, Homo sapiens
agttcttttagaagtcccttgattctcatggtaaatcattaggtacaacttctgagtgaaaaataacagcatgtcagcatctccacaaatgttattttggaaaagactgggacagaaagctcttacagatgaaagaaacaagagaagactgatggagttcttatgaaaatgggctggaatagtggactctaaaatggaaggtcagtgtcactctaaaaagaagaaggagaagaagaagtacactcctatgagcagggctcaggccttaatcaatgaagttcccttttgttagtttagtttggcacctaggtgaccagggctggtttagagaatttcccccagtatatttgcccttaatgtcccctaacccagatgacagtatctactctttgatcaggactcatccttacatttttcttactttccctttactcatgaagcctctctcaatctccttttcttatttattttctttctccaaaaaattgggtaagacccctgtgttttagggcagcctaaaaaaaggaactctccatttcagatatttaaaactgaaaacaaactgattattatgaaaataccctaatttcagttattcctatttacaatctgaagaaagcctccagactaaagccattgtagtctgtgaaaataactataacccagacaatcagctcagaaaattcttttcagaaggtgaagatgtaatgttagcatttatcaaggcaaacctaattggtgagttaggctacttaggcagattatctacgtaatattttatgatgtggaaacagccacttgggtactttttttcccttttatttgatggtatgtcactgtatttcagagtcaatgcaaaatgacaaaaccctccatcttgtccatgtaaataccagtataaactgcatttcaatccataccacatctagttctcacttctattaaaagaaattgtgtacacaagaaacatgattactcttgtgaatagttggctttcagaatttgacttaaatatttattgtaaaatgtgttgtcccacttttctttttcatcttcttaagtaatgagagtgattttccaagaccaattcttgcaagtaatattatttatcattccaaaacatgttttgttgcctagagtgaaagatactttggtgtggctcgatttttattatttttagccttatgatgatcctttaatttcatcctaacctgcttcattttactttagtaagaatcatcatatgatataaagagtaatgatgaaaagtaggtttctcaaacaaaatagaccatttctaatccctgacaatactatctaaaaccagacaggcatcaagtaaacaaataagcaactcttctatttttcaggatctagttctgaattatttgatttcttttatgttcgtttccttctaattatttgtgtccaatttcttgtcatctcatttatggcacatccctctcagatcactggaaaaaaaatgtaaagctaaaattggttgaaaattgctttttatatatcatctatttttgttgtcattccaggggaagtgagtactattatcccccattttacagatgaggatactgaatgtgaatcattagttcgttcaggatagctctactattaagtggtagaggcagaactgtctgggttgagaggccaagcatttaacttgacctaaggcacactgtaagatcaaattaacccatttttggagcttgcaagctagtcttataatttaaacaaaattaaatattgattagatgagatgatcacatctagataatatgaagtttattgagattttttaaatatttaacttagctaaattattttttagtaacaaacccacaaaagcatcaaagtgggcattaaacttagttatatttgatggaaatgtgttttatgtgtgacataaagaagaggtttgtttttactaaactatcaattgccagcgagtcagatatttcctcatacttgtggcctttgacacatcgaggcaaacacttcatagaaggatggagatcatctaggtttagattaggaaatcctggcttagtgtctcagtcatttccattttctgcagactttgcttttgggggtaggattacaaaattcaacggtatagcttctactttcatgatatggtctccagatagttgattaaaatgtattccatcatcttgaggttatccaagttttctacagagcagaactggatgtggggcaaacatgcaagcacataaaatagcttaaggacataaattcttaggtgtataagaatctatggtggaattctacttttaaaaataagaacacaaatatttacaagaggtagacaaaagttaagagactttgcatgtgttctgtggtcatcttttcccctgtttatcaaaatgtacatttagggaagtcacaatccctacttcagatgcctcataagttctggttggcatatcttatcttcaatactaacaaatatttagaatatctccaagttgactttcggctaaggtaagagatgtcttcgaaagggtgtatattttgaaagacagcaatgttcaccatttgaaaaaaatatggaaatatttttggtaaaatctatgtaagcctctttgattgaatactcttgggggggattgagaagattgttagatttatgtaagcaatgttatgtttaacacccaaatcataggtttatgtaatttacaaaaggtggatattaagtttctatattaatgactatacctggaaaaaacccacataatcccaaaggagtttgtaaaaatatgaaacaaaactttattacagcaattgtgaaattccaagtgtttttgtagatggaattcatggccactttgccaccaatgtctgatgtgacagtatttaaatgcctaaagagaccttagaagaaatatttaatctgtgaatgacctgtttctggccttcaacagcatctcctccccaaatcatcacatactccttaatttgtgtcctaaacatggtccctttatttcgccaaatggattataatttcagctctttcctcctcctgtcacctacccataccctgtttccataacactctttaaccttacttgatcccttgccctattactctggcattgcaaaccacttattccacttgcaataccttctcttttcaccacccatgtatatggtatgttcccttaagattttattctcttctttgagaaatatatgattcccttcacttcaagttgcttcattcacgcaagctttttgcagtttactgacctggatttgttgatatgttgcctcagaataagtgctgtcaatctttttcacatgtttatgttgtagctcccaaaggagattatagactctttaagagaatgccttctaaaaattctatctatcccaagcacctagaacaatgtgttacttcattaaaaggtgctggataaaggttgttgatcaattgattggcttactatattttctgttccaggaaaaccaataccacatgatttgaacatcctttacttcttgagaagaattaaaaagtgaggctgcaaaactgtcacaatccccgcactgctcaattttttttaaattttgtgttgttaccaaatgtgtgatggccacaaaagttgtgtccttgaggtatggtggtgaagtcaaatataagccatccaagtacttaactcaaaagatcaaacagaattgttgaggttaatgtgaaaccagttgttctgagttcatctgcaggtctcaaacaggtcactttactatcaaagctagtaaaactcatggtaaattataaaatacgtaaagacaaaagtgatttaaactttaaactcatgctacactattaaaatcactcccacgagtatctacagataattagagaactagaaaatacataaatataggcgatgaagtggagaggtctctagatagcctaagttctgaaggtggctggctggtggtttgttttcatccatctgcgtgcgggtcgcaggttacattcagcacgttggccagctccctcgtttaccaggtttactggcctaagtgaaaggagcacggggaaggcaggcaccatctgctgctttgtattaatagtttacccgagaggcaggggtgaacagagtgcgacagtcgacgcattagatgttgacgccgctgagttcttagggtgtctttgtctgatcgcggggtccccaagcctccaccgagccagaatggagggagggttaagcaaccagaaacccttctatttttctggtaggctcacctcagcagaaagcattcccaggtcttgggaactgaagaagattcatcatagattttgggggtgggggtaggcaaggtcgggggcgctacataaatggttgagttgcctggtcgaaacaccaatccattcaaaatttgattcacttttattttaattagactgggcgcatgcggaataagttgctggaatcagagtttacacaggtgggacaaacacgctgcccagcccccacgccccccacgccccaggtgtaaagaagcctggggaaaggagatggaccctttctttcccgtataagatctcacggacttcctcctcctaagtaagacctctcgatttagcgtctccaaacagcccgctcggctggtttctggatttctccctcccccaagaactttttgtccgcgggaggggaaaaggggttgaggcaatgagagccagatatcaacaaaaaaattatccacgaagccggcaggggaggagggtggcaaggtattggggtcagaagtactgaggctctgaggacgctccgcgctctcccccctccagccctctgcagcagccctttacgccgcggacacgggagagttaagccaataaacacgtaagcgccgctccctccccaatcggcaagatgcctcttcggctcttggctgcatcgacagcttgcaacactcggcatcttttctggaggcgcctccttcagcagccgcagatggcatccggctgcgggctcggggctcgcaattgattctcccccttgcccacctcgagtccacggacgcacctctcccttcccctcctcccttcgcgcttctgggtctgagcccagctcgcgaccgccgggcagaggatcagtcgcggcggccgaggctgagcagcagcgctctcgctccctgacctggggagaagcgcccacccgggagagctgatccccggctgcctccagcgccccccaccttttgcactccaagccgggggctccagagaccccgctccccaggcgccactatgctggacccttcgtccagcgaagaagaatcggatgagatcgtggaggaggagagcggcaaggaggtgctcggctcggccccgtccggcgcgcgcctgtctcccagccgtaccagcgagggctcggccggcagcgccgggctggggggcggcggcgccggcgccggagccggggtgggtgcaggcggcggcgggggcagcggcgcgagcagcggcggcggggccggggggctgcaacccagcagccgcgctggcggcggccggccctccagccccagcccgtcggtggtgagcgagaaggagaaggaagagttggagcggctgcagaaagaggaggaggagaggaagaagaggctgcagctgtatgtgttcgtgatgcgctgcatcgcctacccctttaatgccaagcagcccaccgacatggctcgccggcagcagaaggtaggtgcgcctgggaggcccagggagcagcacccggacgtcgccaggcgggcggggtgaacaatgggagctggcggcgcagctggcgaggaggagcaggagaggtggagaccgcgccctggggaaagggctacgaggccccctcccagcggccgggctcgcccaggcccagcccaacccagcctggagcgctcctggagctgactgggaccggcgagggccgcggagcgcagcgccgcttgctcgagcccccccagccc

SEQ ID NO: 9582 - DNA, 6000 bp, Homo sapiens
atttatatgtcctcctttgcccctgcaactgaccaacttatttcccatcctcatattttcagaaaaaggaggaaaattaccactttaaactgcaatgacacatttctttaatcacaactggaaaactttggaaagaaatatatttcggagaagggaaagaaatgcacatttcatattcgtttttttttcttccccctagtagaactagctatatacaaataagatcttaatttgtctagtgtttattctgttatagtttatttctcagctgaatctaccctctgtattaggagttcattgttgaaatgcttatgcaataatataagactgtttggcatgtcacctgtactgcagcctaaacactgtagaaatgtttgcaaattaattctctttgcattcctgaattatttgaatcttcaaagcccatagatggagaacaggagattgagttctggagtgaaacactgtatcctttagcttaaagtgaagagacagaaaggagggggacttaattactgtgtatacactatgtagcagattcaagagtccagagcatgctgttacccaaatatgctaaatggccacatcctatcctctcagactacagtgttctgagcatgggttttgggtcatgcctccgggttcacttcctggttttgttacttgtaagctctggggcaagtttcttcactttcttagcttcattttcctcagttataaaatcaaggtcattcctgatagttcctaccttacacaactgtggtgattgcataaaataactcacatcagctgggcgcgatggctcacgcctgtaatcccaacactttgggaggccgaggtaggtggatcacctgaggtcaggagtttgagaccagcctggccaacatggcaaaaccctgtctctactaaaaaagcaaaaattagctgggcatggtggtgtactcctgcaatcccagctacttgggaggttgaggcgtgagaatcacttaaacccaggaggctgaggttgcagtgtgccgagacggcaccactgcactccagcctggatgacagagtgagagtttgtctcaaaacaaacaaacaaacaaacaaacaaaaaccaaacaaaaaaacccccaactcacatcactacgctgacatatacagtaagcttgaaagttaggtattttatagcattatttctcccaacagaatgtattgccaaattcatagctaaagtgagacaagtcagaatactaggatcttagatctattcaggaaaaatctacttcacaatgacataactataagctcttttcattgaaagtaatggcaaaacctgcaattactcttgcaccaacctaatataaatacccctgttttggcaaccaaatctaaactggctttggatcaaaggtcacatattacacaatttcatgtcatacttcatccatttattcaacaatttcatgtcacacttcatcaattcactcaacaactgtgtatggtgcacactccacacaaggcatggttcatggtttttggtattgaggtttcaaaggttggataggagagagatgatctctgccttgaacttctccagtctgggacacaggaactagaccaggtgaaacaccagccgggaagatgcagagggagcatcctggaaactggcagccttggctactttgaaggttcaaattatttttccttttcctgaattagaataatgtctattctctccatattgccctctgtgcccacaggtactactccttcttttggggcttttccacatctaaaacctgacgtatgctaaattccaagttctttcctttctcagctgctgtggtgacacctggaatcctggcaagagggggatgttgttgcattgggaggaatcacaaaacgcctggtcttgtccagcccttggactcccccaggcagaggtgagagttgagtggagaggtaggggactcctaattcaaggttggttgtgggtattcttagcaaacaattacactttactagaatatgaagtggcaaagtggggaaacacacaaggctaagcttactaagcttactaatgatttgcaggggaatctgtgactccccactaacatggaaagtaaaaatgtacatttttgtggaaagagtcatttgacaaatattttagcatttgctagtacgaggcaccattctaggaactgggaataatacatcagtaaaccaaactgtcaaagtgtcctgacctccttgagtttttattttacacagagatgtggatcacaggtttatttgacaaaaaggtctgggacccaaacaatgctttggaatcaagatactaaacctatggtgctcagcgttgtgtaccaacaacacataaggggaaccttaaaagttcaaatgacttagcccttccttgacattctgattggctggatctgtgctcgggtttgataatttatgttttgaagtgctgttcatattgacctagattgcttctgaaaaaaagctggagacaaagttcctctcaccaagcaaagccatggaaaattggtcacctccttttttcagaaacacaacaatgcaatgggattttcagttctggatatcccaagagagaagcatcaacatccctccttacttttattagcttagaatagcaccctacaatgctttaaaaggatgtttaaacgtatgcctaaaccaggtatggtggctcacatctataaccccagcactttgggaagctgagtcaggaggttggcttgagcccaggagtttgagaccagcctgggcaatcaacatagggagacccccccatgtctacaaaaaatcaaaaaaataaaactagctgggcatggtggcatgtgcctataattccagatactcaggaggctgaggtggtaggattgcttgagtccagaagttcgaggttacaatcagctagtcgagctactgcactccagcttggggacaaagcaagaccacgtttctaaaaacaccaccaccaccatcaaaaaacaaacacacaaagtatgcccatattttctaagttctagaaaggagaggataaattatcatacttactaacttgaatccccaaatgatttcccaattttcttcccaaatagtaatactactattaagaatataatgagtttttattatttgccactttataagtgttttcccacgtaatacttccaagaaccctgtgaggtcttgttctacttatttgatcagcgagaaacggaggcgcggaggtcaccaagcttgctcaaggtcacacaagggtggacccctgagcctacctctcaacctcgactgctgtgtccatcctttcttcatcgtttcaacgtacccccctcatttcttggaatctctcctgtgaccaaagatgaacaaaattatacatcactaaagaggaaaacaaactgctggggagactactcagcagcctgatttgaggagtatttgggaagggcagccttcctgtggtatgggagtctttctgtccgccacctcgccgggacagaagtcactccatccgcacccccgggcgacctccggaggccgcagctacccccgggctgcgaattccgagttctctcacgcccccgcgggcgccaggacgcagggcatgtccgcgcccggcggggatccttatctcctggccccggagtaggtccgcaggcttctcggccctgccaggaacttgaggccggggcagatgattgactgggtccagcagtctctgctggcagggcagttgaaaagctagagggatctcttttttggttgaatacctgaacccacactagcaccatggcttctctctcttgcctgtagtttcccgtgtcctaaaaagttggtcccaaagtttaaggatgcgggtgtgtgtaagagcgcgtgtgacccgcacagggatcccagttggggaaccggaggatcccaccgtccccctcccccgggtcgcagagaccctggcagaccccgcgccaggacccgaacccgcaagcgcagggcaggcagggaggcggcgagcgccccggggcgggtctcgggggtttcagtgggacctgcggcaaggggggcggcgaaccagccgggctgggtgaccgacagcctggccagccactggccgagggcggttaggaggcttagggccggcgcgagtgcgtgcgcgtgtgcgtgagtgtgagcgccagggtgagtgtggcagcctccccaacccccacctgtttgaaatggttttcaaatgccaaagccagattgcccgggtttcaaaagttgcaaacagttggagtaaaacacgtgtgcggccctccagccccaaaggaatccgcggagtccagggcactgaaagaaaaggagagaggataggggttcaggaagggttgggggggagttgccttctcccggcaggtcggttttaggacccatcgggaagcacgttggaatctctcccttcggggaggaggggaggggtgggccggccggctggcggccgcggggcgcatgcgcgcgcgtctcctgtcgccggccgctgcgctccgcggcgcggaatagaatgaactgtaacaaaacaagccgagcctttgtatctgcttaaaggggccgcgagcacttacctcccgccctgctccccgccgccccgccaccgcgtcttcagggctcccggcaactggctggaagggcttccctcaccctcagtaacagcctgccagcgaggagaggcgagccgggcgggaggcaaagaggaggcaccgcatttgtaaaaggcaagagagaaaggaaggaaggaaaaaaaaataacccgagcggcgcagagtggactctggtccgggagagcacgggcgggcgccggaacgtggacccagaggcaccggaatgcaaacaaagctcgcgggcgcctgtgcggggctcgcggggaagcccagaaagtttgttttatgatggcttgagtgcgcgagcgtgtgcaggggagcgaggctgccaagtttctctctcctgttttgtgatttggggagagatgtttctcccatgaacaagcggaggcttgggggctcgtgctgtggggggcacctgtctctcgttttatttttttggaggaggggtgtaactcatcatgtccaaagtgatccagaagaagaaccactggactagcagggttcacgaatgcaccgtgaagcggggaccccagggcgagctgggggtgacggtgctgggaggcgcggagcacggggagtttccgtacgtcggagcggtggcggcggtcgaggcagcggggcttcccggcggcggcgagggcccgaggctgggcgaaggggagctgcttctggaggtgcagggggtccgggtgtccggcttgccccgctatgacgtgctgggggtcatcgacagctgcaaggaggccgtcaccttcaaggccgtcagacaaggtaaggcagggcgcgcctttggggggcgccccgagaaaaggagggtggtctgtgggctgccccttattctcgatttcctgcttccctcctcggagcgcagtgaagagaagttgaggccgtgcgccctgtggtggcggtgaaatacacaaagttgttgcgaggttgagggttgtttgcccacctgcgtttcgaagagggggctgggtttgcgcaaggtagcggggggacgtttctcaggcctggctggccaacctgttatctccgccactaagtgcagcgcagtctcgcctgcacccgagagagagttggggaactgagtcaggggcatggtggacgctgtcctggctccttgggggagggatgcagctggcgttctttggccacgagtcagtttccatacctgctgagtgggtatacagaaagagagggtctgtagtttattggacctcccccatcagaaaatctgcttcaccccgcgacccctccaggtgagctaggacaccactgcctggcggttcctgagcccgccgccagaagagcctgcattcacccctcagccggatgacgcatgtgt

SEQ ID NO: 9583 - DNA, 6000 bp, Homo sapiens
cccagcccaaaatagatctttggtgtccacagaactggtttggaatcttggccctgtcacttattagcttgtgtggccttaaacgtttttcttagctcctacctcactgaaaaaagtacataaagcactcaacaacatgaaagacatataaaaagtgctccgtaaatgatagctgttgttatgatgtgacagtgctttgaaaaatgtaaggtatatgacttcataagattattattatgttatgatcaatgtgctgttctttatatacattgcagtgttagttctgagtggttggcagtgaggcataaactttgaatcctccctgcactcgccctcatgtacttctcggagtgacatttgcaaaggcagcagattgggagtgagaggtgcggtctctggtgatgatgtaattagtccatcccatcatcatcaccgtcagaggtaagggactgcctcctacaatgaccattactccagaatctcaatctcagaattatgaaatgctcatacctttgacatattttttttcatcctttcagtgaaccagtaaacatttcacattcacaaggcaaggacaagtgtcaaggttctagtttgtgttagaaagtggactctaaaggtttttggcccctgtcgatggtgctctgtggaggagggcagatcctgtgaagggtcacagctgagctgcaggcaacaaccattcttgctgtggaactgcagcagctgcagcttggcactgtctgggcattaaccaatattccaatagccagagattgcacaagaaaactacctccaccaaaggcaaatgttggaatgggggatggggagatctcaaaatctttctctttttatattctattcccagactcattagcctcctctcttaccttctccacccatccatctccttgacaagattattgcgacgaaggagttaatgagtacacagttttattttccttggaagagagatagaaaacaggctcaaagcagggctgtcatcaccctgcaagtcttcaggggtttcatagctaattattaaccctttgtcacattcctggacaagaaactttcctgctgaaacaacctgctaagattttccatctacattatacatatgggctctcagtttttcagagttaacaaatcaataacaccttgaaaacaatgagatgtaaacagtttataatgcccctttggtcctttatcaaaatgatccttctttactcactcagcacccaggtcaagtaccattatccttgttttctatttttcttttatatatatattttttttgagatggagttttgctcttgtcacccaggctggagtgcaatggtgcgatctcgactcactgcaacctccgcctcccgggttcaagcgattctcctgccttagcctcccaagtagctgggactataggtgtgtgccaccatacccggctaatttttgtatttttagtagagatgaggtttcaccatgttggccaggctggtcttgaactcctgatctcaggtgatccccccacctcggcctcccaaagtgctgggatcacaggcgtgagccaccgtgcccagccccttgttttctatttgagaaaactgaggctccaagacagaaaatgactggtcaaaggtttcacccataacaaggcctggctggaacccagctctcctgaatggtgacctggtgcttttttaatgtattgaacacagtgtaaaatctcacctaacattaagaaagcccctctgaatctcagcattctttaaaaccactaaagaccaccacctagaactatagcaaactggcacaaattcagtccccaggaagttgtgttaaaaaaaaaaattcctatggttaaccttctttcttgttattttgttatttgcttctctccccaatagatttcaggctatttagattttgggttcctctctcaagcatgattaacttaggatgattaactgctagggcttctggagtcaagagagacctgcagagattctcactggggtttgattccatgctatccctggggtagatgaaaatgaactggaaaatctaaaatccccggatgactcatttaaggaataagcatttagaaagatcaaagttgcagtgtgaggaaaataaggacctacagcacccaaatcaactgttgctctgtgctgaatggaccaagacttgcacttttatgagcagagacatagattcccttagacatttgctgttgttgttgttgagatctccttcatcttaggtggtggctgcagatgaattcccccctgagctggatatcactgctctccaagttcacactctcattgcaatcacaagcaggttgctagtatgtgggcaaacttccatacatggtatggggagcagacatgacttcatgctttgctgtagacgagaggaactgccaaggcttaggcgccctgtccccccaagtgtgccccggctttggaatccttttctctggctgcatggtaaccagaccacaagggatgctttagatttgtgggcactccctcaccttgcagattcttaaattctatcctccagaaaactaagattccaaaaaggcatctcacaagtacacccatacacatttgaaaaaacattttacaagaattacccacttttatagtactagaaatgagacaaacctgaaagataattttaggtcagcatctcaagtagttcaatcagttcaattcattttttgctgcatatgctgttttattgtggggtggggacagggaggatctgacagtttcatttcaggaaacggctgtgggtattctgcatcaaattactgttttgtgttctttgtgtaaaacttaaacactgactgagaggacttcataaatttagggtctttttaattccattcccactgcttattattattatatttaccaaaagggatagaacaaaaggacatatttcttctcgtccagatggaaggtgtatgtttatttggattacatatgaaacataaaagctggttaaagctctgggtgggatgggtcaggtgcagcatttttctgataatatttcttgggaattagatttgaattgatttacccacatatttgagcactgctttgggcatcactgctgagatcatgcaaaattaaacaagaaaaaaatgaggcgcaatgaattcagaaggggaagaaggaaaaaggggaggaagggataggaagatcacattttggctaaagaaaagaggtgatcttatggctgagggaaagtttaacacatttagtgcatctcaattaaagcaaacctcttagattgtgtcgaaaatggaataaaccctttaattttttttttttttttgccttttttccctaaggttcaacttctcctctttacctcccaccccaccccacttccataaaacacaactcagatttaatgttctggagcaaatgtttttcaacagacttgacctgcttaatcttcctgacaatgtgcgcagttatgttagtaatttgcatactcttgggaagggatatgagacactagcaaaccaaaacgcccagagggcagctatatgttacagtggtaatctttttctttttttctcaatgtgtgtatgtctgcttaatgttaccacgtactatcgtaacacactactactatggtctgatctttaagagcaaaagttagaagctttgttaactattatttctcctttaactctgtctcttacgaatacacaatggcttcttgaaaattatcttaaaaagactctgattaaaacaaaaacccaatgacaacaacaaagcaacccctttatcaaaggctgcagcatttctagaagtacccttcaactcactagctgggaaggagagtgcacttttttttttttttgagacggagtttcgctctgtcacccaggctggaattcagtgacaattcagtgacaagtctctgctcattgcagcctccgcctccggggttcaagcagctctcctgtcccagcctcccgtagctggtattacaggtgtgcaccaccacacctggctaatttttttatttttcatttttagtacagacggggttttaccatgttggccaggctggtctcgaattcctgacctcaggtgatccgcccgccttggcctgccaaactgctgggattacaggcgtgagccaccactcctggccgagggtgcacctttgagactaggtttctgcagcacacattcattttagtaatcaaggacatattgctggatttaggacgtgaagaacaagtcaggagcagatgctccaggctgctcgaggaggaaggggaccacgcctaatgaaataaccaaggatgtcccagtcaggaagaaatgtgttaagttttaaacctgtgtcttcgcttttggaaggaacctggaaaacggacgcgggtttgcttctaatctgcagtcctgcttgcagcctgaggaggacgtaaaaagccttggggccagacagccccaaaacgggggcgttttaccctcttaactttctctccccttcttgacgcagagggcgtatcttcacgcctcctttccccagcccgcgttcccgttctccaacaacaacctgcgtgtctcctttaagaggcgggggccgtccctccctttctcctcccagtctcccgcccttcacaccttgggtgggaaaagagtgtgggggcggggtagccggtgaagcgggaggggcgggatcacagcgagcgctccaatggccctcgaggctggccacggtggactccggcagccaatgagcagcaggcggggaggcgtggcggggcgctgttgcaaagcatccaacgtgggccagcaggcggccgcggagcgcggagcctagggggtgtgtgcgggcgagcggccgggggcggggcttgggggaccggccggggctgggccgcggggaggcgaacagcaagcggctgattgttcggctgcgaggtcggcgggactcttgctgcgcggaggagccgtgcggaacccgaggctgcgcgcgcgcgcgcgctctctggccgcggcgtggggacagcgaggcgcactggggcctcccagcgcggggccggccgcgccgtccagcccgaggtctacggctttgcgctccgagcccagaggaagatgcctgccggcaccgagctcgggctgcggggctgaacgcctgtcttccaggcgcagcggcagcactgccctcggccggtgtcggtagcggcactcggcgtgccccgggcggacgaagagcgcaggctgggtacaccttgcccgaatcggcggagttcgcagctagcgcgggcgggccggccggcccggatgggcgcggggtttgcggcccccgccgggtgctccggagcggcccgggcaccgggggcacgctgagtgccggagccgcggccgcagagagaacttggggcgggggccatgccccggtgcggagtctagagccgagcggagcgccccgcgggcccgcccgcgtctgcggccgttcgggtcctcacagtccccgcgcccggagttcgcagcgcgctccagacaagatggcgcggccggtccggggagggctcggggccccgcgccgctcgccttgccttctccttctctggctgcttttgcttcggctggagccggtgaccgccgcggccggcccgcgggcgccctgcgcggccgcctgcacttgcgctggggactcgctggactgcggtgggcgcgggctggctgcgttgcccggggacctgccctcctggacgcggagcctgtgagtgccgccctttccgccctctctgcgccccggggctctgtcacttggggatggagcggcgggggttcgtactcagggagggggtgcggactgggttgtgtgtgtggagttgtgcgtgcttgtgcgtgttggaagactgtcaggttggagtggcggaagggagattctgcgtggaggtccgggggagtaggcgtgcgagagagcctggagaagaagagcgtgcctcgtggg

SEQ ID NO: 9584 - DNA, 6000 bp, Homo sapiens
tgtggtgagaattagattagataatgtttgtaagggaccccaaagagtgaccttaattagtgccacttttctatatcctctcctttatcttcaaaagctcaccccctcttcacattaaaggagtaaattctagcccgacccattgttgctaatatgtaaggccccaggctctatcaaaagcacttagcaggatagcacctagtgttagaacatctacaatgtgtgtgagatgctgagatgctaaaacagaaacacagtcacagtaattccacagcaaagttgagtatctcatatttatatttcttaataagccttacagagcaatagcgaggctggagtacatcatctggtgggaccattgggatgatggtcctttacagtatcttcacaatgctgtgttaaaaatattggccctggccaggcgcggtggctcacgcctgtaatcccagcactttgggaggctgaggtgggcagataacgaggtcaggagttcgagaccagcctgaccaacatagtgaaaccccgtctctactaaaaatacaaaaaaaaaaaaaatagccgggtgtggtggccagcacctgtaatcccagctacctgggagaatgaggcaaggagaattacttggacatgggaggcggaggttgcagtgagccgagatcgcaccactgcactcaagcgtggtgacagagtgagactctgtctcaaaaaaaaaaaaaaaaaaaaaaaaactctgtctcaaaaaaaaaaaaaaaattggccctatttacagtgcctgaagtctttaagtaaatgaagacgaataaccctgggaatttctcctccctgtgatttttgttttggaacacataattacctgttttaagtagcagagaagcaaacaaacaaaagtaatactgttaaaaggcaccttatgtacatttgaagctaccatgtgcagcttagtcaggaaagctcaaactaaataggcctcgtttcttgaaacacagtagatgttccaagaaatctcaatttactctccttttattcggattattcggatcactttagcttgctttctgagatcggacttttcttacatatccaaacttaggaaaatattcaaacattcaattattcaaactttcttctcagttcatcaatttaaataccaaggatcacgcagattactcagcaatttcatgtaagaattactgaactaactgttgcactctgagggatgggatcttggagtgttcagcacagccttggtgtgcattgcatgtgtcactgcttctcatcagttttgctggaacttatggcttgcatcccagggtcggtctgattctaagacttttagctaagaaggcagagagatgttctggtttgtattatagttaccttaggaactctatttcactcctactcatcggagtaagtggtatctgcaatccctggagagacctggagtgttctgttatttccagagttcctgtggctacctccatgaaagatataatcattggagcaacgcaagagatcattactgctctagaattttgaccgtcaaaaagcccttcttcacgggactactgaaatctattattttcaggtttcttcagaattctcaggggagatcctgaattttggggatcctgaatttcatagactctaaatgagatgagaattctctaagtggaaatttagaacccacgattcattcagatcacagtgatcagaaaagggttcctgagtacaagttaccacactttctccttcctggtgctgtgtctcccacccaaactgatgagtcaagattctcttgtacatgtcagagttccctgaagatctgatgtgagtacattccctgtccacatgtgtacactcacacttgcacaggcactcacacagacaccatgagcatttcaggcattcttctgggtaatttaaagttcaggagcaaaagtgaaaaggtgacaacttgctatgatccagccatctctaggaatgtactgggatgtcatttaacctgaatggcactttgtttttatttttttcagacagattccaccctgaagcctgttctgttttgtgcaccttcccatagtaggagttctaaaagcctaaaagaaaggaattatatttgcatcttgtccctatagcacactttactgtttcttgcacatagatgatgttcactaagtgtttatttgcacgagtgaggaaaaggaagtagatacaaaagttctcagatgcattgagtttcacttcttatagatccgtaatgccttctgaatacacgttcttgtctttgcatgccatctttaccaatataatagacagaaaatagatacactttggatgagacaggaaaaagaaaggactaacacatatgagttggtgatgatagtcttcatcagggggctggccaaaagttagttccttgaagatacttactgctgactgtcctcggaaatatcatctctaggccgggcgcggcagggctcacgcctgtaatcccagcactttgggaggccaaggcgggtgcatcactaggtcaggagatcgagaccaacctggctaacacggtgaaaccccgtctctactaaaaatacaaaaaattagccgggagtggtggcgggcgcctgtagtcccagctacttgggaggctgaggcaggagaatggcgtgaacccgggaggcggagcttgcagtgagccgagatcgcgccactgcactccagcctgggcgacaaagacagactccgtctctaaaaaaaaaaaaaaaaaaaaaaaaaatcatctctaggagtggaagagaggggatgggtgttgcttactgaagttgagacatcaagggtgatattaatatggtttgcattcaatgagataaatggcaaaagaaatcttgagagatacgagcaaacttccagagaccaggagatccatttgggggaacaatgcaatagggatccttacacatattcttcattatatttaaaagtatacccccattactaagtgaaagtttgacatctttatttaacgtacattcaaatgatatgaggatttgaattttctctctatcttgctctctttctctcaagtactacactttagtgtttgttttctattactaggtaagcttctcttaaaagtattttgtattccaagaaaaaagagatatattctatgtttttcactaaatatcctttagcaagaccaaatcgatgtatgcttttcagctttgactgcccattcatatttttactgctgaaaagattttggttggagtctttgaattcttatctccaggctgtttactgaatttatagtcagttttctcaggattagactatctttcactttcaaagataggtgctgttaaccagagtttccacaaaatgtcgctctaaggtcgttggttgcaccagcagcaaccaaaatcaatgtacaatttgcttttaaatttttatcttccattaggtaatgaatgtgctcacctgaaaagacatggaaaagcacaacactatgtagaaaagagcaaatcctccttctctgccctatccattgcgcagttctgtcctccagaggcaaccaccgaaagcagcttcttacatgtactgctagacaccaaataattttttttgaagttatggtacacaactctgtagatattaattctgccatttattcagcattcggcatgttaggtatttcacatagtgtgtctttttatttatttatttatttatttaagacggagtctcgctctgtcgcccaggctggagtgcagtggcaagttatctcggctcactgcaacctccgcctcctgggctcaagcaattcttctgtcttagcctcccgagcagctggggctacaggcgaacgccaccacgcccggctaatttttgaatttttagtagagacggggtttcaccatattggtcaggctggtctcgaactccagaccttaaatgatccgcccgcttgggcctcccaaagtgctgagattacaggtgtgagccacagcgcctggccactgtgtcctatttaaaagaaagaaagaaaaatgactgactcaatgaatgaatgcctttcagacgtgtcaggtttgttttgctttgtgtattttttgttaatgcaataaaatatctcgagaacagaaacagagaagagaaaacagacctggtcacagagctataactggcaggttgggatttcagggcgggtatactgagtgtcaaacctatgcctgactagcttctcctaactgcaaactctgggcttgtcaagattgttttttgcatttgtttctctctctcttaaaattacatccccattgttagctttctaatgtgtggagtatgaagttgaaagagagagtttcaactgaaacatgaggaaatgatcccaaggcccaaccctgtgccttatgatttggatatcttttctacaagaccttcaacaactgcaacttaaaagaaaaggatggttgtaagagactgcccatctactgatatgttctggatagttctctgtttacctcctgtcctaaagccatgttgctcaaaattgattttttttttttaaatgggaatggggagaagtgagagtggagttgagagtttattccaattcctggaagcggcaaggaagaggttaagttggaccaggaggatttttgaagtctttggctgggaggttccatttggagaaaggtgcaggggagctaggggtggcgagagaaacaagacagtttctcattcgcctggatttccgattccgagcaattggattctcacctgagggcgcagttgggcacccctggcttgtggatggaaatattgaggagcagaacttgcctgaccagcgcctggagaatagagtgaagcatggaaaggaccacgcggcccctttaagtattatcgggccggggaggagagggagggaactgggagccgcggggactgtgggggaaacccacaagcaattgagctggagaggaggcagcgtgagagcagaaacttcagacgccgctgatccgggaggagctggggtgagccgcggcggccgtctctcccacccgcagcagcatcctctctgcccttctctgccaccccggggagagccgggagctgcctctttacagcttccacgagccaggggtgcaggcagctgcccccaggaagtttgggcttctgcgtagtttaggggtgcctgcgagcgccccagagggcgaggggccgagggcgatgttgggcgccgcgcggggctgggggcgcccagaagacgtgcgagtgtccgcggtcctgctgctgtctccagtaccctccgcatcccccaagtgatgggaacaagggcccgcccaggcagccgctgtcgccgcaccgccccctcgctcgctctctgcgcgcggagtcacccagtcacactcccggcaccccgagcccttcctccggagctgctgcttctactttggctgctatcgccgccgccgcgggtggcccgctgctgactgggctcgccgggagacggagaagcactttttggccctccctcagcagctctcacaccccaactttgccgccgccgccgcgcctgccctcgcagcggcgctcggccgcacattgtgggggcgcacgccgggaggctccgcaagaccgtggaggcaggaaacggcactactgcgcttctgcctcggctctttgttgttcgctttggatggttcttgaaagtgtctgagcctcctcggaaatcctggggccggagaagacaaaccttggaattcttcctctgcaaaagtctctgagatactgacaagcgtccggaaaggtcgacgagtaattgccctgaaaactcttggctaattgacccacgttgcttatattaagcctttgtgtgtggtgtgtggcttcatacatttggggaccctatttccactccctcctcttggcatgagactgtatacaggatccacccgaggacaatgattgcggagcccgctcacttttacctgtttggat

SEQ ID NO: 9585 - DNA, 6000 bp, Homo sapiens
acattatcttgtccatttcttaaagtgcaaagtcaaatagttaagtttaagaaaaacgattatactgtttatactctaggagtttatttttatttttaaattctcagttacttggagaatttagtactatataatgtaatatcacatcatgccaaactaagtggcacgtattcattattatgagggccccccacttaatttactggcttatttccattggtaactaatatatagatagaaatgatgttactattctaggaatatatactttagatttcttcgaaatagcagatttaatctgaatttaggttgtgcataacaaaaattatgtttatttatgttggtgtccttggcatccagcagagtgtctggcaagcaatagatggtcaataaatgattatagatctgggatgaatcatgcttgaattttgagttatttccgcagagtagggacttttcacaaacttcttagacagcttccattttctattcagtcctgggatctttgtcacatcataaactaatatgaagagatgtttctaagttaatgcagcacattttttgtcaacttatgcttatgttttcacttggcacatcttgttgaatcagaagcaacttgcaaaccaataaatgtgaaaaatatcattatcatggcctcataataagtatgacggatagtgatgagaagaggactctctcaatgaagactcttaagtttattaataattaaattaattgattatattagtttcttatctgcaataagatttttttttgaaaagttatttttgggaggcccacaattcatactcataactctatactaataagtgtcaattagaagaaatcagaaaagtttccttccataattttaccttcataattactgttaatctttgaaatagcaagggctgtttttcggtaccttttctaatcagaatgcatatagtcttcctccttttcctttgcaatctacatttgccactatctctgcttctagtacattgcctaggcttgaggtatagggtatataaattctgcaatgaaactctaatgctgtggatctatgaaaaaccgtattttgtagttgcattattcttcttccagtagaattataaactgtaaaattttagagcttcaagtggtgttaatgatcattagtacaactgttttactaaagaggaccctagggtccagaaaggggtcattaaccaaagatccattgataatttttaaataaaggataatttaaacttaaacttctcatttacatatgggtcattcactgtctttcagaagcatgggcatctaaaaattatagttttttactatatgtggcactttacaggaattactaaaaaaaaaaaggagacattttaggtgcacttttctatttgccttgatcttgattctgttattgttctacagtgaatgggtgcaaggaaattcaaagataggtacatttttaaaaatggtttttggttggaacccagaattgtacatattcccatttttttcctttctgaactccaaagttcacaagggaaacaaccagaaaaaaaattacatgaagaaacataatgtaaatatatcttataatgtagatataacttttagttcctaaaaatgtgcaattaaaaataaaatattaaatgtattggggaatttagtattgatggaaattctagtgtgaagggttgtttcataagtacataataaaaacaagttacaacatctgagtatctagattttcagttatcggttttattttaaatgtgctataactataatgccttccggttgaaactagaaccatctttaacaagttaagctagatgtctcatttaacttcgcttttaaacctaaattccataatctctacatggttgcacaaaatcatctttcatatttgtgaaaatataaggctagctaccgtttctcaaacagcagagtaagaagcagaagtagaaatttagctccattaattaattaaggatttattttacctactcatacaacaagcaagcataaatagaaattaggaaacaccaaagatgcagagataaaccagaaatacggttgtgtggttggtgaaactgggtgtgaagaggccgttcaggtcctctctcaggatgatcaaaaccacaaacacgtagagacacctccaggttcacactaggttggtcagtgaaatgcgtcctgagtgttttctaggcattctgaagacttgaagggtgcaagtgtcatcctcctttgcaggtcttcccagaaacatccacctcctgagtcatggcgacttgtgtatgatacgatcccaggcctgggaatctcctgagaagggttaaacagggatgcccaaaatactagccctggcaaatttttcctagtcatttggtggttagtccagagcttctcaaacctgctgaagcgagcaggaacacctctctgtataaatggcttatctccatttaggggtagcctctagggttaatccaggagctttaaaagctgtctgtctttttctgtcctgtttttcccggtcgccgcacgctgtcccggtccgcgcctgctccctgcgtgccttgtcgccatgcctccgaaaattgaggaaatcaaggactttctgttcacagcccaatgaaaggatgctgaatctgtcaagatcaagaaaaataaggacaatgtgaagtttaaagttcgatgcagcagatatctttataccctggtcatcagtgaaaaagagaaggcagaaaaactgaagccagtccctgcctcctagtttggtagtgaaggagttgaaatgaaccagccacactgatttgaactgtattagaatacaaaaaaaaaaaaaaaaaaagactgttctcactaagcttactcaaatattatattcaacaaatatttgcaaatactaataacttaatgattctttcctaaacctcaggtcctgtgctgggcgttttatatgtttttctcaatcttcacaatgatcatgtgggatagatgctactgtcaacatccatattttggagaaaagacaaccgagacttaaagaaggttaattctccaaagtcacaaaatgagtatattcaagtgtgttaccatggtagtcagttactctaatatccaagtttgctaccaagtcagttactctctctagttcctttatctgtagactgaagttgtttcttctctctcctttaaacttctcttttgcctggtttactgaccacatgatctcagtggagaggtaaatctgaaagtggggaatttctttttttgaggcagagtcttgttctgtcgcccaggctggagtgcagtggcgtgatcttggctcactgcaagctccgcctcccgggttcatgccattctcctgcctcagcctcccaagtagctgggaccacaagcgcctaccaacacgcctggctaatttttttgtatttttagtagagacggggtttcaccgtgttagccaggatggtctcgatctcccgacctcgtgatctgccgcctcggcctcccaaagtgctgggattacaggcgtgagccaccatgcccggcggaaaataggggatttctaatgaaggccaatggatgaagacatttcctggagtataagggcatttatgtgtcttactacacattgacaatttgcctgtgcctctccatcactttctctagttggtgcctctgacaaatttttttttgattatatgctgtatatgaaaatccagagtcatgtttgaatatatttggctactaccttattatgtgctgcatatgaatatcagtttcacccactcaggtcaaagaaatgtaagtacagatagagaaacatatcatgcctttaatctgtcaaagtggtagaaatttaatatcaacttgcagctcccatctttctcctatgctaaattacaaggcattaggggacagagtgggggtttgagagcccctctggtccttgagtcagctttctctgtcggttactgttgagaaatccaccatttgctggtcccaggccacgttaatagttccactcatgttattgttaagatgtccctgcttcctgtccatgaatttctgtgttaaacctgagggttcagaatcattgttgcccctgtgccacacatcatctgcaatctccaatgctgtccatgaccttatctgcttgagtgatgttccccaaatttcagtctttttcctactatacccacaattttttattcattttttgacatatctggtatcctcagtattattaacttaatagtttttaaaataagtgaaaagaatttaaaaggaacaacattgctgcaatagaaaactagtatcacttgtcataaaaagaaggcagctacaaacacattttatgaaacccaaataatatcattacattcttgatggatactgtctgccaggtcacatacttcttagcctaaacttatgcaataaaaccagaaggatgctctgctccaatgggagggattctgggagagggaaataaaatgggtcaacgtttcacaagtagaatcccatttttgttcatttatacttagatctagaggcagggtggtgtgatagggaaagcacaggcctaaaagtcagatctaagttatacaagtcacggtcattgactcgagatgaccggaaacaggcccgctttactttctggaccattctcccttcctccctaaaatgcaagaatccaacagcctagacttcccttctgcgtaccggcttgccctgaggagctgaactacatctcccacaatgcgccgcgcgcggcgccaggaatgcctatcgccgcctcagacagctttcagtctgtccctcctacaactcccacaaggcccctcggccccgggccgcggcccggcccggagtgggggcgggcggaggcgcgggagttatggagggggcgggctctgcagggaagtgcgtcagaggaggcgcggggagagtagggtgctgtggtctgagctagagggtgaagctggcggagcaggaggatgggcggtgagtgagcgggacctgcgtcgccgggcaggggtcgcgtcgcggttccatgttcccggcggtttgaagaggggcccccttcccgggcgtggtcgggctgggcgggttccgagcggcggatttgtcccagggccgagccctctagggcggggcctggtcgggtaccgggggaccctggcccggggccgagcacggctgccccgccccagccctggccttctccggccccgccgtgaggcccaggaggtggctgctgcaggcgtccggcttggacgaaccgccgttcccagtgctgggaccctttaaggtcatttgagagcaccaggatgaaggggggatttttaaaaaatcaaaatacaaatccaactttttgagttttcgttgtcattgctcttatctttcctgagtcacttcccattttccaaactcagcaaccccagtttgcgagtctgttttcatgaacctttgtaaggtgtttggtgcggtcacggtgtatacttgccgtgtagtatttgactcagcgcgatctgccttgagtcattttaccgcggccatttactactgccgttgagccctgtccacgccttgggagtgttgatatgttgagagttttctgtctggctgaggagggatcatttagtttttgcggacgtatgttgcactgaggatttagggagagagcaagatttctgttgaggaggttcagaagtataaggaatcgggagagtagataggagtgaagcatttggcagcgtaaagaagcttggcttagctttaatggattagggagagattgctatctagcattattacatgttattgttctctttgctattttatacacctagaacaacctttccctcggggttaacaaacatcttcaactctgttttctgtatggctcctgactcttacctttgttttaggaggcttccctcttcagaggaaactgggagaagccaatttccactgcttctttttcct

SEQ ID NO: 9586 - DNA, 6000 bp, Homo sapiens
tatttccccagaactgccacaatcttctttctctcctaccccactggaagatcacaaaagtacattcttgttcattccctctttctgttatcctgccaaaaatacacagtcactgataaagctcaccaatgattcattacataccatcctcctaaggtttccagtataaatgccatttttaatgagcctcttttgtttcattaatgctaacagacatttaatagcaatgatgggtgccaaatgattcttacggtaccatttcattgaaacccagatgtttctgcacagacagaaacaaaggcaccagcccccaggttcttttcctacattctaatttccttagcagttggctgagcttggattcatttgaaagtaggaatagtaaaatgtaactattctttttatatttccccttttccctatagattaatttgattttcttcattcttccatttttttttttttttaatgagacggagtttcactctgtcacccaggctggagtgcagtggtgcatctcggctcactgcaagctccacctcctgggttcatgccattctcctgcctcggcctcccgagtagctgggactacaggcacccgccaccaccacacccggctaattttttgtattttaagtagagacggggtttcacggtgttagccaggatagtctcgatctcctgacctcgtgatctgcccgcctcagcctcccaaagtgctgggattacaggcatgagccactgcacccggtctttttttttttttttttttttgagagggagtcttgctctgtcacccaggctggagtgcagtggagcaatctcggctcactgcaagctccgcctcacgagttcacgccattctcctgcctcagcctcccgagtagctgggactacaggcgcccgccaccatgcccggctaattttttgtatttttagtagagacagggtttcactgtgttagccaggatggtctcgatctcctgacctcgtgatccgcccgcttcggcctcccaaagtgctgggattacaggtgtaagctaccgcgcccggcctattcttccattctttactgattaagaaacatgaaataaagaatgagaaaaagaggaagagagataaaaaattaaaatttaggttgagaatctatttttatttttaaatatcttaatgtagagtaaacaaccagaaatacaataaaataatacacacttttgaaaccctgtaaaaagaagccagaacctgggcttgccttgtggaggaactgtagcttcttggagcctctatgtgctacaatgatggccctctccaaacctatccactttgagacttgattagaatccccagttctgcccctgggttatgcatctgggttgcatgggtaaaatggtcctggacaagtattgctcccactgcctcataagatgtcattccccaaacaaaccaagtccccagaagcaaggatcatgacaaagttgtctagagcagcatgcagagaataagaaaggtaatataaactagaattccactttacccgcattgtcttagaaatgaatgcctattatattcctttggtgtgaggtcccaggagaaaattttgatcatttcagagcagccttctgtcattgtttggcaactaagtagagagacaataatcagaagagagaatatgggtgcaacagcatcaatcctctcccacatctgtgctatatttgtaattttctatatacataaagcaatagggggcaccacaaatgttctctagccagacttccagaccctgtcttccaaagcgaaactccggaagctgaggcataaaataacacagaaatagtcaaatggcatcagtcactaagaccttctgattttgctgctttaaatataactccaacttgctcccacctccctctctttttccctgccagtgacctaattcagaacctcttcacctctctagtctctacttttaacaactttaaaacactagacagtaagtaaaacagtgatgagaaatgtaagtgctccttcctcttgctttacacgtatgtagtcgggatcttttcctgctatattaaaggggtaggggttgctagagaccaaattttgcctcttccagaaatgctccataactgtgctagttcttaggtgaattctctgcctctgccacagttctatgtagtcaatagaatgccaggctaagattcacactaccttgctctgccaccacatctgtgacctcaagcttctctttcaatggtcctatgaaaggagtgattccacatgaaataggttgtctcaggcactactactagaaatcttatttcatgactgactgcttgccacattagcacatcatgtctgataggttcaattctgaatttatgatttttaacttctacttctttatccaaccaaaccaattctccttcttgtactccttactgtgggaaagacatcaccttctaccagaaacctggagacttcctcaactccttacactccacataatcagtcaccaagtttaaaaatattcccctagttggtcccgccttcccaagcccacttttaatgcactaaaaactcaccatcactccctttaactgcagactggctctccctggcttccagtcttgctcttacaccaatgtattcctcaccctactggctgattggggtttttacaataaaaacctgataatgaccgggcgcgatggctcacgccgttatcccagcactttgggaggctgaggcgggtggatcacctgaggtcgggagttcgagaccagcctgaccaacaatggagaaaccccggctctactaaaaatacaaaattagccgggtgcggtggcacatgcctgtaatcccagctactagggagactgaggcaggagaatcgcttgaacccgggaggcagaggttgcagtgagccgagatcatgccattgcactccagcctgggcaacaagagcaaaactccatctcaaaaaaaacaaaaacaaaaacaaaaacaaaaaaaaaactgacaatgtcattctttcttagaaccctttagttattttccagtgatacaaaataaaatcttgactcttagcttgccttacatcttgcccctcctaacttttccagactagtctccagttcctcccattacgtcagcagtagtcaatccagctccatcaacaccattccctattgagcctgtgacccagcctattttgcctctggcctgagatcacctttttcactttagtttcttattcaagacactggcatttcaaactgacgggtttttttgaactccgttcactgtggtattgtggcaccagtccacacctctaacagggcactaataacaataggtttgtttacatgtcacctcctcctccagaatgtaagttcttctcagtaaactttttatgcccaatgcccacaatggcttagagcataatagggtttcttaggcatttaataaatgttaattgaataaatttggttaaagagattattgtataagaaatatgcaggggagttgaaacatacgacctccaaagtcctttccaacttagactttcattgaaggatatcagtcccttccatgtttttgaatatcacatctatgtatgactatgtatacatatgtatatgtatacatgtatggctatgtatgactcccagagccataatttcaaagctctcaatctgagctttcgactaaaatatccatctgcctgttacatagcttcacttattatctaagttggcatctcaaattcaatacgtccaaaattaacttactttcccacacaacttgttccaccttagcagttttttgtatttgctaatgacaccattgtcctttcagggactgctgttaaaaacatcctacatggccactctcttctaaaataaatcactgcgtagacctctgcattcctctttcctaaaattctttttgtcgttccataggcttacagtctccatcaaactgcttgtgactctaattagcacttacttcattctgacttgcatgctatatttccatctctgttccacatttcaagatttctgtagatagacagcaggtgctcaacaactccttgtagaatggctgcatgaaggttgggatgttaggtttaaattgcctttgcggcacggatcttgttttacacttttttgtcccccaccccccgccataaaaagagcagagaaaacagggaacacatatattaaaaactgaacactgcatctattattctaactcggagctgttgcaacaactggcggcagttttaacaaaacaagccacgctctgccattaaaaaaaaaaaaaaagtcccttagactcagctcccagctaaaacaacccaggatccaggtttcccacccccttccagtggtctgatgtgcgtcggaggagcgaggagaaaggagcaaggagcaagctgggcctgaggagcagggagcgcgggatgggggacgtcccggaagtcactgacgagctggctgccgcctctgcgggatcagtttgggctgagggcccaacaataacaggcgcccgggccgggcgggggccgcggggatccgaagctggagggcgggacctggattggaggaggcgggtgggacgcctccaaaggccgaaggggattggaagagggaggtaaggggcggtggagctcgaggaatgggccggagaactagcgggtcgagcgaggagcgagcatgctgattgggtttcgcggaaggagacggaccagagctggccgaggattggccgcggtgcctagggggcgtggccggcgcgcgcgagagggagcgcgagggagctggctgcgggcctgcctgccagctagccggagccgcgggtgagcgcggcgagcggcgaccctggtgaggagcgcggcgcgggaggcacgttccttagctccgccgcggccgtcctccgcggctcgaggactccgcttccttccctcccctcccctgcgctccggcctggggtctcggcgcggggagcggagggaagggacgaaggaggagtaggtgaaagcggggtgaggggcggaagggtcccggcgcggggtgaggcgagggctgcctcttgttctcccgccgctgccgccgtctcctggtcgggtgccgcggccagaggcgcgcggggctgccgaggcacccgcactatgcaggcagactgccggccgccgcgatggcgagccgggcggtggtgagagccaggcgctgcccgcagtgtccccaagtccgggccgcggccgccgcccccgcctgggccgcgctccccctctcccgctccctccctccctgctccaactcctcctccttctccatgcctctgttcctcctgctcttacttgtcctgctcctgctgctcgaggacgctggagcccagcaaggtgagtggtcccaggggagtgagcggcgggggaacctccgtcggggctgcgggtctcttggcccctgaacaaatctgcagacgctgcagggaggcgcggtgcgctttcgtgcgtggccggacctggctgggtactcacggggttgagttgcaaaggcaaggtcttgcccgtctgtcccccaagttggcgcggctttactttttggcaaggccatttatttttctgaaagggggacgtgagaccctgctatgaaagcctcgttgatattaggtccttctggggaaaattttggggaggaaaaagaacctttggaggtaatgacccctaaagttaagctgcacggatggatggacactgtaggaaggcaggttaattaaatagcatcttaagcctattaaaggtaagtggtggtaattatgatcctttgtgaaagagcccgggttctgaagcgaatggaatagtttctgcttatctctgagtcttggattcagaacatgttctttacaatccatcattgaggctggtggtctagactgccttggtcaaacactgggtctgacccaacgctatgctaatttgcccaagtgaagctc

SEQ ID NO: 9587 - DNA, 6000 bp, Homo sapiens
gctaatatcgtagaccaaagaaagagaagaggtgtatgaagggaggcatgggtgggcagaaatgttgaactttatagtgaaagtgaagaggatttaaaagtctttcagctcaagagtgaaattacagttatgctataggaagagtaaattgatatcaaggtgcagggtgacacatagaagagaggcactagaggcagagaaattatctgggaagcaagcaaatataggatttaggcaagatgaaggaaatgaataaaagagaaaaaagaggggaatgtaatagtattaggagttgaggcctttgggaagtgattagatcatgaggatggagcccttaaaaataggatgagtgcccctataaaaatgagactccagagaactttcttgcccctttccactatttgaggacacaaaccaaatttgcagtcctcaacccagaatagggctcttacagaatttgaccatgctggcacactgatctcaaacccccatcctcaggaattgtgagaaataaatttctatagtttattagctaagtagttttatgatatttttgttatagcagcctgtactaagatgggaagaaactatttattgagtatctgttatgtgttatacatactcttaggagttttcacttatatgaactaagaagtgtcagaatgggtgaaaaaactataagaaagatattacaacaaagttgaatttgttgaagacttcacagctgattttgtgtttatgtgtgtatataaatacaacagcataatcatttgtgcttgggtaggtaaggatgaaaaagagagaggtctaaaaaggtctatggtttcaaatatgagtaactgctaaggtaatagtggtattattagaaaaaatggataacacaggctgggtacagtagctcatgcctgtaatcccagcactttgagaggccgaggcgggcggatcacgaggtcagaagatcgagaccatcctggctaacacggtgaaaccccgtctctactaaaaatacaaaaaattatccaggtgtggtggcgggcgccagtagtcccagctactcgggaggctgagacaagagaatcgcttgaacccaggaggcagaggttgcagtaagccgagatcacaccactgcactccagcctgggcaacagagcgaaattccatcttggaaaaaaaaaaaaaaaaaggataacacaaagagaaagaatgagtggggaaaatgatgagttatatttttgacaaaagtcaggaatccaagcaaaactgctcagtaagtagtaagaaatatagggctagaggtaaaaagggaagctatgccaaaagatatatagacagtgattatctgcacagaaatggtacctgaagcaatgagatttactttggttactaatggagagattgaagataaagaagaagacatattctaataaattcctcacttgaggaatatctagagctgtgctgtccaatatggtagtcattagccacatgatactacttaaatcaattaaataatgaaaactgtagtctttgtcacactacatttcaagtgctcaatagccacatgtggctagtggctaccatattggacatcataaatataaatcatttccagcatcatagaaagctgtgatggacagcactgatctagagtttggtcagagcgtagaagaaccagaagactctattctcctgaagccaaggaaaagaacatttcaaggagagaataatcagtggtatcaagtaaaagtgggtgacagccaacctcccccacccacaaaaaaaccacaatgaattttatgacttctaaagcactttcagcctaattataaagttgtaaactagattacaacagattttggatgaaatgggtgccaaataagtaacagatgtagacaattcttttcagtaatttttcagtaaggaaaaacagaatgaaaacatcagacagctgaaagagaatagagctgttctatatgtacatgcttaatataagcagatttgtgcactggctggaaggtttggacaccagtcaaccagctatttaccaactctagcaatctgaaaggcctttcatgtagcaatgacaattgaagggacagaattacatcattttaaaacaataaggagccttaaaaataatctaatccacccctcctcacattataaagaaagcagagttgcccatggtcacacacacaactcagtggtattaaaatttagaataagaattcaggtcagctgggcatggtggcttatgcctgtattcccagcactttgggaggccgaggcaggtagatcacctgaggtcaggagttcaagaccagcttggccaatatacaaaaaattagcctggcatggtagcagccgcctataatcccagctactgggacgctgagggaggagaattgcttgaagcctgcaggcagaggctgcagtgagccaagatggcgccattgcactccagcctgggcaacaagagcgaaactccatctcaaaaaaaaaaaaaactcaggtcttccacaacctagtccattagactatctcatttaactgcctcctaagatacagatcaaaggtgaagaaagcttcttcagttgagttccactaatctaccaagaaaaagataatgtctatgttcacatatacagaactttaattttttagaaatgaaaggcagtattttacttctttactttaaaatttagaaaaactgagaactaatcatcaaatatctattgctttgtaacaaacatcaaaagaactttaaatattctctaattaaatctttactatagcctgagaggtagatgttttcaccatttcacagattagaaaaacatgcatcagatcagtaaggtcccaaagccagtaagcgacactctatttggctctacagtaccatcaattaggaaatggaggagaaaatgagagaatagcataggctagagaatggaaatgagatgtttatcaaagtataaaagtaaccagaacagattcgtttactaatgccaaccttaaaaataaagccaaacaaaatcaggcctttagataaatattaatccaaaaaatgtttcaagaaaataacaccgattccctttggagaggggaactgtgcagctgaggacagggactgaaggaagacttttcacagtaaactctgtaacttttggagtttaaccgtaacagtgtattgcttactccaataaataagaaaaaggtttaaaaaaaaaacttcaaatatgttttagttcctatcaagtttgtaattgttagcactctacaatcctccaagaggccacagcaaaactgaaatttcagaaaaaaaaaaaaatcctaacttgtgttctgaaaaaggcaaggcagagcttatattaaggggcagaaaatttgcctttggggattgggggatcaggaggggagaaaagcctattgcctgcaacgatcaactcaattccactgctatttttagcccatttttttagtctgttgctaagaaaccctattgcctgaaggcaatttactaataggaacttacatgaagcaggagaaaccggtgatcctgaaattctttccaattaggccattctattttaatcagtccattctggtgccacttgataaaatatctcctttcaatctttatgtagctctactgtgatgttgttgcacttaacagcaaaacaatcatttatgaaatcttaatgtaaggcttctgcaaaccagtataccagaaatggagaaccatagttctggactctgatttttctattaatagttgtcttcatgaaaataccgtgtattccaaacaataccttgcaaggtaattttatattttaagagatctggtgcagagcatcggaaaaagagttgataaagctattatagataaaaagctgtgaactgaaattacgatttgggaatgagacgagaagagggctgagactgctactgcaaaacaacccggggggcgtgcggatcagagcgagatgtgggctgacgcagaaatcagctcaagatacaaatacgccaagaaaggctcgaagccggcgggaaccctgacgcttcgcatttctaccaactcagtttaagaaacccctaacaacgcagatgtcatcgcttcgttaattggtgccgacgatgagccacagcgaccacgctcaaaccgtttcgactgcagccaacctagatgtgccatttccacctagtcttctgccatcgctatctcccctataacctcaaattcgtccaaactaaaatctcgctatgttagtgataagaagttcagtgatgcagcagccttcttcagcggtgagctctttcctcacacatctttaaaagtccttctaatccgttggtttctcgggcacgcgggcagaaaaccgtgctaacggccacagaggttcaagaggtgccaacgtggctataactggaaaactggatccgaaatcgaccagtaaactgggtagctcggtctacgccccgcccaccacccttgctagccaatagccttcacaactcttctgccactcccgcccattccagtgctgtgccgctgctttttcttccactcggatctcttgagcgcccttagcccgctgtatacgcgcccctcctcggcttcagtaggcaagagggccatctgcccttctttcctgaaggtagaggggacaacaccagctacgacggggactccagaagtccatctcccgaacagcagcggggcgaaaagaaagaaaaagggtttccgaagactcctactcacacccacgctttcccttaacccggaagtgatttccgcccctcctctccctcttcggttgatactggaggagaaggacggccaggtctggcccggcatgccctgggcttccggtgacctctggcccttttctgtcgtccgctctctctgcctagcgtgctcgctcgctcattgctttccttccctccctcggtcttccttcgcacgctgtttggtgattgtggcgctcgcgacagacagggaggcggtggcagaggacacttgtcatggccgcctctaaacctgtggaggcagcggtggtcgcagccgctgtaccgagctccgggagtggggtgggcggcggcgggactgcgggcccgggcacgggggggctgccgcgatggcagctggctctggcggtcggggcacccctgctgctgggcgcgggtgccatatacctgtggagtcggcagcaacggcgccgggaggccagaggccggggcgacgccagcggcctgaagcgcaacagcgaacggaagaccccggagggcagggccagtccggccccgggcagcggacaccctgaaggtcccggtgctcacttggacatggtgagaagcagccccaggccgtagaggaggaaactggctcgtgcagcttttccttggcgggttgtgtcagtgagggggcttcccatcagacggaagctgccaagcggcagcacaacacttgggtttagggagactcatttctggctgccagtggagggcatagagtagctcgatgacaggttactggcattctttgacagtttgcttttggtttcagaaaaatcctttgcttttcttctcagtgacacagcatttatccctagtgttgtagatgggagtggggcatttgcaaatgtgatgattgtatttaataagtgaaggaagctaaattcgattaacaattggtacatcgtgatacgaactgtttctgtgatttccaaagcctacaacctaatcgctaagagccttttaataatgagccactcccccttttggagtgtgtttttgctgggggtaagtgggcaactacagtgacggttagttgacaaaagcaaaacaaaaacaaaaacgattagatggctttctacatagaaaaagaaagactacacaggttctaaagagtgaaatggtgttcagtggcatttgttttacagcctctgaactgtaagcagaactgtcaagctcccaaggctcgtcctctctcagcaaccc

SEQ ID NO: 9588 - DNA, 6000 bp, Homo sapiens
cttcgctttacaaatgagaaaacaagtgctcagaaagtttaaataatgtgtccaaggttaacaggtagtaagtggcttgacctataactcaaacctaggctaaagtgactctgtatactacataccacactgtaagttttcttgattgattcgacacacgtaggtctccaccaggcactatgtttgactttggagattgtgatggttaattttaggtattaacttgactggattaagagatgggtgctaaatcattatttctgagtgtgtctatgagggtatttccagaggatattggcatgtgagttcgtggactgagttggggagatcctccttcaatgtgggtgggcaccatctaaccggctgggggtctggatagagtgaaaaggcagaggaaaggctctcttgctctctctcctggagctgagacacccttctcgtcctgtccttggccatcagaactctaggttctccagcctttgaactctgagacttgcaccagtggcctcctggcttcttaggtcttcagccttagagtgagaggtgcaccaagggcttccctggttctgaggccctccagtttggacaaccatgctactggcatccctgtgtctccaggcttacagatggtctatcgaggaacgtctcagcctctttaatcacatgagccaatccacctatctctctatcctattagttctgtctctctagagaaccctaatacagacatgcaaatatactcaggacaaatttcattttctccaagctaatgtgatagaagaggaaactattatgtagaaacaaatatctactgacacattttgttagcagtatgaacaaagcatcatgggagagataactagacctatgaaatgatggagaatcatggcaaagaggaaaagtagggttgagaaaggcttcttggaggaagtgatatttgatcttggccttgaagaatgagctagaattctctgagttgaggagcaaagaagaaaacatgagggagcattatgagaagcagagcaaacagcgtaattgaagcacaaaagcctgaaagtagcatagtccaggcatggaataatccagtgttgctagtgttgcctgaccatgcaacagatgttagtttgcattccattggccagaagtattaacaagtgaagaatcttaattacaaaaaaaagcacatattcagagacactaagaagaaagagataatactctgaaactacaaccagctgatgactgataagtcaaaattaggaatttaatgatgctaagaacctctaatatgtcaggtcagctccaaggttagttcaatagtttcattcacatatgttggccaggcacggtggctcacgcctgtaatcccagcactttgggaggccaaggcgggtggatcatgaggtcaggagatcgagaccatcctggctaacacggtgaaaccccatctctactaaaaatacaaaaaattagccgtgcgtagtggcgggcacctgtagtcccagctactcgggaggctgaggcaggagaatggcgtgaacctgggaggcggagcttgcagtgagccgagatcatgccactgcactccagcctgggcgacagagcgagactctgcctcaaaacaaacaaacaaacaaaaaataaaagataaaacatatgtttacacaacacccttttatgctaggtgctttgtcagacactgattgaagatatggttcctgaccctgagaggtttatttactcattcagtcattcatttattcactcattctatttattcttttaacaacgatttgttgagtacatactatgtgtcaggcaaaggggctagcagtaaagaagactcatatggtccctcccctcattgagcttacagtataggaaacagttattactgaacacgaagacagctatataaacataatttcaataaaagatggtaactgatatgcaccaaagtaagactaaaacacagagaagtgcacttaacttatactggcattatcatgggccttgatttactgtgggatcctttgctgttatgttcccttacgttgaaagatgcatctggccctacacaaagcacagactatgagtaggtaggcacatacagttctaagccaaccccttggggcaccaggagacagcactgtctcatgtcgttgcatgacacaccaccatggggcaaaacatttgctgaatgaagttacaataaggatacaattgtatctacataaacatttaaagatactatcatatcaatacctactatgtggcaggatcttgatgttgtgtggggaggaagataaaagtagatgtatcgttgagacagaaatgagggcaagggaaattttttatgcattgagagaggaagtttgtgaattttttcgctggccatggagtcagggagacttcagtccaaccaccgtccctccctgagcttgtgaccaagcctcactttccttatctataaaggtgacaagagtgatttttttaagtttatttatctgtaaaggggaaactgtagcaactttgctattatagggtaaaaagaaaaaaggatgaaaaccagaacaagggagagagacaagagagagagcagtgtcacttataactgtgggcaaagtgctcaccattcctctttccctttgtttcctcatctcaaaaagggagatcataacatttatcctttctgaggttgttatgaagattaacttaggtgatatagctaatgtgtacttcctgtgttcaaaacattctaatatgtattatcccctccctctctacccaagaaactccttacatacagataagatgagctcaacatccaaattaaaatgctttgaaaagttaaaaggcaaacctttaaaatgattaaatactgaaaagagcttaaggttatctcagagagaggataatcaaacctaggcaggctgctttggactgtctctcctgggatatgcctgcttttgccccaccaccaaaacataccccagctagattcccaagagcagcagtggtcacccaggtggcctctcattccattttctgcacaaaaagacgttaagcatatagctcagtagctcccagtgtaaaacagaacatcacccgatctccacctctgaaggttggggacagtcctttctagtcactcttcagctttaggggggttggttggtatcagggacagctgacagccttatttagccaaccagctgctctgtgatacacaatgtccctaatgctcaaagtctggtggatgattcttttgtatccacataagcagcagttggaggagaatcgatgagtccctttggttgcctcggggtgtcaaggctgccattcaaatcattaccaccataattattaaccattgttttagtgagatgtctgccaggcaattgtttttatttttcaatcattaaaaaagcaatcaaatttcactagagcaatgcctgcctcacgccgcatcaacacatttattaaaccccttctgtttgccgagctcaatggaaagtcttggaggagggaatacttaaaatgctctcggatttaaaagaattgataatgctgtggggaagaggttcacacaaaaaagcaattacaggaagaagctcgatagtatacaatacactggtacagagtgtcatagacagtgccactttcatacgctggattttatttctgtggcaatgggatgcttgggaggagccgcactgtgtagaggatttggagaagtggggtattgtggtgggaaattgctttctttcccaggaggtaggaggaaaacaatcaaggaggtggacaggatgtgcactccattagagcagccaccagagcctgactttttgataagagagtacatcagttaggataacggttaaaagtatctttaaaagacttttgcttcaggatgaatgatgtggcctgtgtgattcagcgataaattcaaaagccttgtccctattgtggcttgcggccacatttcgaacccatttttcaagcatgttaaacccaagcgcagcgcagagggctgcacatggggcagtcacaaaccaagctcaataaccttgctggtggggatgtgttggatacgctgctaatgcctgtttgcgacaatgctcgctagtcccggtggtggcggtgttcacaggtaacaatgtttaccaccgtgaatggaacttgtttgattaaccctgatcagaggatgaaaacactaaagaaccaagtgagaaagagggaagagaaccgcatagggaagagcagagcgagtagacgagccgaacgcagagcccgcgaggggcgagtggaagctccctgcgggcaggtacccgaccaccgccctgccctgggcgtggcggcctcgggctcagggaccgcttcggcgctagacggccgcgtccggaggaaacgggcgctggtgaaagcctaggtgtcctggtccacgcgcgcagccggacgtcgggtccagggagagacgcgggctggggcgggacgggacccggcccctgaagcgcgagggtgggagtgaaagcaaagaggagaaaagtagagagagaggacagtggggcccagcgccgcgcgaaaggcaggaaccgacccgcggacaggaacgggtgcaatgaggtccccggcgagcgtgggaacacagggttcagcctcctgcggcgggcgagcacgcggaccccaggggcgggcgggtgcgacaggacgtgacctggaagcgcggcgcgtgccaccgccctggagcaggcatccggcctccgtggagcgggcaggcgggccccgggtctggagcctgcgactggggagggcgccgcgtcaacagcagcggttgcggggcggggccgagtgcgcgtgcgcggctctcgcgggcggggagcaggcgggggagcgggcgggaagcagtgggagcgcgcgtgcgcgcggccgtgcagcctgggcagtgggtcctgcctgtgacgcgcggcggcggtcggtcctgcctgtaacggcggcggcggctgctgctccggacacctgcggcggcggcggcgaccccgcggcgggcgcggagatgtggcccctggtagcggcgctgttgctgggctcggcgtgctgcggtgagtggctcctcgctcccagccctgcggctgctgtcgcttcgcccccgcgggcgtgtgggctgcgccccagccagcccggcggcgccctgaagagggtggccggggcgcagaacactcgggccctgagcgcccgaagtgcagacgtgggagggccccacggggaatcgggcgccccccttcttcctcccttcctttccctggtcgtcttcttccccctgggtgagagcggggctcatctcctccacccggttctccatctccaaatgcacacacacaggaagactccaaaccgcgcacctcgcgcaaaaattaactagcaagaaagggcgcgatcagaggcaaggggctgcagctgctagggatccccttctttcgcacccctctcccttctcagtgcttagacgcatttggggttgagggagggagagtgggagggcccgggcctcttgcgatggaagtgcgcattttggcgaagtcggtgagaaggggtttctgccgtttgcctcccacatgaacataggagcgaagaggacgtaaaggacacaattaagtttcattttcaactcagcattcaatcagaagaatcttccggccgtgtaatttttgctgtcgtttttaatcctaaaaataagcttgctggaaactcttcctttctcgtgaccctcacgccccatcagccacttgcatacattctaaattgtacgttgaagtttttcccactttatttgggggaaccgttttaaaagtaatctggttttcgcctgaaataggaagacagtaacctccagtcaaaacatgtgcagcagaatgggatttggtgtttttcgacgccaaagaacctccacccccccacccccaccccgagcttttggaatccatttcgcttttgtaaaac

SEQ ID NO: 9589 - DNA, 6000 bp, Homo sapiens
acatcctgatgtctccctttactctctgctgaattcggttctcttttctgcctccacgcttaatgattcccagtgcacaccctaataaacttcctgcacactagtctctgcctcagattctgcttcccattgagctttattttcaaaaactagaaagaccttccaaggatcagaggctggggctattgcgtgggcaaattaaaaaacttcacccactgctgcagcagggcaccctggctattgaccagtggctacctatgtttcttctattcccttttctgaataggaacgtgtgtgtgtgtgtctatgtattatttccctaacaactgaaaattagtcatattgacattttttgcccttagcttaaagtagctttctaatagggaccattgatgcaccatggcctggaaaacatctttgcagaaacttatgtgactatcttcttccatttgtgctggtaagacaatatactttaaacagtaatttttgtttgttgtttgttcctttgtttttaaagacagtgtcttgctctgtcacccagactagagagcagtggcacaatcatagctcactataaaagctgagtaatttagaaagaagagaaatatatatctcacagttctgaagagtgggaggtccaagatcaaggttccagcagatacagtatctggtgagggttgctctctgcttccagaatggtgccttcttattgcctcctgacagcaaggtggaagggggcaaaaagggatgaatgctgtgtcctcacatggtagaagagatggacgtgcaggcagctctccgaagccttttttagagatggggtcttactccattgcccaggctggagtgcagtggtaccattgtaactcattgcagccttgaactcctgggctcaaatgatcctcctgccttagcgtcccaagtagatggaactacaagcacataccaccatatccagctaagttttgaagtttcttgtagatacagggttttactatgttgcccaggttagttttgaacttctggcctcaagcgatcttcctgacttggcctcacaaagtttgggattacagacgtgagccacagcacccagcctgaaggctctttcatatggacattaactcccttcatgagggcagagccctcatgacctaatcacattccaaaagcccctatctcttaatgccatcattttaggggttaagttctaacataggaatttcaaggagacacccacactcaaaccatagcagtttttatcaaaatgggctaaatattattcaattggaattgattactgttatataagaatttgaactatgaatactctattctttcttcatgtggggagaccaattgtcctaaaagtgaggcttcctcactttattatgttttattattacaaataatacttcactcaacaatcaaacatttcttatgaaaattttttaaacactatcatggaaatgttgggtgcatattacttgatttttagttcataagacatggaactatgagatgctacatatagacctaaggcccctttgcgaatgttttttaatttggaccatctttaagctacaccattcctctcctaatcgaagctttattacggcatttactttagagtcttgatctctatgcaacaatgactcccattagcaagtattttcaacttgctccattttcaacttgttccaccatcattaaattttggcttattaatacagggcttcttggttccagaatgattatagttgcaatttactgattaccctgcatatatcacctcagttaaccaacaaaacagataggtattgttactatgttttaaagaactggaaaatgaaatgtggagcagatttggttctctggaagcaaacatagatagattagggatcaacaactgtgaaaggaagggatcagaggaagaaactgtgatgtaggcctaatatacccttggcaactcagttgggagctctgaatcaagtattgcccatcagcttcccatgtcagctcaaaatggccagaaatctgtacactttccttgctccatcattggatgcaagctgtcatgggaaagcatgaccttggtcaagatgtgtctcaactgagcagacctgggagaagtttacagttggatgtactctgcctattgcattccccccatctaagagcaaacacatccttgaagggggatctgagaagtgcatttctgtgtctactacagactctaagaacgtagaaaatctatgaaagcttctatagctaataactgaaaaagctttgataccacatgtgtgattcaaaagcttatatcccctgccaactcataattggtttctaaatattccttcaaactagtatatcaaaatcacctttggagctttctgaaaatggggatatctggccttcatcttgtgagattctgattcaatggaaatggataggattaaaaaattccaccaattttataaaaagtgtccaggttgattatagaacacagtaatgtatagaaactattgcttacaataacattagtgaaaaaatgatatcaaatagaaaaatgtcaaagattttaaatgctggactacttttacagtaaagctatggaatgtttttggggaaagttaaaaagatcagtaccaagattcatctctttggggttgtctaacatcaggggcaagacttttccaggatcctgtgtcatgttttgtgattgctggttctctgatcacctgggggaaaaatattgcagaaagtatagctgcttcatcattcatgaaagcaactgagtctgcaagtgaactgaaaaatttgccctccaagtagttcctgagatgtttgtaaagagagtttgaagatactaaattctatttcctttttgtctttcaacataaaactgattagacgttcatgtttttaaaattgtttcaatatgtaatgccatcgctttcaagaatgtagtaaactctttaaatttgcaaatataaatgaaaattgtaatttttggatcaaacaatatacataattatgatgggattacaaaagttataagcttaaggcaagattgacttgttactgagctaattaatttctgagtctggcttctttcctttttttttttttttttttaactagaacgaagacaggagtgagattcagaggcagggttttatctacagtgggacactcaggactctacctgtggagggataaagtgctaggcatgctaataaaagcaagaaatatataaatcttttaaaaatacattagatgctacataagattttttccgaattttgtctaattagcatggactttttatatgaaaaatatttaaaatagtgacataacagttttaagctgagataaagttaatatgatctctctctggtttgggcttatgtaacccataagccataaggttatggcttttgacctgtgggccattttaaagggacaatgagccttgcttcagctgcctcaagaagcttttactcactgtgaacacaggaaaaggaaggagctgtgaaaatactgccttaatatttcccaggatgtttatttgattagtaacagaaattctaaaaggctatgtgtaccctctctgtattatactatattataagaccaacactaaaggtggatgtgaggaagtcgtaatactgattgaacgagttctttaaaatcagcaatagcaactcattcatcattcatctccaaccatagcacattgtctatttgactcaataaatacatgataactgttttttaattttaatttacccttggcaactcaactgggagctctgaattaagtattgcccatcagtttcccatgtcaggtcaaaatgtccagcaatctatacactttccttgctcttaaaactttccttgaacttaaaactattgaagtttggccttggaataaaatcatcagtctctgaggaaaaaacttatataatcgacttctgtcaatgatcactaatgccacaaatctagatctctcatttggagtctcaaatggcagatgaatttgattagctcctatgactataagctaagctaattattacaagtggatgtggagaaaacagtcctatggtggcctgtgctatctgatcttgaacttttccatttcttcctttactgtttctattctacttcatcgagacaacaactgcatgaagaatgtttaaaatggaaatttcctttaattgatattcaagatctcctttagattagaactttattatctagagagaacatgtagccaatattaatgatgatcttgttccattgatatgtatccacagattaaagacggctgctcttccttcttctgttgaggaagtgcttcctgtcactcattttctccataacctgagataaatcttcactggtttaatgacaataagcatcctcatcttaccgtgacatgtacaggaaaaaaaagaaacctaaaatcttttacataaaagaagtttcataatcacaagctatcacaaaggggaaaatgtatacttaccattgatagttttaccataaatttcctgaccttaatttgattaaaatctcaacttaaagactgcaacaatacagatttctttaaagtttaattgctcatttcactgaacattgagtgcaggaaaaacctcaacctggggcaaaaacgtggtagagcggaaggagaagttaaggactgagctgctttgcagatcacagtgtttgaaagtgaacagccaacctgacaagaagcaaaaaccacagaacagagtaccacatcgtctttctgttcactttttttcacaaaatcatccaggctcttcctactctcctctcttaccacctctctcttcttttttttttttttttagttatttcacagatgccactggggtaggtaaactgacccaactctgcagcactcagaagacgaagcaaagccttctacttgagcagtttttccatcactgatatgtgcaggaaatgaagacattgcctgccatgcttggaactgggaaattattttgggtcttcttcttaatcccatatctggacatctggaacatccatggtaaggcacctgcttaggttatttctggttttatttctcagggggtcttggaggcaacattctcccttgctgaacttagtacggtgtaacgtttatacgaagtgggtaatcgtagatgaaaccaagctgttacatttgcttaccgaagacatcgtagagcataaaccaaattagaacatagtattcacctgcctaatcataggcatcgcatcaatagcttggctgactttcttaaaaacatgttgatggtaggaaaagagaactgagtagatgttataaatagttaagtacaaatctatcactacttcttgcaaaaatgctctggctgccatactgataatgaatagatagctcgttctttccaaactgagtgcagtagagtgctgcagtgctcagttgggtaggacagttgttggataatcggaattatacatatctccatggttaccctcaaataatattacctctaaataaaatctctatacttgcttcattgggatgtatgccttgagaataccgattgagaaaatgctacaaaatataggagcagaacttttcgtcattgcttctattttgttgaaagggaatggttcctacttggttgtcaattgaacacagaaaataagttggattctgcaaagatgatatttagccacccctgcaaagactttatacaggcaaaaaaaaaaaaaaaaaaaaaaaggcaatttcttttttattgtaaagtcgcttcctaccttatattgcataggaacccacatattatcaagaggaaaagcctatgagtggctcatcagaagcttctgatttttcaggttttatttttttatttttttgagacaagagttttgctctcgtcacccaggctggagtgcaatggcgtgatcccgcctcactgcatcctctgcctcccgggttca

SEQ ID NO: 9590 - DNA, 6000 bp, Homo sapiens
acactgctgcttttaaaacaatttttaaattttatagagatgggctctcactatgttgcccaggctcgtctcaaactcctgagctcaagtgatcctcctgcctcagcttcccaaaatgttgggattacaggcatgagccaccatgcctggcagcactgttgttttattaaaccatcctggcaactcaaaagattcatttttgtttttttcagcaacatttcttcaaggtataatatctgtactatccatcaggtagtcatttgttatgttgcagcagtttccaaaagatgtaaattaaatgtataacatttaggcatgttagcatactttgtgatcaaaatcttaatgtgaagctatttttgaatttgctagataaatttacaaaaatcttagcattgatttcaccaaattatctccagggggcagcagagagtaatcttaatgcaaatagatgattagaaacagcacagggtttgcttatttatttaaacaaaacagaccaattttgagcaggtaaggaagaaagagtgaattagtacataaatagagtcagtaggggttaggaacctgggagatgtattggagacaaaacagagttaccaccttcaaaaaagtagatagtaaagcagagactaattagccacatagtttaagaagtagactttggagtgagatttcttgggcttgaatcctgtttctatcacttatcagctgtgtggcttttgacaatttacataacctctctgctttgagtttcctcaatggtaagtggtatttactatataggattgttgagataattaaattaggtaatatttataaactgcttagaacaagatcagggtgttaagcttagggcttgacaaatacttgctatggatctgaccagtgagatttacagttgatatttagctaaatataaaatgtgattactaatttctctactctgattttgcttattttgatactgcacacatttgattttcaaacatctatttctcaattttcctttttgtataatctgtaaaattataataaaaaataatcattaattccaatatgatatattttttctaactttttaagaagactttttatacattgacgtagatcaaccatatattaggagtaaaaattttcaagaaaaatcaatataatagtaggtataaaaatagaagtatgcattttttgaggctcttttaagttactgtttagtctatttaatgattgtccatggaggaagatacaggatttcagatgagtcttgagagcatgggtcaatgaaggttacagagaggtaaattggaaaatagaaaatggaatatgcccaggaaagcagtctttttatgcaactgtatgttgaattatagcatttctgtggtaattcattagattcagatctgtagttattgtacaagggagcagagaggaagtaaagacaagagtggagtgctgtagagtttgagtcccttgaaattctttagactattcggtattgttctttttacctctgtgaaattggcatgttaccacttggctagcagtaggacagagtagattgagggaattaggactaagtgtttcgctagcatatttgtgtgagcgtgtgtgtgtgtgttatgtttgtgtgtgcacacatgcaagtgtatagaagggtaagtcaggccagatatctaagccagagagttcaccaaaagtaacagtgacaaggcaagtagttattggcccattttgcaagaatgcacatccagaaaattcagctatggtaggaagggcaggcaggtgctgaagttctcggcagtcaagactcaaatataagaggtgaatgagtcggcaatggtactggggagcaaagggtcccgggaacgagaagtcaggaataaaagtccatagaatctttgcagtaagtattcaagagccatgcaaatcttctacataatggggaggaatcccaagaggaaggctgcaacacttcatcttaaatggtttcagtgtggctaagtctgaatctgacattggagagaaagatatacacctgattggaagaagtttacttcaacaacatttatagttattacatcaattttcagtttattgcaattgataaattgagtaaaccagccatgctggtttgggggcattatggcctaaagtagttctaatttactaaagtttctctgtctttttgttttggctacaacattaactggcattacattgtcctgtttgtttctcttatgctatgattcttaactggtattattgaaggagaattggaaaactggtagagtaaaaggtttgggtttctggtttgaatgacacctgtttcttgatcctttttcactcttttgctttgcttcctgggtcctgtgcccaagggccgcaaccagggagaatttggggcctttagattttttagagaggtgtatttaccagacacatctttctcttattatactgactttcatggcatgtctttagtggatgattatgttaacaaacttttagtccctttattgttttaaacattcatggtccataaaaggtagaaggtgggagttgagaggttacaggcatgtgatttgggggtggagaggatgagggaccagggagagaaactgtcatcctgccaaatctatttagtgaattttatggtttttgatacccatcacttgattcttaaactgctgattgcagattgtggtctgacctcaggtgagtgcattggagtgtgtctatgaaagttgttgcctgaaatttcaaagtagaggagttgagtgaaaagaacacagggctacgaaatataacacattttattcccagccgtgccaataagttgttttgaggccacaggccatttagcccttctgtggtttagttttggctatgtcattgagcagatattaaaataaatgatctccaagaatttttgatgacatgagaaaaagctaatgtcaatataatataaacagatacagacttgagtaagaaactttcccagtatcactggactagtaattgcacaacagagacttaaccctatgtctatctgtatcctaagcgagtgtgaattttaactttaacttctctctgctcactgcaacctctgcctcctgggttcaagcgattctcatgcctcagcctcccaagtagctgggactacagatgagtgccatcacacctggctaatttttttttttttttttaagtagagatggagtttggagttttgtcatgttgcccaggctggtctcgaactcctgagctcaggcaatctgcccgcctcggcctcccagtgtcctaagattacagacatgagccactactcccggccaactttcacttctatgtagtggaaaaccagaatattatctgtattttaaatgatgtattctcactaattttccgacacctggtgaaacattagacagaagagaagacatttttgttttggtcttcccattgtcacagctcatacccttaagtgttccatgccctcaaggatctggtttcactgtcttcatcaaattaattaactggaaaaaaaagcttgagaaggggaaggggggaaatatttataatgtttggcaagaaggaagatgaaactgctaactgagaaaaaaaatgcatgctgtttaatctttttcctgtttgcaatgttttcttccccttcctgtacagttttgccttggggcagaaaattctcagcacatagaagatttttccctctctcagacataacttaaaagcatagtaacatagtaactagcaacagtaaggaagaggtttttttgttgttgttgttgttttttttttttggttagggggagtctgaattccagatgtgtggcaactaagagatgggtgattatttgtaatttggttaaaatgatcagtctaattttccaaaggtgaaactgaatggcaataagtactgagttctgataaacagaatgccctcacccccaacaaggtagatacctatgtccgaattaccgaaacctgtgaatgttaccttgtgtggcaaaaaggactttgcagatgtgattaaattaagatcttgaaattagatcatgttggattatttgggtggaccaaaaataatcacaaggtctttataaaagggaggcataagggtcacagtcagagaagatgtgacagtggaccagaggtccgaatgatgtagctgcaagccaagaaatgcaggcattctcaaatcgctggaaaaggcagggagcaaattctgcccgagcctccagatggagtgcagcccttccaacaccttgattttagtcccctaagatccatttcagacttctgatcaccagaactgtaagataataaatgttgtgttgtgttaagccactgagtttgtggtaatttcttacagtagcaataggaaactaatacacatatgatgtttacagggttgtgtgttgactcccattatagacaggaatttcacacaataattttcaagaaaacatattgtattccagactcaaatactaaggccgtaaagctcttcaacctggagaaagcctctaaaagtcatcataattgggaaatttacaaggatgggccaaagtagatcaatattctgttttactttttggtgcaagtttagacaaatctgtttatcttggacacgttcaatgccttactgtaaagtttgtctgtgtacagcagaagtgagaggagaaccaatgagctgagagataattcaatcaatctgcttcctccgtctttgcttcagggcttcatacaggaaatctattgctgtgtcaagttccagagaaaagcttctgttcgtccaagttactaaccaggctaaaccacatagacgtgaaggaaggggctagaaggaagggagtgccccactgttgatggggtaagaggatcctgtactgagaagttgaccagagagggtctcaccatgcgcacagttccttctgtacctgtgtggaggaaaagtactgagtgaagggcagaaaaagagaaaacagaaatgctctgcccttggagaactgctaacctagggctactgttgattttgactatcttcttagtggccggtaagtttgaattctctttgggagaacagtgagaaacctggtctcagctcttcctgagtttattttttgtctttcttctggggcaatacaaatcaattgcaataataaatatagggggttgctaaatatgggttactcccatatctagtttactttattatccttttttccggtgtcttgcttgttgtactttgtatcctactacaatatacagatctctataatttgtcttactgtccatttccttatttcctcctgttttttgaacaaggcaggataaatcaaatacatactagcagcaatcaaagtcagttaggttctctttatcttattctcttccccaacccccttttttgagacagggtcttgctctgttgcccaggctggagtgcagtggtgcaatcgtagctcactgcagcctgtaactccaggtctcaagcagtcctcccactcagcctcctgagtgtctaggactacagatatgcgccactatgcttggctaatttttaaaatttttggtagagatagagtcttgctatattgtccatgctggtcttgagctcctgtcttcaagcaattctcccacctcagactcccaaagcattgggattacaggcatgagccactgcacccagcctcttctctcttaatttttttttttaagataagaacgctaactcatttaggtccacattgccagtggcatagattaggacagtttattgctttctgtcactttcgatgattaggcacttcaaaaatataatatgcctacagttacagtggtgcgtctgtgatgtatgtctgtatttatcttcaagatgtgtgggctgtaagagacactacgagttagagaacagactcttcaacatctaggttcctatagaagttatagagaacttgggccactgtgggggtgtcctgg

SEQ ID NO: 9591 - DNA, 6000 bp, Homo sapiens
aactcatataagatagtgctatgtttataagcataaactgggttacttgaatattgctaaattatgatgaaatcattgaaaatgtcataccacggatcctaaggaaaagtattagcaattctgcatttctagttcatatggaaatgttaattccacttagaaaagtaaggtacaggcatggtgttattatgattaagaccttacaactgtagaaatgtagagtagtatattaatattatagacatgtttagcataaaatgcaagcagtgttgctaaattagttgcacattccaggctgcatctggatttcatgtgagcctattaccttacaaagctaaacagaagaataaacctttcatgcttcttagggtactcagacgttaggcagtttttgtttttcctgcaacatttgtccctgaagagtgccagaatcttctaaagcctcttttagaaaggcagtatgttattttaaagtagtagttaagatcatcttacttgggtgatgatggctgtttcacatggctaacagccacacttgcctcacaaataacctgaaagtatgttcatttttgccaaccctcttggaaaaatgtatatagtggtttacaaaaaaatagcttgtgtaaatttcagccacacgtttatttgtttccttctctacatttccgaagaaagaaagcagagaagttaatatcagggtagatttaggggagtgaccactaggatgagatacattatccaatgtatattgactgttggatttcttaggaaacgagagataatggaggaaaaaataccagaagatttctatcagtaagtgaaaagaggaagaactctgagaaagcataatattgaaatggaagtagatggtacaccctcaaatacttttattattttgtaaatggtgaggtaagccaagtaagtgagcataagcatttaatcactcttccgttcttatatttatcaagtataaagtactccctctgggccaagggctgggttaaagagttgtacttgaagtgctacctggatgtaaataataaattttaaatgaataaaacaaactttgtaattttgaaattgttgattcagtctaattgaattagaaataatttctaaacagcctaaattagggaatttttaaaatattgtctttttaaaaaattgcatcttactttcagtcatcatagtaagtcaatttagtttaacaaaagctgccaagaaatggactttatttaataaagatatttttaaaaacctttaattacattatatgatttttatacacatatgtgtttataatttgtttctgattaggtaggttaggcaattctataattctgattacaatccagatttactttaatatatccatttctcagagtgaatgtagagacaaattccagatttgattgagttactacaaattccacattcctactactttgatgtaaattacttcatattacagtatgttaaacatatgttttctccaagcaccaccaggcaagttcttctggtagtatgaggttaccagtataggtattagctaacaatcatgtataaacatcttctgtttatgatatgctaccagccaccatacttcctccttgtcctgaaaaaaactttcctttcttcatacaaaatctagttgactgacacaggagaatacttatactctttaaatgtctaatccttcccctcagagtatctctgctcttactgggggtcatactattcacctagcaccagcaatggaaacagatgattctcatagctaccagtcccttttatctctcttttcttccacttgacatggaagaagcaccaaaccaaaggatatatgttaatcgaagcctttgtctaagccaactcttcattcctaagtgcttaaaatcatcattctcagtaaactatcgcaagaagaaaaaaccaaacaccgcatattctcactcataggtgggaattgaacaatgagatcacatggacacaggaaggggaatatcacactctggggactgtggtggggtgtggggaggggggagggatagcattgggagatatacctaatgctagatgacgagttagtgggtgcagcgcaccagcatggcacatgtttacatatgtaactaacctgcacaatgtgcacatgtaccctaaaacttaaagtataaaaaaaaaaaacaaaaaacaaacaaacaaacaaaaaacaaaaaacaaaacaaacaaacaaaaaaattagcctgacaaggatggtcaagtctgttggtggtgtggggaaagggagggtgctcttttctctgcaatcttggcagaaaattatgtaatccttgcatctttgatcttcgtttgtttgtttgtttgtttgtttggcacttgaagctcatttgtccattgataccgggattcacaggattatgagttttttagtcaactatccacttggcctaactatttctcctatggcaaaatggattccaagttttaaacagctgagttataacttagtggtcgaacattggtttattaactgggcactgtgtataatccctgacataggacaccttgatttatataaaatgaatgcacagtacacataaaattaattgaactccatcaatcatggatttgtgacaattcaggttccaatcctccgtgttttcttaaaagcaaaataggtcttcctttttttcctcacgtaatctgtaagagttcatctatcttttaaactgaaaacatgcgcagaaaaagtgctttgagtattctgaggacaagccagtttcagcacagtgtttctttaaggcttgtgctctggtggggtttgataaggattcctaaacatgtttctttctttctttttattttatttttggcaaatgtcctaggctaaacatttgcttacataagagggatgggtataatatctatgtacatatttatttttatatatatggaatatttatggaaagatatataacaaacttaaaatatatgttgcctccaaaaaagagaaatgggttgcctaaagacgggaataagaagaaaactacggccgggcgccgtggctcacgcctgtaatcccagcagtttgggatcccagcagtttgggaggacgaggcgggtggatcacgagatcaggagatcgagaccatcctggctgacacagtgaaaacccgtctctactaaaaaaaatacagaaaaaattaggcgtggtagcgggcgcctgtagtcccagctactcgggaggctgaggcaggagaatggcgtgaacccgggaggcggagcttgcagtgagccgagattgagccactgcactccagcctgggcaataaagtgagactctgtctcaaaaaaaaaaaaaaaaaaaaaaagaagaagaaaactgcaattcactctatagcatcttgtaccatttggtttttgtaccatatgaatactttcattatttaaataaatataatcaaagaagagaaaaataaagtccttggctggtacaaacacattttttatcctcaacatcagtaatgagggagatgtccaagagtgtggggctgtcacttgagtgactatcagtggtctttatggtcctcatcacttgcttggctcatggaataaaaggagtgacaaatgatggtaacctgtctgccattagcaggagtactgcacacaaccttacttagtgtctccttgcaaatgacaagctttctgatttacaaatctccttccttgcatatgaacattttgagaagtaagtgccaggaggaacttgggtagcaattcaatgtgccctttaaatagtaatccttaataccattactcatgtgtaggattgagtgagagtttcctggagagtgaagttgatttagggatcagggatcagctgctgaggctggcacttggaaaaaacaagccaagcattcacaccccagaccactcaataccagcattgtctccaatccatctttcataaaggggttccaagagggggaggggatgaaggaaggagagaaaataaaccattttaatcctgtaagagaaagtgcaggaaagaggaaagaatgaacaagacttgaacacgcaaagccagttgccaagaatgtttcgtttgaaatcaactttggcttttaatcttagactccactgtcaagtttctcctcagtttccttctcccatctttcaggacattccccaccctcactccccacctcaaagctttcctgtcctctgtcccactcccctcatttgcaactctccttcccacctcctttttcttctttcctcaccccttccctctcctttcctggactctttctcctgttcttttataacttaagtccctctccttctcccctctctcctgaacagtacctctaagctccgttcccccttcttaaggaaatcagccaggcctcagatggagctgtcgtcctgacaacccaaaggcgcatcaggctttcattgaggctggctgctgctgaagggggcagttgtgcaaagcgaggggccacgtcgaggggagggcggaggggatgacgtggaggggctgttgaaaaccagcagggtggggggagggtgggggggtgggggggaggtgctgagctgagagagcgccagggactgggagaaacaggaaagggaggagggggagagaggctctgggttgctgctgcttctgctgctgctgctgctgtgtggctgtttctgtacactcactggcaggcttggtgccggctccctcgcccgcccgcccgccagcctgggaaagtgggttacagagcgaaggagctcagctcagacactggcagaggagcatccagtcacagagagaccaaacaagaaccctttcctttggcttcctcttcagctcttccagagggcttgctatttgcactctctcttttgaaattgtgttgcttttacttttcacccttctgcttgggttttatgagggctttgttaagtcttagagggaaaagagactgagcgagggaaagagagaggcaaagtggaaaggaccataaactggcaaagcccgctctgcgctcgctgtggatgaaagccccgtgttggtgaagcctctcctcgcgagcagcgcgcacccctccagagcaccccgcggacccgcacctcggcgtggccaccatggtcaggagagttcagccggatcggaaacagttgccactggtcctactgagattgctctgccttcttcccacaggactgcctgttcgcagcgtggattttaaccgaggcacggacaacatcaccgtgaggcagggggacacagccatcctcaggtagggctttcgggcaacttttctgctgcgcgcgtctacacgtgtgtgtgtgtgtgtgtgtgtgtttgtgtgtgtgtgtgtgtgtgtgtctgatctccttgaactccagctcctgatgctgcaggcttgtggtgtgtgtgtgtgtggtgtgtgtgtgtgtgtccctgttttactgactggttggcattatagctaacaaaattcaagggaattctggtccctgtcaagcagcagtggtgttggttaaatgttgttcggttcttaggaccttgtttctcttatcaaggaagcctaacttcacccatggcattagtgacttctgggcagtattctcactattgtaattgctgtggcattgcacttgagagttttgttgggggtccttaattctgaaagaaaggttgttggattatggctctcagagagtagtacacagtactgcattctccttgctcctcccgtgtctgtgtgtgtgtgtgtgtgtttttcatgccaacacacacacacacatacacacacacacacacatatcaaggttgtgtgtgagggtttctgatagaagactttctgtaaggatcttctaattgacatggagggcaataaatcaatcttagaactttggttggttactgagcctttcctggaatgtggatataaatcaacacaagatatgaagagcagaaagaaaaggaatttgccaaat

SEQ ID NO: 9592 - DNA, 6000 bp, Homo sapiens
ggactagatccagtagggtcttgtggtaatcagaataagggccccccacaaatgggattccccacttcctaatccccagaacctgtgaatatattacctcctatggcaaaggggaattaacgttgctgatggatgctgttcaactgatctggaaatgaggtcattctggattatctgtgtgggcccagtgtaatcacgaggatccttaaatgtggaaggaggtgagaagggcttggccagatgttgctggatttgaagatagaagaaggggaccatgagccaaggaaagtaggtgggctctagaatctgaaaaaggtaagaaaatgattctccccggaacctccagaaaggaacacagccttgtccacaccttgattttagtctactgagaatcattttagacttctgacctcaagaactataacacatttgtgttgttttacgccaccaagtttgtcgtaatttgttatagcagcaatagacaactaacacgggccctgtcatttacagtaaggactcatcctgagtgatacaggaagccattggaaggtcttggacagacctgatctgacttcatcggatcaccatggatgctgtgttgagaatggactgtagatggattccttcctttgtgcagcctttggctttagttttccatgttttattcattcaagattacaatggattcatttaagattataaaaatatataatctcacatttttaataaatcaaggtctctaacctgttttgttgctggaagtgaaagtctgaactgcactttaaattaaacttctatggaaaacacctcagaattggaaaatactgaggtaacttcctataccccaatataaaatcaagtgaattaatctgaagcatattacctttaatgaaaactggtaaagaaacttggcagaatatttgaaaattatattccttataaaaatgaaaatacaaaaatttttcaggtgacatacaaaatgctacttatgctattgcctttttcaagtcctaaaaaaacctagtggtattattttaaatttgctattagaattaattcagtagcatttcgttacaatgttccctgctcagagagtaactttacccaaaaataaattagggcttcaagaaaaagagctaacttttcccaaaatggatgaagatgggaaactttgacaatattcacaacagtgatagggattgggctatggggaggaggatggatattgctgtttagctccttgtaaatcctatctaggaatggttgacagaggagtgggaagaaacagatgtaagaaagacaacaagatatcaatatatctacgttatgagttaatccaaaatttgagagtgttgttttaaaatattaagtggtctatttatgtcaacatacaataaacacttgttggtttactttctttcttactgtaatgatgccactattttgtttcccattcctttattgtcattttagagcttttcttgacattttgcaaagggggagggggagggagaaaaattcctctaaaattttacttctaaaaggaccaaactgtgctctagactatatgctggctctaagcagctgggttaaaatatatacagaatgagttactggctcaagcaaggatcaaacaggtttttcctaactttaagaataatgttcttataaaacactccatagacaaatacagaccaaaacttaaatgcaattaacctttaatttatatatatgaatgaagagggatctgaggtattaaaaacttaaaatagctaattcaaaaataatttatacttggcattggaaatccttataattccctacatcatttttctttcttaattatgttcctcctaagctaataataaagttaattttccattcttgaatgcagattaactgattgtggaaagaagtggtccagcattttgatgggttgaggagagcctgcctaggattaaaatgtgaactttagcagttgacttattttcacgtcatcaatgtttttgagtcaaaggtgccatatagcagagtcttctaccaggattcctcatcctgatcattcccctctccacttctttcttggtaaggtagaccaactataactctctcagagatgagggtggggccaatctcatccaaattttatagcttctcaggtggtgtctgggtgtggtagtgatcatggtggggcagaggtgggataaatctttaggaggcaagtacagtgttaccctcagatagctttaagacacagtatcctcctgtgtgaagacagggtcatcatacatgccttacccatcccccctgggtttgctgtgaagattaaatcagataataggtgtgaaagcactttgaaatttgtaaagtgttacacaaatataacatattgtctctgtctttagtactcagaatacttaagggatttaaagaaatccttctgtggtcgtaaagcagattaggataaaagagctggtgaaactcatcattactaataaaaaattactcaaagtatatgtcaatggtattatctctatgaatttttttaaaaaccacactttttgtttcctgggagagtgtccttggaagcctctgtgtacagcacttggagcttctagtactcctgatctgctttcttctggtccaccatctaccatctgccctcatgcttctcagcagctggattgcctcctgaaatctgatcatcctcactctcccttcagaagccacacttttttttttctattgaaagggctcctttactgaactgtgagcattgtcctcttaatgactcagtagctcttgcctggcaaggcagaagtatccttaggtgacaaagaggcagaactctatctgcttatttatgatagcacagatatagcccatatgcaattggaacttatttggggtcaggggtcatttttttttttttggtttaaccttaaacctggtgccttacaaagtgtaggtacttggtaaatagttgttaaattgatgcgataaatatatcagataacttgctttatcagagctttaagctcagattattaggttatttaaaggatatttatttaaaggataaatattctgcctctatatttatatctgggattatggtgacatgaagagttgctctcagtagctcctatcacttgaccgcttccttgtttttcttcttatattgcttactcttataccctgcttaggactggattagactgcaggaatatgtacaagagagggtgagggattgaattggatggaaaaaagaaactctagtccttaccctggagtttaaaagaatgagaatgagcctcgtgatatcatagttggaaatttaaatttgttattaatatgaaaaactctactgtcatatcatttatttcttgccattagagatctggtagggaattctagcaagttggaagtagtgagcaaagttgaggcatctctacttcataatcaaaatttatcctttcaggatattcttgttaaaagttattaacatttcttaacatgtttcatttttttaaccttaaaaatataatatccacattttcaaaaagaagtacatccataactccaccatcttgatattttaattttacatatatcttccaatccttgtccaaatgtatgtttaaaaaatattttacatatttttcttctgtgcatattatttttgtttctgagtttccctgggaggattgtatttgccagatgagggctcaatttctgaatggctccgagaaccctaatttatgctgctgtagaaactgaccaaaatgggttggcatcccctgggcaggtatgtcctcaaatttagaaggctcagtttggaggctgaagcaggaagtgactatgagctgtacaataaagagcagagcccagtataagagaataaagataggttttacaagaaaagatgtaggtagatatttaagtaaaacaatttcagatgctaggaaagtctttctccccacccaacccaaacaaacaagaagcaaaaacaaaaaacccaactaaacaacgattacaataaatgtacataccccactagttaacatgtatacttaaggtcagtttaagaaagcactaacgtttaagctggaaaacttaaaatattagaagttgacataaggtttacaaaaggggcaagagaagatggcagtctctctgataggaatggggagttaggggcatggtccagcctctatccacttttcaaggaagaaaggtgaaaaggcatccaggaaacagcgcaaaaccaaaacactgtaaaattaggaattcctaattctgccagagtcaggttctttcagattatttaggttttataagagaggactgaaagtgaaaaagccaaatataaattatccgaaaactgcaacaggaaagactcttgcaggctcagaggaaggctgtggaaaagtcattgctagagctctccaggatgcatcaggccgacaccacctgtttgcggaggggtttagaccaagggaggggccctaactccggcgaggagggcgcccacccctcggttcccggagctggtggaggcgtgcgggggagcgggcggcgcggtgcacaggtggcgggggccgcgccagctgcgcgccgcgctctgctccgcgggtgggccgccaggcgtcgcgctggagccgcggttgccctggagaccaagcggggcgagtgggcggcgcggcgaggagccgagctgcggctggagtagcggggcgtgagttggggggagtggctccccggactgcgcgaggggtcggctagtcctggggcagggctgggtggcacggctggcgagcccggaacgcctctggtcacagctcagcgtccgcggagccgggcggcgctgcagctgcacttggctcgtctgtgggtctgacagtcccagctctgcgcggggaacagcggcccggcgctgggtgtgggaggaccaggctgccccaagagcgcggagactcacgcccgctcctctcctgttgcgaccgggagccgggtaggaggcaggcgcgctccctgcggccccgggatgacttctcagcgttcccctctggcgcctttgctgctcctctctctgcacggtgagtagctccagccctttcttcccggtggggccaggccgggtcggcgggcccggggcgaagctgtttggggacggcaaagagcctccttgctttgccgagggtcgggagtccaactttctcaggggcggcgttcgttgctgcggccgaggctcgcgcgcacctgcagcggctgcttctgccgcccgcgcagcccaggtgttccttgtcagagaggtaactaaactcgtccggctacctccggtcccaggccgggccctgactctcacctcgctgcgctctgcggaatgcaggatcctttttagataacgaactcccttactcactggtccagttagaaactgtatttagaaccagttgtctttactaggcggccctaggaaaactagaagtgcttttaaaatcatttggaaaactttatagctttaacgtaaccttttagaagcctatacacgttttggccgaaaatgatctttattttaaaactaattgtatactgtgctatactacaatcgaaaacaagaatttatttacactctagcttcatctccaaaggacttaagttggctctcaacaatacatagaatataacaatattagaacaaaataaataaatgtctttaaatttcttgttaacggtttttaaaacatctgtttataaatttagcttttaatctctgcttaatctttcttacattttcggtgaatagccatcatattaatttagatcctgattttcatcctatgcagtgctgtttgtttttgtgtgtgcattctcctgtggaatccagttttctgtcccatttattgctgagatttactgagattttttttctgaaggatgttatttaaaaagcgggttcagtgattttggaactttgtggttaaccctgtttttttt

SEQ ID NO: 9593 - DNA, 6000 bp, Homo sapiens
ttatgtcttttgtgttaagctacaaggcaggtagataaataccatcaggtcggggcagggttgggcgggcctgagttcagattctccctgggcaaggcctgccatggcctgctgggggataggaggggtggatctcaggccaatggggttatgttctagaggagagtatggctgcttctgctgtgcagtagagtttgcaaggggagtggggattagctcatagtgaaagtcctcatccagctcccacagagttggtgaggccagtcttgctcccatggtgccccactaacagcactgagtttagatccaggcagctggtgtgtagaactcagacctgccctgggccatgagcttccctgctgaggaagaaagcatggctttcaggtcacacccctccccatctgcctgcaatgctgggtgcccagcttctgcccttgtatctgcattagtttccatttgtccgcccacccctggattctgttcaagggtgctcatgcccacttgaaattaccacaaaactcagttggtagcttatttcactctgtgactccttcctaagtttggtggctgccttccctgagggcccctgttagatatggtcagggatggcttccctgggctcaagctggagactgagaatgcctccaaggctcttcttgctgctgcttctacttttgtattttgtgctgctccctaagtccattccagctctaggtaaggctaaagccttctcccatcatctggattttcagattccacagtaggaatgtgtgttcagaggcaggctctccccttttcctacactgagaattcagttttttgcctgtctcacagactttgctgtggtgtgctcctttcataggatctgcgaattcttttgatttcctggtaacttcctgcagtggttcttggaataaaagttcacagtgttaattgctacacactgttctgtccttccaagtgggagaggcacactagcactgcctactacctgccatcttagaacagatagacaaaccaaaacatattttttttatttttaattttttactatactttgttttagggtacatgtgcacaacgtgcaggttagttacatatgcatacatgtgccatgttggtgtgctgcacccattaacttgttatttaacattaggtaaccaaaacatatttaaaaggatgtaaatttattgctaagtgtggactcatggaggccccatatggccacctggttcttcctgagtccttaaatcttccattattaaaaactctgtactccattactcatcatggggtagacaaaaaactagttctgggaagacctatatccttaataatagactctcatgtatctcctgctcttataagctttgctgtaactaaatactgcaaagctttaatccattatatgaaagtgtgttttccccaggtaaaagccttttgtgatacactgagtacaaccaacctttcacaatctagaactcagagattgagtcttctggaaataacatcccatctgagaaaaactgctcttgtatcccattagaagagattatatcatgtacttctctcaccacccacagtaaaacttcagggcctcgagttttggtccataccttgtaactcaaaagagccccttcaaactcttggaattatacacctgttggagatcttaaggtagggaagtttctccccagaagcagatggcatcctagacatggacagctttctcaagatcatggatcaagacttctctgctatcatgactatcttatctttttttctattttttccatatttcctgctgggaaatccatgggaccataatttatagatggctttagctaaggctcatgctctaacaagaaaaactagagcaactgttgggtttctggactgatgccaaaaaaaaaacccctaggaaacaattttattaatgccaatgcctctctgtgaaatgaaagccaccctaaaacctcaaaagcagattggaaagctatctttaattttgtagatatcactgctacttgctttcctacacttactgaaagcaataacccaacttctccaattaataacctaccagctaccaaatatagaaaagctgagtgattcttttttttttttttttttagattaacttgcttggctcctttattattctcctttattattaaacttcctcagcataatgtgatttgggcagacagagatgttatcctgtggcttattgttggcctacattctcttttttttttttaaatttattttttttttagtatttattgatcattcttgggtgtttctcggagagggggatttggcagggtcataggacaatagtggagggaaggtcagcagataaacatgtgaacaaaggtctctggttttcctaggcagagggccctgccgccttccgcagtgtttgtgtccctgggtagttgagattagggagtggtgatgactcttagcgagcacgctgccttcaagcatctgtttaacaaagcacatcttgcactgcccttaatccatttaacccttagtggacacagcacatgtttcagagagcagggggttgggggtaaggttatagattaacagcatcccaaggcagaagaatttttcctagtacagaacaaaatggagtctcctatgtcaacttctttctacacagacacaataacaatctgatctctctttcttttccccacatttcccccttttctattggacaaaaccgccatcgtcatcatggcccgttctcaatgagctgttgggtacacctcccagacagggtggtggccgggcagaggggctcctcacttcccagacggggctgccgggcagaggggccccccacctcccagacggggcggcggccgggcagaggggcccccacctcccagacggggcggcggctgggcagaggcgccccccacctcccggacggggcggctggccgggcgggggctgccccccacttgccgggcggggcggctggccaggcgggggctgcccccccacctcccgggcggggcggctggctgggcggctgccccccacctcccggaccaggcagctgcccggcggaggggctcctcacttctcagacagggcggccagtcagagacgctcctcacctcccagacggggtggcggcggggcagagacactcctcagttcctagacgggtcgccgccgggcagaggcattcttcacctctcagacggggtggtggggcagaggcgctccccacatcccagatgatgggcggccaggcagagacgctcctcacttcctagacggggtggcggccgggaagaagcgctcctcactttccagactgggcggctgggcagaggggctccccacatcccagatgatgggcggccaggcagagacgctcctcacttcctatacggcgtggcagcagggcagaggctgcaatctcggcactttgggaggccaaggcaggcggctgggaggtggaggttgtagcgatccgagatcaagccactgcactccagcctgggcaacattgagcactgagtgagcgagactccgtctgcaatcccggcacctcgggaggccgaggctggcagaccactcgcggtcaggagctggagaccagcccggccaactcggcgaaaccccgtctccaccaaaaaatacgaaaaccagtcaggtgtggcggtgcgcgcctgcaatcccaggcactcggcaggctgaggcaggggaatcaggcagggaggctgccgtgagccgagatggcggcagtacagtccagcctcggctcggcatcagagggagaccatgcaaaggggagacgaggaccgtgcaaaggggggagggagatggggagggagacagagagggggagggggaggggaaaagctgagtgattcttgcaaaaggtatatattatgcttccaggcatcatatgctcaagacctggggactatgtgggtataagtaactgattgtataacgccactggatgaaatccagtaatgtcctttttcactaaatgtggttatacacccttacagcatgttacaaagggaacacaaaaaaataagtttcacactggaccttgttcaggagcagtgttgacctatttcactgacctatcctcaactgccactaggtggccctcttttccagcttccaagggcctacattgggcctatgcggcctcagtatagcctcagatttcctgctatgaagcttaatgagcccagcactggctctagctatggtttgttcctttttgggtggagtggatgtgtggttcttggagaatctactactttcccgtgagtgcagtgggagactgcattagagaatctagctatcctgactgcctaaacagagcctaccataatttttcactcaaatctttagtgtaaatataattgtctttgctttctgtaataatatctttgaagaaatacggatttaaaaaaatcatttaatattctcagacctgcaacatgggaaaaatattattattattattatcatttttgcagttgagagggctgaaatctcgcagggtgattaagtttattagcctctctaaagtctcagtttcccactctgtaaaatggaagggtccctatctctttcctactgctttgtgagtatttaaggggatggaatttgggaagcgctcagcacccagtctactattggcacagggttttaaagccacccagaggccgaggcgtcaaccctccgtttccctcccggtgctccttccagcgcccggtgtggtcgatttggcgggggtggagcgccaggcgcgtgcagagccgggcggaccagcctctccggccaaggcgggaggcggagctcgtactcaagagccgcctcccgggcggctggggcggtccccgagctgctttccgcgttctcccctctccgcgggcagtgctagctcgccgcggccgcctccggggtgagtacgctggctccgccggcgcccgggaaatgcagttccctggacacgggcgccgtgcgagggtagccgggcgacggccggggtcagtcccagggctgtagcggggcgggcgtggggatgacgtggcggcgtccgtggggcagtcccgcctcagccggagcggtgggccgggccgggggcctacggaggccgagcctggcgggaggcaccggctcaggtgctggcgttccgcgcggcgccgcctctgctgcgggccgggggagccagacgaggtgctgccgggtaggaaaaaatccagggctcattcataccccaggtcacgattccggggtcgcccccagcacttctccgccgggtgcatcaacctgaaaaagccccttcttcctggaaaccctccttctccagcgtttcaacggggaaactgatcagctgacaccagccccagtcctgcgaggggccggcgacctttgacctttctccaaaggggttggtcacctggattataaaagacttcggagacagccatccagtgtttgttgatctgtatcccttgatgttctgtcttccattagataagggctgttaattcttggtttgaaaaaaaacagacaaagtccaaaggactctgcatcgaggagaggcctatgggttggtagccttaggagagtagttatcaacagtgggtgggtgtgcacactgttgcaaagtgttccagagtgggtgagggatggggacgtggcggtggtgagggtactggtagacctcctcagccgtttggtgatgaaaaggaggaaaaagaaaatggtaatctgagcgtggaggcgagttgtggcttttttttttttttttaaatttttaaagaaaggaaaataacacctttaagatgcaagaaaatcaaggagagatcaggatgaataggattcagggtccggattgagaaactgggattcagaagggagggctattcccgagacccaggcggggagtgctggaaggtctctcttgggagaggagataatgcttgattggatatagtt

SEQ ID NO: 9594 - DNA, 6000 bp, Homo sapiens
aggctacaataaccaaaacagcatggtactggtaccaaaacagagattagaccaatggaacagaacagaaccctcagaaataataccatacatctacaatatctgatctttgacaaacctgacaaaaacaagaaatagggaaaggattccctgtttaataaatggtgctgggaaaactggccagccacatgtagaaagctgaaactggatcccttcgttacaccttatacaaaaattaattcaagatggattaaagacttaagtgttagacctaaaaccataaaaaccctagaagaaaacctaggcaataccattcaggacataggcatgggcaaggacttcatgtctaaaacaccaaaagcaatggcagcaaaagccaaaattgacaaatgggatctaattaaactaaagagtttctgcacagcaaaacaaactaccatcagagtgaacaggcaacctacagaatgggagaaaatttttgcaatctactcatctgacaaagggctaatatccagaatctacaatgaactcaaacacatttacaagaaaaaacaaccccatcaaaaagtgggcaaaggatatgaacagacacttctcaaaaaagacttttatgcagccaacagacacatgaaaaaatgctcatcatcactggccatcagagaaatgcaaatcaaaaccacaataagacaccatctcacaccagttagaatggcgatcattaaaaagtcaggaaacaacaggtgctgaagacgatgtggagaaataggaacacttttacacgttggcaggactgtaaactagttcaaccattgtggaagacagtgtggcgattcctcaaggatctagaactagaaataccatttgacccagccatcccattactgggtatatacccaaagggttataaatcatgctgctctaaagacacatgcacacgtatgtttattgtggcactattcacaatagcaaagacttggaaccaacccaaatgtccatcaatgatagactggattaagaaaatgtggtacatatacaccatggaatactatgcagccagaaaaaaggatgagttcatgtcctttgtagggacatggatgaagctggaaaccatcattctcagcaaactatcacaaggacaaaaaaccaaacaccacatgttctcactcataggtgggaattgaacaatgagaacacttggacacaggaaggggagcatcacacacgggggcctgtcatgggctggggggaggggggagggatagcattaggagatatacctaatgtaaatgacgagttaatgggtgcaacacactaacatggagcgtgtatacatatgtaacaaacctgcacattgtgcacatgtaccctagaacttaaagtagaataataaacaaaaattgataataaaaaaattaattaaaaaaaaagagtcacaggcaggaagagtaagatgccaagtataggaggaagagtgtgtggtgggttagtaagaagacggccctcactctgaacgagggctagctctgaaagtcacttgttttcattttaagcattttggtgatttccatctcaaagaaccagaaagaatgtgacagcattttaagaggaagaggtgaactctcccactttgatgagtttgctgccaactttagcaggctgtggcactcctggggagcaccatagccttaaagcctagatcagctgccctatgatgggtgcaggccttatagacatgcccagatgaagtcatatctaaaaatgaacttctaaacctcacgggagggtcatcttagaacatgaaaaactcccctgaaaatttttgtcagtgcaacaggttttgtttacttggcaacagtgagcccactgtgggaaaggggttttcccagcagtcaggctagcaccgtgggccctgagtaggcaacctgcaaatgacagcactgaggccactgccaggagccagcccagccctccctgtggatgctgaacggaagggtaggaaggttgagctcaggccagctttatcagcatgaggaggtgaagtggctccaaggtcaagagcagaaagatggaaccttcatttccacagagatcatcctgttcaggggtaaagcaaagggccaggcttcccctacggtgtcgcaacagcctctgcaccaacctctgagtgacaaagctgcatctccctctcgtcatctcttcctgctgggtcctctacagtctgtgattgtgttttcatttcatttataatgtctttcattgtacaaatatttttaatttttatgaattcaaatctgtgtatcttttcttttttcgtggcttccaagttttgtgtcttgctcaccctagaattataaaaatatactttcataaatttatcctttcaatttttcacataaaaatttttaaaagaatttttatgtgaattatttttaaaagaatttcttttacttttattacagtaaagccaaggatggatttacaaaaaaataagtggcactaaagaatttacactgaggagcagtaattcctgctttattcttctccaaccctgggtctgctcctcagaacaaactcatttaaagtttttttgttttgttttgttttgtttttgaaacagaatcttgctctgtcacccaggctggagtgcaatggcacaatcttagctcactgcaacctccgcctctgaagttcaagcaagtctcatgtctcagccttcccagtagctgggattacaggtatgcaccactatgcccagttttttggttttttttttttttttggagagctggggtttcatcacgttggccagctggcctcgaactcctggcctcaagtgatccgcccacctcagcctctcaaagtgctgggattacaggcatgagccactgtgcccagcctccttttaaatcttttacttggttttgttttgttttgttttgttttccagtaatataggtattcgggttcggcttcctttgcccgtcttcatccatctcacctccagtgtccagaaatttaccttagaaatctgtggtccacaggtcatgctcctagacacattgtaggaggaagaggaattaaacacatcccattagtacataatcttggaagagaagccttctgaattttacaatcaggattggggaaactctgtaaagtaccttcctggtgttcctttcttccagcctctttgattaagtcacatcaaagcgctaatggcaaagttgtttaatgtgtgtttctccaaggcaggttaggatttcactgggattcttaaaatttgagggtgtctgtgatcgtcaaaatttgtattcatgtagtccctcatgaaatttctaaaactcggctgggtgcagtggctcatgcctgtaatcccagcactttgggaggccgaggagggtggatcacaaggtcaggagtttgagaccagcctggccaatatggtgaaaccccatctctactaaaaatttaaaaattagcctggcatggtggcacacgcctgtagtcccagctactcaggaggctgaggcagaagaattgcttgaacccaggaggcggaggttgcagtgagccaagattgcaccactgcactccagcctgggcggcagagaaagacttcatctaaaaaaaaaaaaagaaaataaatttctaaaactctgtatttctttgctcttttaagttgacatctataactttctattactttaaatacctggaaaaaaaatcacttccagtgcattgtaataatgtatcaagtagaagtggctaaaatcagtgaaaacatttctttgatctgaataaatgttcaagaaaatagaaaacatgaacttacctccaatctatgttccctttacttgaaaatgtaatgttgatctactagaggtaaggcaggaattgtcacatccatattccttgcaactattcaaaatatgcatctgagaccagaacaagacacaggtgaagaagggtgctcactaggccccttctgccaatacagaaggagacagtgcagtggagtcctttcatagcaagttctgccttcatgatttccaaagcttcagtattccaaatctcaggtgaatagggtggtatccactaagctctgccacaaacttgttgctgagatgaaggaagccgccgctgtagtcagtatttctcacccacacggtttgctctctttctggctggtgtgggaaggatggcgtcttttttttttttttttttttgagatggagtcttgctctgttacccaagctggattgtagtgttgtgatctcggctcactgcaacccatgcaaggtgctgtcaggttccacctgtgcaaacaagtacactggtccagcatgggtcagctgctcactcacaggggctccagaatcctacaaagggacacacaggggtgggtggcaacctagttggaaatgggagtgatgggcatgactaaagtcttcctcatcccaccagaggcgcactcaactgtggctagggtgaccagaattcactgtccagcgtggctggcaggagcccactctctgaagatggtgggattcagaggtgggagtagagttgggtggtcctgtgagctgagcactctcccaaaagtgtcccctacatatgaggttgacagcttattcctgcagggactcaggagtaactctgggtgctaaaacaaaacttgagaccagcacagaaacagccagcccatgaagctggcctcccatcacacagcaaggctagccagatgcccctcactcttctcgggcaccattcttctcctcccctaggccgcctggtgctcgtggtgtttcatgtttgttagtccatgcacggtggtgagggaggctgctgtgtgatttgccccagccacagcctctacaaaagcaactagaagaagacggcagcagagggcgcttcttcaaacaccctgtccaactcctggcactgacaagtactgagtgaactcaaaccctctgtaaagtaacagaagttagaaggggaaatgtcgcctctctgaagattacccaaagaaaaagtgatttgtcattgctttatagactgtaagaagagaacatctcagaagtggagtcttaccctgaaatcaaaggatttaaagaaaaagtggaatttttcttcagcaagtaagtacatttactattatcttactatgggatagcttggtagaactagttaccagcaacctcactgctttttaaacaaacaatacctctgctaccacctcctggatccaggcttgccctcaaaggaacccttagggtctcattcccacaggaggctgtggcttcccgacatatttggagcatcatagtgagaattgtggcccattattttaaaatatcctagatcctagcaaatattgtttttgtgggccgtatttgaatttctcaagccagtaaaattctagtgaaagtgggaaaatcgcttgagctcgggaggttgagactgtggtgagctatggtcacgccactgcactctagcctgtgtgacagagcaagattctatcttaagaaaaacaaattctggtgaataagtctcttttaactaatcctgtctaaaatggatgatggctaataaaacaatatggcgtggctggaactctagctctagggtggtctccaaagaggacactcaagcattctctgagcagcacggggctgtgtcctggtagcagcctgaaggggtgacagtggagcacagtgtttattttcatttctcaattttgacatatttactggaaaaattaatccctagccacctcacatgacagtacataattttttttttttttttttttgagatggagtctcactctgtcgcctaggctggagtgcagtgttgcaatcatcttggctcactgcagcctccacctcctggattcaagcaattctcgtgcctcagcctcccaagtggctgggattacaggcacccaccaccacacctggctaatttttgtatttttggtagaaatggggttttgccatg

SEQ ID NO: 9595 - DNA, 6000 bp, Homo sapiens
tacagaaaataaaaacattagctcggcatggtggtacatgcctgtagttcagttacttgggaggctggggtgagaagatcgcttgaacccagaggactgaggctgcagtgagccgtgattgtgccgctgcattccagcctggctgacagagcaaggccctgtcttaaaaaagcaagcaaacaaaaaaacctaggcttgttctatttttctgctctttacccttctcatccttaggcatatcctatctcatgactatggtaacttcaagcattacatcgtcacgcaactattcaagcctggatgaaaggtaggcctgctatctaccagggagtatactttttcccagaagctcccccacgtacttcctcttacatctcattgctcacaggtctacttttgtgccagtcgctatcaaggggaatgagatattgtgcttggcttcaaccaatcttagttcaggctctggcaacttggggaaaagcccaccttccttaacatattacccaagcaaaattagatttgcataaactgaagaaaaaggggaaatggctatggaagacaaccaatagtgtctgcttaagttcaacttgacactatgtgtccagagcataaaattatgcctctgttctattttagtatctatactaggaaagtgttaaccccaagctcagtgtttctcaaactgtatgtggtgaagaaccagcttttttcccctcaattcatcacagacccaacactaggaaaatgaaataaacccatatagatttaaaaatatgctatacaaacccagaatttttgttagttcaaaggccatagtttctctgtgaaattgctataaaaaatgtctaaagtcacaatttctgtccttaccccagcatgaaccagcatggacaagtaacaaacagtttgaagaccaggctgagttcatgaccacacttgttgactctggtgacttcataagatggcccccgcctgcctcgcctgcctcttgtctgctgctccttttgattcacctacaacaagctgttctctgttaccagaatatgccacgtattttgttttacttctgggactgactttacaatctgttctttcttcctggaatgccctcctctagctggggaaaacctactcatctttttagaccagattaaaagtcaccttccctgtgatgttttctcgtggaaaaaaatatttttttaagagacagtggtctcactatgttgcctaggctggtctcaaactcctgggcacaagtgatcctcccatctcagcctcccagaatactaggattatagacataagccatcacgcccccaacctcatgaattttagttaggttatagcagtatagtaaaagtccctatggattgaattatttgctccctcataagtgttttttctttgaatcctaagtacacttattttattggattacagtttctgagtcagtatccgggatagactgaaagtttcttgaagtgataattgtcttattcatctttatatcccctgttcttggaacacatagtctgtcctgaataaatgcctattgaattgaatcagctcaacaaatgagaaaacttatgtttctttccttttttctttcccagttgttttttattgtgttctgccttcatgtttgtgtatttccttataagaacataccattttgacagacaatacattttttctttccttttctatcaaatctggacttacacaagacacaacttttcattgttgtgttctgatcacaggtcctatcctgtgggcatcaatgtcactattactgcaggccactattactgcagtgtaatgtcactattacatgcacccatgattctctgacacgtatgccaccctggcaatgtactcaaatttccagcagcaatagatgagcttgtatatgcacacatgtaaactcccaaaagtacctggtaggatgttattaatatactgtagagaatatacaattcagagacacactgacctaggctttaatccttattcacatactgactagctttgtgaccttgggcaagttccttagcctctctgagcctgctgcttctattaaaacaaaaaataggtatagtaagataacataaaacaatagctgcttgataaatgttagtcccctctgctgagatagcacatatgtggattgacaggaaagcaggctgagtgcagtctggacagcaggacaagtgaaccatagagttaatgggtctgcctgtctctttaatgggtcagggccaacctatttggcaggtctcctaagaaagatgagctgctttgaaattgtatcttgggcagagctttggttgcttcttcatttctatgcttctgacttccctgcttacagctggcagggacagctactctggaagctcaggggctgcatgtctgtgatagaaggatgagcagctgctgcttgttaaagtaggggggttgtttgggaggcaggcaagtgatgtaaaaacagtatatggaaatccccaaaccccactgttaaaatgatgtcaggggtccaaatcatgtccatggagtgacctcagtgacatttcttctccaaatactctagctctttactgatttttttcctcttaacttagaaaggaggaaataaggtatatatttgttggtcagatgattttaatgaggttaagaaaaaactggcttccttcaacatgccatgcattttcatgcctctgtgcccgtgcttctgctgttctcaccactagaaatgctgttctccccactagaaatgctattctccctctacctgcctggtgaattcaacccctaaacctcaaattagaggccagcccttctttgcatcttccctccctgatgccacccttccttctaggctgccaccatccttcaaagttaacttggttgttgtgcttcacatactgaactgcctttgttttttgaggtctctttaccctaacagggtgaaagtttctcttgaggatctttgatgcccaagggcttagctcataaaaggcactcaataaatatttgttgagtgaaaacatctccttctcaccatatttgacaattttgaatttctcataaattttcatcaagttatagcagtatagtaaaagtccttatgaattgagtccttgattagttctgggaggttactgagcaccccgcctgtacttcaggggcgataggagtaatgggagtaagtgctaacccagcagcagggaggaagaatcaaggagtcatttggaatccagagagtcacatttctttttctttctttctttctttctttctttctttctttctttctttctttctttctttctttctttctttctttctttccttccttccttccttccttccttccttctttccttctttcttctccttccttttttttttttttttgacagaatcttgctctgtcacccaggctagaatgcagtggcacaattttggctcaccacagcctctgactcccaggttcaagagattcttgtgcctcagcctccccagtagctgagactacaggtgcccgccaccacgcccagctaatttttatacttttagtagagacagggtttccaccatgttggccaggctggtctcgaactccagcctcactcaggtgatccacccgcctcagcctcccaaagtgctgcgattataggcgtaagccactgtgcccaactaacatttcttagcctaatgtttgcatactccagctttatctcttggcagcccaaagtagattcctaggttcaaccagaagttccttgaaaattgtcagacttcatagaagtgtggagttgggagtcatggatctagtactgtacttccacttactggcaaaccccttgggacagagtattaagtttgacagacttgggttcaaatcctggctctgccacttagaccatctgtgggagcttgttacctctctgagcctcagtttcttccagatctagaaggagaataatatttattttgaaggattgttgtcacaactaacttataagtgtataaaatgcctaatctaggtttggcacttcatgggtgtttaataggtgggaattataatttggaagcaccggagtgggtgggatgatgatctgggcaatgtattattatttgtttactattaccagatccagatatatgcaggggaaagccagcttagaattcaaaaagccactttacatagctacttttgttaaatggatgtcaaataaatacataatgatatttgcagtgtgacttaataaaggccttcagggggttttccagctttcactgttaggattttttctgataatagtcccatactttcctactctgatgtgtcctcactcagaagcactgtctggctctccccaaagggagctcgggacagtttcctgcctgaggtgttcaggtgaattctgtgctcacttttcctttctctctccttgtctgtctctctgaccctgaggtcttatcttgtcctctgggaggtatgttaagtgctctgccaggctgcctgtgcctggcctgttttttctcactgccagtacctcttggattccaattccaaacatggtatccatctggggtcaccctttcttccggtgccaagagagaacacattccaaatggaacacaaatgtgcctcccatgctggctctcctcattctgcttgggaaaaacagagagcaggatgtggccgcatcatcccacgctgctggacttttcagtcctgtagtgctactttcccttgggactatttaggtttttctgctaagaaccaaatttgaagactcccaagaaacatggaaccaaggaagcttgccagagctctgcagggagagccagagccttgctgagacagcgggggtggtggggaggagagagggggggagagggggagagagagagagagagagaaagaggtttttaaattctccatgaagtgtactatgttccatcattccttcccaaagccaccggaagcattccttctaggaaaggtggagtcggtagtgagaagccggaggtgagaagacccctgagcggatggattcattcattttctgaatttcctatgtgaggacagtattagagcccagtgaggctttgagaggccccaaagatgagcgccaacagcagcagagtgggccagcttctcttgcagggttcagcgtgcattaggtggaagcaggatgtggaaggggctgtctaccacctagccaactgcctcttactcctgggcttcatggggggcagtggggtgtatggatgcttctatctttttggcttcctgagtgcaggttacctgtgctgcgtgctgtggggctggttcagtgcctgtggcctggacattgttctttggagcttcctgctggctgtggtctgcctgctccagctggcacacctggtataccgcctgcgtgaggacaccctccctgaggagtttgacctcctctacaagacgctgtgcctgcccttgcaggtgcccctacagacatacaaggagattgttcactgctgcgaggagcaggtcttaactctggccactgaacagacctatgctgtggagggtgagacacccatcaaccgcctgtccctgctgctctctggccggtaagctactctatccattgcccagaatttctttccccagcccacacttctcatttcctagtgtgtccctttccatttcatgtccctttccatttcgtgtccccttccattgagggaaggatgtgacaagtcaaacaaaccaaaatagatttttctaagagtggggttgcttcctctttcttggcattttccaagaagaaaccagttcatgaggcatcttggttggcaagaatgattgtatgtgcacttgctgctggaaggtgtgcagtgcgtgtgtcttgagcctgggccttaaataacccctctaccatcaccacacacatatcagtgtgtcatgcctaagctgcagcaatatctctgtaagctttgaaaaac

SEQ ID NO: 9596 - DNA, 6000 bp, Homo sapiens
gtctactttgggagcaaaagtcagacatttttactgcccacaactaaagatttgagtttcctaagctcactgttcctttcctgtaattcaacccagtgcatatgtggatatcatctggctttcttcacatcaccctgtgggacttggaactcagggaactggcataaaaatgctgatattctgctgctgctattgctataagtaataaattgtccttcatctgtgacctagctgcttggaggcttctaccaataatatggtttggctgtgtccccactgaaaatctcatcttgaattgtaatccctatgtgtcaagggtggaaccaggtggaggtaactggatcatgggggcagtttctcccatgctgttcttgtgatagtgagtgagtctcacatgatctgatggttttataagtggcatttcccctgttggcactcactccgtcctaccatcttgtaaagaaggtccctgcttctcatttgccttccaccatgattgtaagtctcctggagcctccctagcaatgcagaactgtgagtcaattaaacctctttcctttatattacccagtcttgggtatttctttatagcagcatgagaacagactaatacaaccaacattcataaaactgtggcaggcaatttgaataaaattgcagctataaagaacgatgtacagtacatatttacctgtggaaattggaaagcattttttcctttgcaggggcagatataaggacaaaaattaccttacttacttttgtaagttagtttatacaaagtagacatagtacattaggccaatgagaatttaagtcttgtaattcttatctctcaacatatggtgtcactccttctccaccaacaactactcacccttacttggtaaagctggcacacctgggattagttaggcctgaaaaatggctaaaaatacctttatcatagaaggattttagaaagtactttctcagttgttgcttctggcattaccagggctgtcatgcatccacaaaattgctgtttggtgccactggtagctaatgtccccattcaataacatacaataaacatattcactgtgctatgaaaaaatccactacagtcaccacttcaagtcttaatgcctgctaatttagcaattatagtaatagcaaagcattccaaaggtttaaaagagctccaattctggttaaaatcaaaattgatgagcaagagcttgatataaaaggtatgaatcaaactaatttcagagttgcctttgtaagacagatgggtgaattttatcttttattatttggtattcatcagccacctactgtcaatttaaactctaattacagctctctaaaattatttttcttgggggaagtgggctattaagatttttgttggggtagaatgggaaaggataaatttcttatgttatatactcctacctttcctttaataccgaaacaggccatcccacgagtataaaagcatttagactgggtaggagaagaaaaaatgatagagaaagaagaaaagcatagtgataacataaaaatcaaaagttgaccttacagcttactttatataaattattattattattattttgagacaaagtctcactctgttgcctaggctggagtgcagtgacgtgatctcggctcactgcaacctccgcctccctggttcaagggattctcctgcctcagcctcctgagtagttgggattaccggcgcctgccaccacgactggctaatttttgtatttttagtagaaacggggtttcaccatgttggtcaggctggtctcaaactcctgacctcaagtgatctgcccacctcagcctcccaaagtgcttgggattacaggcgtgagccagcacgctccaccttacttcatataaattaaaaggtagaaggaaaagtaacccacatatgtgggttagctgtaccattctgaagcaagaggatagtttagtagctagatataaatgactaaatatttcactttggaaaggccactggttgtttttttcaaagtcaggagaatatttcatcctgaagaagcagttgttgaaagagtgttaagggttacagcactcagtaaggaaaccaaaggttgtaaatgtctggaacacagcaggttaaagaagtgtggtgcagaaagggctgctactcaacttctttgcctgaggcctgcctatattagctaacctgaggaagtcacaggcagtgttatcacaaccagtaatctttcttccctgaagcaaggagggacagtgggccaaaaaatcttctcaattgcagaaaagctgtttgagtctttgggtctgttatctgtccctactgtttatctcaattctcttagctctctaaactctgttagatatttatcttccttttcttccttgttcatttcctatacataaaaatgcaatagcacaagtgaatacagatcaatgattagttttaaaataaaaaaattttgctttgcattaattaattaattttttttgagacagtctcactacatcacccaagttggagtgcagtggcacaatctcggctcactgaaattgccacccactgggttcaggtgattctcatgcctcatccccccaagtagctggaattacaggttaccactcctggctaatttttgtatttttagtagaaatgggttttcaccatgttggttgggctggtctcaaacttctgacctcagatgatctgcctgccttagcctcccaaagtgtgggattacaggtgtgagccactacaccaggccttgccttgcatttagataaattaagtaggatagtagacagagtacagggagaagatgatgagactcaggattgccactttcaagttacgcagccttgaacaaatgtacacctctgaacttcaatttttccccaactataaatgtagataataattttgactgccatgaagattaaatgatggttcacaacctcgacagccctacatatatggaagatattgcgactgaaggtgacattgtttcaactgaatacatattctaagtgaacacattagttttttaacttttaaaatttttaaaaatatgtagatttcaaatattttctcccaattctatcatttatttgttaactttgtctatagtattgtatgtaaaaccccaagcctttattttgctgtaatgaatttcttcaatttttttgacatgcaatttgtacttttgaaatgtaacataagttattcccccatccctcagtattaaaatattctcctccacaatttgctattaatttcatatttcaatctttccaatctaggtctttaatgcatctagagctcttccttttaatgtagtgtttaattttctccagatggttagcctattttcttttccccaataatttgttgaaccacattttattgtatattaaggttacaagtgatgttgatattgctcatccaggaagcactgtttgattagcaagattctaaacaatgtgagttagcacctagttgaaagaattgataataatggatgagggtgaatttagaacatgagggtaatatgttgtattattaaaaatatcaatccagaaggaaataaaaatcatccttattgaaagttttcagatgacaaaatggggatggtcttagtaacctgaaaaatacacatatagaaattactcttatacagcaccagttcacagacacgcctgtaaattccctgagttaaatatctataatatagaaacaaactttgattaggtgatgctgaaagtttaagtacctaaaaatacctatcaccctgcagctattgaacagtgcctccaagtcctgctttaaaaaatgattttattggccaggcgcggtggctcatgcctataacctagcacttttggaggctgatgtgggcggatcacctgaggtcagagttcgagaccagcctggccagcatggcgaaaccccgtctctactaaaaaatgcaaaaattactcgggcgtggtggtgcacacctgtaatcccagctactcaggaggctgaggcaggagaattgcttgaacccaggaggtggaggttgcagtcagccaagatcgtgccacttcactccagcctgggcgacagagcaagaccctatctccaaaaaataaaataaaataaaataaaaaagagtttattgcctgtttccaacaatactctgcaggaaaaaaatccaatgattatatccatttcattgcgaataagacgggcaccagtttatctatgtacctgaggaaatgctatggaaatggtatttttcaattttattcatcagtatattaacgaatatatgactgaataattcatactgaattcagatcagttggaggggggctataaatgcaaattagctgaggatttaatgtgcgtaggaggtgtatagggggttataggaccttttaaattcccccaatagttgtggactcggtggttctatgtcttgctattcatttttaaataggtcaatgaaagagaggaaaggcctgcagtgtgtggggatcaggaagaaggcggataaaagaaaagggggaaactagtctgttattcaagggaactggctttcacttatggtttctcctgtttggcttgaacaaatcatttcaccatcttgggcttccgtttcgatattgggtggggaggagcgggtgttacgagatctctcagttgtcttgctgctttctttcttcgtgagccctccccaagttgatttaacaaatactctatgacctagagtcctagagtgtaaataccacagtccaggtgagcgttcagcgggcctccttgcgcatgcgctgaagggggcaccctctcgttaaggcccgaattttgcctcttctgcgcacgcgctccttttaaattccccacctgtcagagagaagcaggacttcctgtactttttagagcgactgccggaagtgactgcggacgaatcggcgtttgccgaggctggcatagatttggctgtctccgctcatagctgcttttggcgcgaaagatgccgggtctggttgactcaaaccctgccccgcctgagtctcaggagaagaagccgctgaagccctgctgcgcttgcccggagaccaagaaggcgcgcgatgcgtggtcagtgcgcagccggagagggcgcggccgacgagccccgggccgcggcctgtgccttccggtgcctctgccctacggcctctgccctctgccttctgccctctgccctctgccttctgccctctgccctcttccttccccccttcccccactcctcctccctgtctgccccccccccccgccccgccccgccccgccccattgcggcgctctggagataattattgggccttgtaggtttcgtggtcgggtctctgttgacttatcccgtagcttagtaccgggaaacgatggagagagaggagaacggcaagcttcaaccactcattccttcctacaaatgtgtgttgagtatctgttatgggttaagcactgcgttaggtccgaagatgtagacatggataaagatgcatcttgatataaaggagcttaaagttaatggagacataaaccagtgacttgtatacgacgtggtaagggctatgatagatttgttaagaccaaacaggaaaggttttctggtaatttctaaggctttctcccaaaatttagagacagtaggacacagagtgtattccttacagttctgaagagttacgcttcaacccttttaagacaaccaaaagttgaaaatcaatcagtctacgacgcaggggacaaagtattaagaatagttcatctagattgtcaatccacaaaagatttgttctcattttatatagcctctcttgtggagcaaatctcattagaggacgtcctcagataacgtgaatgtgcatctcttcctctggccccttttgtcttcccagatagtagatataagaaagaaatcattagtggtataatgggataataagagt

SEQ ID NO: 9597 - DNA, 6000 bp, Homo sapiens
ttaatttttgtatttttttaagtagacacgggggtttcatcatgttggttaggctggtcttaaacttctgaccttgtgatctgcctgcctcggcctcctaaagtgctgggattacaggcatgagctatcgtgcccggctgcatttttttgtgtgcttatttgccatctgtgtatcttctttggtgaggtgtctgttcagatcttttgcccacttgtgaatttttttaattaaaatttttgcattataagagttccttgtgtattttaggtaacagtcctttatcaaataggtattctacaaatattttctcccagtctgtgccttgtttttttaatcttcttaacggtgccttttgcagagcagaagtttttcattttaatcaagtccaacttattgtgttctcccccccgcattggctcatgcttttggtgttgtatctgaaaagtcatcaccaaactcaaagtcacctagagtctcaaattatcctatagatgttttatatttttacattttatatttacatcttaagatccactttgagttaatttgtataaaaggtataaggtgtgtgtcattttttgcatgtggatttccagttgttctagcaccatgtattgaaaagactcttttctccattgaattgcctttgctccattctcaaagatcagttgtctacatttatgtggatctattttggggctgtccattctgttccattggtctatttgtctattctttagccaataccatgctgtcttgtttactgtagctgtgtagtaagtcttgaagttgggtaacgtcagtcctccaactttgttcttcttgaatagtctgtggattattctgggtcttttactttttcatataaaattcagaattaatttgttgatatccacaaaataatgtgctaagattttgattgagatcttattgaatctacagataaagttgggaagaattgacatcgtaacaatactgatgctttctgggaatatggaatatttctcaatttatttagattttaatttttttaatcagaggtttgctagtttccttcacatagagcctgtacatattttgttagatttatgcctaagtatttatttcgtcttttttttttgaggctaatgtaaatggtattgtgtttttaatttcaaattccaattgttctttgctgaggaaagcaattgaccttttaccctgtagcctcgttaaaattgcttattaattccaggaggtttttgtttattcttagatattttttacataaaaaatcatgccatctacaaagacagttttatttattacttgctagtatgaatatcttttatttccctttattgtcttacattaggcaggaggtttagtataatgtcacctaggagtagtgacaggggacatccttaccttgttcctgatcttagagggaaagcatccagtttctcaccattaagaatctgcaatatttttctatcaagttgagtaaatatccttcgattcctagttttctgagtttttttttttaatcatgaatgggtgttgatttttcttcttcccccaccttccctcttcttctttccccaccttctttcctcagcttcttttccctatccccaccttccctctcttcttcccccaccttccctcttcttcttcccctgccatccctcttcttctttcccctttccctaccatccctcttctttcccctttccccaccatccctctttttctttccccaccttccgtcttcctttcccctttctttcctctccttccttcttctttttcccccctcatctcccttcctctttccccaccatccctcttcttctttccccaccttccctcttcttgtgaaaatatttttcttcattggttgatgtgatcatgtgattgtatatttttgcatataattgatatgtctcaaagttatatttttcaagacaatttcttatttctccaagattttaagatttattcatatagaattctatgttggatattttatttaacaaatatttattgagtatatactatgctgaagatacgttaggtatggaagatacattaataaataaggctgcatgaaagttttggaataagtttgcatttggtatagaggaaggtaagatgatgatgaggaaagaactgaaaaaggggagagggaattgggcaacagtaaatcacagagaatgtgacatttcttgtctttcaacttttcctccctgtactttcaattagggaaatgatcactctctaagggacacctgaatgactccacacttctgtgatttctgcagtctctaactgctctggagcttagagtcatatccaaaccccttagcataaaatggcacaattttatgacctactctttgcctaaccattcagtcatatcacttatgtcaaattgcccaaatggtccatgcacatgctgctccatctacctccactattctgtaccctcttttttgctggggcaacccctaattatcttttattatcttgatcaccctctcagagcctaaattgcttccattaagttgcattctaaattatttccagtccttcagtgaacttagaaataatatgttttgctctttaacttctccacctcattttcttccttcacacccctagtgttcactataattctcaccatactgtgctcacccaataatagaaggtagagctataagaagacctactagacagaaaaaattctaatctcgtctcccataagaaactttcattctgttaaaactgaaaggtaaattctaaggtcgaatgtggaaataagtatgtagaaaggtaaattttgtgtaagggagtacaataggactctcagtgatggcttctattttctctaagatagaagcaagttcatctgctaggagtgtgaagtgtagacacggggttgggacttaaagaggatgttaaaggtttgaataattgtggcaaataggagaggaagctgaagacaagaaggatttgggagtgtgctgaagatggagttcagctggaaactgaatgtgcagtggtcaggacattgatgtcactgatgacattgtcctgatgtctcctgcagcattttgctccccaaaggtagaagtagagaccaatggttggactgatgcaggtttaggactttgctgggtggatacaatcagggatataagaatatgatgtattcattaagtactgcagcattcaaattctgtctctgcccctcaccatgtgaccttgtgcaaattatttaaccttctgaagtcttattgtctcacatttaagataaggataatcatatatactttattaatttaacagatattgagtgccctcctctatacttttctgggacctggagataaagctgagatcaaaattactaccttcctggagcttataatctaatgagaagagagataccagataaatgaaatatatagtactttagatggcaaaatgcttaggggaaaaagaagcaaagaagaagtatatagtgcatgcaggaaattgcaattttatttatgtttgtattgatacatatttgtacatatttatggggtgtggtagtttgatatatgcatacaatgtgtaatgatcaaatcagggtgtttaggatatctatcacctcaaacatttatcatttttgtgtttggaacatttctaatctcctagttattttgaaatatataacatattgttaactatagtcaccctactgtgctatcaaacacttgaacttattccttctatctacgtttgtacccattaaccaatctcttccctccctcccccaactccaccttcccagcctctggtacttatctctactccatgagatcaactttttaagctcccacatgagtgagaccatgggatatttgtctttctgtgccagacttatttcacttagaataatgacctccagttccgtaagatgggcagccaggaaaggccttacttagctgatgtttgaattgtgaagttatgtaatcattaagatgagtatacatacaatgggccagctgagtgcacagcaagattcaataaattcaaactaacattactcttattgccaagagagtgcctgaaatgacagctcattggaaactggctactttccttccctttccttaggggtttaaggaaagcatgagtgatttcagtcttttgctggagctcctcactgacactcattgcagagcctgagccctcaactctcaatctttgcttaggtcctggcttaggctccactttgtaagaggcaccttcctagtattcactactctctctctcacaatcatgtccttacagacattgctgatcctctttcatactgacaccgggttctagtccgagttccatcactaagtcgctgtttgactttgggcaagttacttctgtggttaattatttttcatcaacaaaatcaaaaggtgaaactagacgaacaactaagaggctccagtattttttcaatctaagagtcccatatcccccactcccttctcacagctcattcaacaatcctaatggcagcgggtgcccgcagtctcaagtctctgccgaagcccaagccgctgtctcggtcagtcacaaccgacgaagaggaggaattggaggaagccagcataaccacttcacactgagaacatctgacctttcccagaacgcccgcccactcgacacttcctgtccctccccagatcttgttccggggcacctactcgcgtctaatcactcccctcattcactctttagggtccattggctgtttctttgaggaagcggagcatcttctgtcgttgattggtttccgtcattgttgataggttggtaacaaacaaggtgtgcctggtctccctggtaacgtcctgccgatagtcctgattggtcggtgtcttaatcccatcttccgtcccaactgctagtggctgagtccctggcggggcgcggcggtggaaggtgtcgcgtacgggcttcccgagctgacgtggcttgaattgggaggggggcagctggagcctcaggcggcagcgcttctaggtgagtaggggacgctacccaactcttccctctgcgagtccaataacggtcacccccgccagaggggccgcgggagctgcccaagcagctacaccggagtcccctcctcgccccgcctctcccggattcagtcctggatccggcccttcacccgcctccttcacctaccaggcctagttctagtagcccacaagcctcggcctctccggtgggccttcggggtcaccctgcgcagacttggaccacttgctcacggtctgtcccctccccggtacgtttctcctctgggagcgacggggaaaagcgcctaggtcagtcctgtccgcacggccttgttcctggagcggcctgcctaagtcggcctccgtacgcagccgctgacgtcggaaagaacctgctgggcccctgtgctcaggccctaaacaaacttggtgtcccgaaggggaggcgcgaccaaaagaaatcaaaggtctttagggcggagatcacagaatcattggagatattaatgcaaacggaggcctgtccaataatcctgctaatgctaatgggttactggaaagatgagaagagaggaaagatcccaacgatcccgtcaacacgaaaatcccaggaatcagaggtgggcaggctgttagagaaaaaggaacctctaagagagttctcgaggaaaaataacttggtttgatggtgtggagtatgtttaatctgcacaaccggaatgtgaaagggagggtgagtcctttgaggaatgaggaatatatttgtctgacttatttaaagagctccagttggtctatggggagcggacagtttgagagtgggacagggatatttacaatcatgggtaagtactttcacttttggagatagttggaagctgtctgagcatttaaaggacctttttacagttctgtgcaagatgcaagcaagtggagggctct

SEQ ID NO: 9598 - DNA, 6000 bp, Homo sapiens
cctatgtggacatttggcaaaagagctttccaggcagagagagcatcaagtacaaaggccttgaggtgagagccttgggtgtgtgaggaatagcagagaggctggggaagcctgagagaagtgaggatagggagagcgctagcagataatgtcagacaggccttgtggggctgctaaggctttttctctagagagctggggagccatagaaggtttttgagcagaggagtgataggatctgaattaggacagcttccgtgtggagaacagactgtaggtacaaaggttagaaatggcagagcaaacatccaggggagagaagagagtggtttgaactagggcacaagtagaagaggtggggagaaatggtaagattctgaaaatatttcaaagatagagacgacaggatttatggatggtctgaatggagggtatgaaatgacttcaagcttttgaccttgaggaactggaagaatggagtttttacttactaggatggggaagactgagggaggagctggcttggaaaaacaaatcagaagttaagtgttgggtatgttaagatagagatgtctcttagatggtcatgcagaggaggggcaggcagttggttctatacatccagattttaagagagagcgagagggccggagctgcagatacaaacttgggcatcatccgcacagagaggtttacagccagtgactggacaagcttatctaggtcttcagtgtagctgtctccctcacatggctgtgaaggtcaaaggggatagtatatggcaaatagttttgtaaactgtaaagtgctatacacaaggaaaggaacaagtgtgcaaatacggtaaagagcataatgtagagcaggatttaaagaagtatcttcaggtagagacagaatcatagaatacatgtgcaaggagaagcttacaaaccagtggatcaacccctttcattttatccaggaggagctaaggttggagagattaagaggcttgtccaaggacactcagctcatcagtggcccagctcatcctaggactggggagccctaactgctggtgcggtgctctttccaccacatgaaacacctgctcacatttactgcttcagctctctctgaatctgttaaccaggggcaagtaattcttcaaacagaaatctaattatatcgccttgtgcttttatacatgctacttcctctgcctggaatactctgcctcctcctgcttctctgtctggcaaattcctgccttatcttccattctcagctagaatggccatttccaatgaagacttctttgtcctgtttggtaggatggtaactggctctccatgtgcccgcagagctcccatcctgtggcagtccttgcatttgctatgattacgtctgcctcccctgcctgcctgtgaagctcttcctatgacctctctgcctagcttagtgagtgacacttaaatgggaaggaaggaaggaaggaaggaagatctcttctttcacattagttcaggacaatggcaaagcagtcattcagtgacacttcagttcctctgacctgagcaaggttttggttcacaaattgacaatgacttctggggtgggaattttcttttttctttgccatccccaggcacaatgagcaggcaattctgggagcagaaaacaatttggacattatacgtgctgtctttttattttcaattctctgtctcctattagtatatgactggctgtttgccttttgctgcaagacaaggtttgtgtttgtgcctgggctatgcacaagcatgtgtacacacacacacacacatagaggggagagagagagagagagagagagagagagagagagagagagagagagagagagagatggcctcttgggagagcctgcactcattttttagctttatctcccagaaaatgccctcaggtgggaggaagaagacagtgttgtgctcctagcttttccaccctttcctgctcttgagcatgagaatttggatctatttcttaaactctttcaaccttagttcaagataagtttggaatttctaggtcaagagtgaatcctaaaaactccgtcaccccctatattcaccgctctttagcttgtttgcttgagataacactgtgttaattactatatttccattctgcttaattacaatgtttcggtagaagaagaattgctcctaacagaagcaattatcttataggttattgcaaaggtctaaggaaggtggcagaagctggttgtgatactgtggtgatggaatcaatgctccaggttttgttccaagtaaatgattcagagattctaaccaggctgggtttgccaaagagcaggtggtaagccaggccagtaaagaaactgtctcttccggagggttgggcttctgaagctctcttgtattgagagctcttgagtaatcactgttaatcaatacaatgctttaggatgcaattaggattaattagcccaatgttgctagctgccctgctacttggtctgtctctttgggtgcctccttgtcctggctcctgcttcccctgaaaaggaaaatttccctctttgtgtccccagcctggagtctcctctcttcccttcctgtgccaagcccccaaaccccctctccactttataacatggagagggagagccaggaaaggccttgacatgatagtgggaagaaaagaatgaacacaatcaaaacatggtagcaaacaagagggcaggtgagagaatgtgtgaagggtggagaatattttggttatctttcaagggagagctgtggctgacagagccactcagaaggcattttgtctattctcccaaccagacaaattggaagctctcctgttcattccctggtcctgcagtatggaatagcttcgtggttttttgtgttaattaaaaggtatctctatattgcacatacttctattttttgtgatgacaaaaacattccccatggctctgcagggaatgggggttggggggggggcacgctcattgcagtggaaaggttccacggtggagatcaggagacctatccctatctcagcctgggactctgggagaatggtccagagctcattgtccttgttgataaaatgatagatttggactcaatatcccatgctgcctcttccaacttgatttttaccccagactgggctaccagactggtatgcccacacatgcccgtttcctttcttttcttctctgcatctctgcctttgtgtccagagcgtgttttccctttgcaagtttctctccattctgcacattatgagtttcagcatttctgttgccctagaaagtctatctttgagatcttgcactgtttctctttttacagtgtctcataaactcccttcttggattcagaaccaccctttctttcccattatcctgtcaaactgcttcttgccatggtccaggggtaggaggatggcaggcaggaggtgcttctctggggctcttagtgtctcaattcttctgctttatctgggttttcctttacccagaattttattatgtaaaatgcttcactcagactttgttctaattatccaatttttggcatactctagaaagtcttttgatattttccttcctccaacttatctatttttatttcatagttctctttggttatctcttagaatcacactttcctggttttaatttttcaaatcctttgtctttctcactcgttcttaggtcacctttttttacattttcaaatatattttttgttcagcagagggctcccttcccatccctcttgcagcccgggcagctaggatttgaagcttgccccttgaatctttctctcccgccttctagccatcagaaacactagatcacttaaacttgtaaacaattcggcctcgctccttgtgattgcgctaaaccttccgtcctcagctgagaacgctccaccacctccccggatcgctcatctcttggctgccctcccactgttcctgatgttattttactccccgtatcccctactcgttcttcacaattctgtagggtgcgtattactaaccccagtttacagctgaggaaactgaggcttggagaggttcgctcggtatcgtacagtttgcaaggttaaccctaatccggccagttctggctttccagcccagcccagcagcctagcctccctctctgccgctgcaggttataacggctctcccccgttttacacgaggtcccttccccttcaaatccacaggcaggaagatcgttccgaactgacggggctggggaatgtgggagtccggagtggggtttgggggagcttcctcaggccctgagtgttggggtgggcaggccgcgccgatggccctcggggatgtcacattcgagatggggtgaccgagaacggcaaggcgggatgtggcaaacggcggcaagtgctcggagtcctaggtcttgccgccggaatgccggccggggaaggggcttcggcccaccgggctggtcaccacactcggcaggcccggggcgggagtcggccgagcagccgcgggatgcagggcgccccctcgcgctcctccgcgcgcctcgaggctggcgggtgcagcgcccgccgcggcaggtctgctccagccccctcctctttttcgctcccgctcccctccttctctccctttgcttgcaactcctcccccaccgccccctccctccttctgctcccgcggtctcctcctccctgctctctccgagcgccgggtcgggagctagttggagcgcgggggttggtgccagagcccagctccgccgagccgggcgggtcggcagcgcatccagcggctgctgggagcccgagcgcagcgggcgcgggcccgggtggggactgcaccggagcgctgagagctggaggccgttcctgcgcggccgccccattcccagaccggccgccagcccatctggttagctcccgccgctccgcgccgcccgggagtcgggagccgcggggaaccgggcacctgcacccgcctctgggaggtgagtcccgggagccccgggcgcttcccctgcgcgggttggggctgcaacttgcaaacttcagcaactcgggtgggtatcggggtagagaggtaggggtccgggctctggcaagttgaagccaggtaggtgaggctgcgggcgggaggacagggggtcccctggcttccgcgcctcccgctgccacctcggcttgagagccctcatcgctgctgcgttcccgccgccagccagcttgggtccgggttgcactgggccctgccagggctgtggtcggcgcatctgggctgcagcggcgatggggacccgggacccaggcctggagaaggagacggacgagtgaggctgagggacggagggacagaggtgcggagatggaggctcagagagggccggctagtaaacagcactgagggagagtgcgggcggcgaggcgcgtgggaacgcgtggcccgcccagagtgtgaaatctcccgctcagggacgtccctgctccaccgccgccgcctgcggagccgccgcccggattcttcccagacccgcctccaggacactcttgccctgaccaggcctgcggagcgtgaactctgcccaccaggctccaggggcagtggctcagggccccgcactcccggctgggagggtggagaggggtgcggcagctggaagcagggacgcgagcggcgatttcccgatttatgtttctcatggtaatttgtctttgtggttggggctgcccattcactttccgctcacgtcctgcgggagatccagcgaggagggagggagcggggggcgctcgggcacagagagggatgcagacgggagaggggatcggggacccgcgcggggcgggagccaagagggaagtggtcgccggaccggcggaggaagaaggcgaggctcgagaaaacccggcccaacggagccgactcctttgcccaccgcaaactttaaacaaggaggag

SEQ ID NO: 9599 - DNA, 6000 bp, Homo sapiens
gtgagtcccaaggagcatcgatggggagctctccagtagccagagggaagcttggaactgggaagggaggcaagggctgaagatacagatttcaaaaatatcttagagaaaaaaacatgcttatccttgggcccagcaattctatttgtaggaatttttcctaaggatatgtgtaaatttttattcatttatttatttttgagacagcattctctctatgttgcctaggctggcctcgaactcctgggctcaagagatcatctcacctcagcctcctgagtagctgagattaccaatgtgagccactgtgcccagcttgtgtgaaaatttatctacagaaatgctcactgtttataatagtaaaggaggggaaacttttatttataaactgctatgacagtgaaaaatgcctaacagtaggggattggttaaataaagtatactatacccatgcaatttggacagtaaaatggatattgtagatggatgcttattgacatgaaaaaaaatccacaatattttgctaagtagaaaatggtagactctaaaactaattgtagagtaaaagatccagttattgtttaagaaaaaaattaacatattaatactggttttttttttttgagatggagtcttgctctttcacccaggctggagtgcaatggtgcagtctcggctcactgcaacctccacctcccgggttcaagtgattctcctgcctcagcctcccgagtagctgggattacaggtgcccatgaccacgcctgcctaatttttgtatttttagtagagatggggtttcaccatgttggccaggctggtctcgaactcctgatctcatgatccgccctcctcagcctcccaaagtactgggattataggcgtgagccaccgcgcccggccaatactggttctttggtgatatgattatgagtgtgttttctttctttttaatttttttcccacatcaatcatacatggcttttgttgtaagacaattatttttaaaaattgaataaaattaagaggaatgacttagggatagctctgggaatgagaagatgagaggatcaaggatggaaccttgatcaatagccttgatacctctggccctgtggcccctgtccgtgcagttgactatgtcttgagggtgccacccatgtcatatctgctacattgctgcatggtagaatacaacgagcagactgctacaactatgagctttgggcaaactcatatatatatatatatatatatataaataattttattttattttttttgagacagagtattgctgtgttgccaggctggagtgcagtggtgcaaccttggctcactgcaacttccaccttctgggttcaagcaattctcctgcctcagcctcccaagtagctgggactacaggcacacaccaccacgcctagctaatttttgtatttttagtagagacagggtttcaccacgttggccaggatggtttcgatctcttgacctcgtgatccgcctgccttggcctcccaaagtgctaggattagagtcgtgagccaccatgcccggcctttttattttttattttttttttgagacagagtctcattctgtcaaccaggctggagtgcaatggcatgatctcggctcactgcaacctccacctcccggattcaagtgattctcctgcctcagcctccagagtaggattacaggctcacaccgccacgcccggctaatttttgtatttttagtagagacgggtttcaccatgttggccaggctggtcatgagcgccagacctcagatgatctgcctgcctcagcctcccaaagtgctggggttacaggcatgagccaccatgcctggctggacaaactttttgattccctaagtctgttttctcatctttatagtggggataaccttcctcagaatagttatctgacaataaaatgtttacagacatacaacagttgcttagtaaatattaattagtccatcctccctttcttagacatccttccctgctagacccaggtttgacttccaggcccttgtttggccctcacagtgggaagtgacaccccctctctctgaatgcccgaggtgctgtttgcacttctattgaacccagaactttgctctgacctagagatagtggctagctcttctccgtcactgacttgttcgacttgttcccggtctagagtttggtcatctctctatcctggtagcaactagcacaatgctttgtacattgagggttctctagaatttttattgactaaattcatgtttttttttacaacttggctaatagtggaatactcaaaggctggattacccaagggttagtttattctgacctcttggaatttttctcctcccaatttgtaactctggcaaggtttatcttccagtctgcagagatgaccagcagagagagacaaagaaggaagctcacttagacctctaggctccctgtcagaagctctggggagagagttggaggatgaagaaggggaaagtaaaagctgtttacccccaggctgggtaggagtgtggtctcccacctctccagggtttagactgtcagaactccagcaggacagcttgggggcaaagggaattgggtagacacatcattctacaggcctacgtcctttttgcctagcagtcgaatccttctctccattcctgcctcttgtggctggtgctgtgtatctagccattttccccttcccctgcttccccccaagtgggcacgccagcttgctcaggtgcccatccttcctgctaacaccttgttaggttagggaggcagtctggcgctgacgaaggacctttgggtgccaagttagtagacctgtgtgacctatagcaagttgaataagctcccagagcctcagtttctgcatctataagctgggaatagctacacggtctctgtcctctgtctcatcctaggattactgacgggaaccaagtgagatttatgagactttacgaacaggcaaagagcgctttataaaagccaggtgtttccagtgttcactgtggggctttctcctggtaactacccaccaaagcctccctgtccgccccgccccggctgcatcggcctcacccactgcatcaccatcttttccatcactgtcttcctgcgtctcagaagtcctgtttctgcatctcccctgtccatttccgggtctggctctccggcccctgagacccctccagggactctgttctccttctccttgaggcactcgctgcccaggcgccccccacccggtgcgccctcctttggcacagccgccgggccagagaatcgcccaataagagcgccggactgtagtctgacagctccggaagcggccaatcgagccgggccagggaaggggggcgcagcgccggggctgaagttgggttaaatggggggagggggattaaagggggatacaaaagaggggagctaggactgggggcgctggagccctggccgggggcgggggaagaccgcgctccacccaggtctggtgacgggaccgcaggctggatgcggctcctagtcccagggagggaggggcgcagcgagaattttaggtgaggaaggggaactggggtgcccgcggccaggcctgaggatgcccgcggggcgccgaggctggggccatggccaggccgggggcggaggcggcctcgcgcggctgtgagccgaggcccgggcggcgcggggggcggggaggcagcgggaggaggggatgcggagggctctccggcggcggcgagcgggcgagaagggaggagcggcgcgagcggccggagcggcgcagggcccgaagcgtgcatggcgcgccctgagccgggctcccgcgggcccccccggagcgcctctcgggcgccgcggctctcaggcgggcccctctgggccggctgcttctgagccccggcgctggatctctggatgccttactccccgggagaagcctgcctgcgtcggggcagaaccgcggcagcgctgcgccggattccgtcctccgcctagtcgttccgcgccggccgcggtgggcccgcagccggcgacgaggagcttggggcttgcgaagcgggcgcgacagctctccgggccggcaggtcccggccggccccgctccgtttgcgggaaagggagaggcgagaggggaagggccgcaccgcaggagccggtccctgacccggaccccgccccctgcgcggacgcgccgaaggctcggctcggctttcgccggggccacgcatccactctcgccgcgagaggtgggggatgcgggcaacggcccccccgggctccaggaccctcccccccggggctccggagctgttgctccgcccgtcgccccctcccccgtcctctccacctcccatcccacctccccacccctcgtaagaaaataatgctggctggcgcccgcacctcccagtcgctcccagtccgctgcgaggaaagcgcacccgcagtgtctcttcgccgggacccccgccgagccgccctcgccgccgccgagccccgagagcagctgggctccgcttaggcggaatcagcgagcgccgcgcccgggcactgccggcccgaggaggcaccgcccgcaaggacaccactccgtcccgtctcgtccgcaactccggccctcgtcgagctcgacgcgagccaggatcccggacgtctctccgcgtgcggcgcagcagcagccagaccagtccctgcgaccccacctcggaggcaactccatttcggacctgggacttctgacgcggatcctcagctacttctcacctcggggctgtgccctcctcctccgctcaggacgggggtgccaagatgccccgctgcagcgcagggccccgggccgcccccgacgtgtgaccctagcctggtccccctgctcggccgtccgccctccccttggagacccccggcccggcttccgggggaggaggaaggagacgacgaggccgagggggggatgtccggctccaaaagcgtgagccccccgggctacgcggcgcagaagactgcggcgccggcgccccggggaggccccgaacaccgctctgcgtggggcgaggccgattcccgcgcgaatggctacccccatgcccccgggggctctgcccgcggctccaccaagaaacccgggggggcggtgaccccgcagcagcagcagcgcctggccagccgctggcgcagcgacgacgacgacgatcctccgctgagcggtgacgaccccctggccgggggcttcggcttcagcttccgctccaagtccgcctggcaggagcgcggcggcgacgactgcggtcgcggcagccgccggcagcggcggggcgcggccagcgggggcagcacccgggcgccccctgcgggcggcggcggcggctcggcggcggcggctgcctcggcgggcgggacggaggtgcgccctcgctcggtggaggtgggtctggaggagcggcggggcaaggggcgcgcggccgacgagctggaggccggcgccgtcgagggcggcgaggggtccggggatggcggcagctcggcggactcgggctcgggcgcggggcccggcgcggtgctgtccctgggcgcctgctgcctggcgttgctgcagatattccgctccaagaagttcccgtcggacaaactggagcggctgtaccagcgctacttcttccgcctgaaccagagcagcctcaccatgctcatggccgtgctggtgctcgtgtgcctggtcatgttggccttccacgcggcgcggcccccgctccagctgccctacctggccgtgctggcggccgccgtcggcgtgatcctcatcatggctgtgctttgcaaccgcgccgccttccaccaggaccacatgggcctggcctgctatgcgctcatcgccgtggtgctggccgtccaggtggtgggcctgctgctgccgcagccacgcagcgcctctgagggcatctggtggaccgtgt

SEQ ID NO: 9600 - DNA, 6000 bp, Homo sapiens
catcatcgctgtaagtctgggtgagacctatgaatatgaggagatttcattcctgtgattaatattctgtggcaaaagagaactttcagatgtaattaaggtccctaatcagttgactttgagttagtcaaaagggaggttatcctgggtggatctgacctaatccagtaagccttaaaaaacagacaaaagaaacaacaacaggtgcctctgctggcctggaagaaagcaaacatcagtgtcgtaaactgccattccagggccatggaactacgacgtgaaagtggcttctatgagttgagaacaatccctgaccaaaatccagcaagaaaatagggacttcagtcctacatccccaaggaactgaattttgtcaacaaccaatgaatatggaagaggaccctaaggctcatatgagagcacagccctagccaacacttggattttagctgggcaagacccttagcggaggacccagctaacccactcagactcctgccctgtggaaactgagatcagaaatctgtgttgttttaagctgctaagtatgtggtaatttgcaatgcagcaaaagaaaacaaatgtatatgtgaaaggagtttatgtacacagggttgactggctccacggggagtctaacaaccacaccccacagctaaatcacagaattgtgctgaacctgagtatggtgtacccatcatcactgctcagccccagcctcaccatgatccaagcagcaggtgggacagggtcactctcgtttcctcctatgaaatggcacatttaagatctggggaaagtgacccacaatataagccacataggatagggagaactgactctctgagctcagagatagtatgagacagttgatatttattataaggctgagatggtaagaagaccgtcaggattcccactctctggtgccagacctatggttacttggccagatagaactttagtccctaagatactgaacatgcaaagctgaatggacactaaagtatcatttttcagaaggccctcttaaggaaggaaggggaaacaaggtggaaggagagaaaaaaaaggagaatttaattcagtaaacaaatatttatggtacccattatgtgcacagttctgttcgaggctctcgaaatacagcggtgactaaaacaaacagaatcgcatgcactccagtgaaaaaatatagagaaatcaataaaacaaaaatttaaaaatacatagtatgtaatgattataaagcaagggaggagttggaagggatattggtgttcaacttaaaagagtcagataagactcccttagaaggtcacatttggatacaaaaccgaaggtgctaaggaatgaaccctgtggatacctgaggaaatcatgttccaggcagatgaaatgcaagtgcacaagtcttgaggcaggagagggtctggcctttctgagggataataagatggccagcatggctggagggaagtgatgaaggagaaaagagaaaatgatgggttcagagagtttaagggcctgtgggttattttgacttttacttgcataaggtgggagccactgagggttctaaacagaggaatgacatgatcagtcttaggttttcagtaattcgatcctgcagctgtgatgagaacagacccctggaagggaagggcggaaacagggagacaggttaggaagccattgtagtggtccgggtaagagatgaagtttgcttggaccaaggtgatggaagtggagagaagtgctccaattctgaatgacttttggagatacagccaatagcatttgctctgattggatttaaggtgtgagagaaaaagcagccaaggataatgccaaggtttttagcctctatgaggaagcctggaggaactggtttggagaggaatcttagagtgcagttggggtgtattaagcctgagaagcctaatagacatccagtggtgcagagtaaacagttggatgttctaatgtggtatttagggaaggattagggctgaagacataaatgtagtatccaaaacatgaaactggatgagataaaaaagagagtgcatgtagatagagaagtccaagtgtaaatcctagggcactccaagattaaagtgccagggagaggaggaagaacaagcaaaagagactgagaaagaacagccaatgaggaaggagaaaaaccaagagtctaatgtcctggaatccaaggaaagaaaatgtttcaagcatgtgaaagtgatcaacagggtcaaaggctgctgataggttgagccgaggctgagagatgattttggatttaacagcatgtcattggggactttaacacaagtcatttcagtagagtggtggggatgaaagcctggttcaagtatattaaaaagagatttggaagagggaaattagaggtggcaggtataggcaactcttttaaagagcttggcaataaagggaagcagagaaaatggtcaaagctgaagaggaaaatgatgaaggcatgtttttatgttgatgggaattatctagtagaaaaagggaaatgatgagaaaggatatagtcaatattcgttcgtacaagaaaatagcagaaaacagtgtaacctacttgataaaagattgtatgtaataaaagattttattgtaatatttaagacagattttttactgaaacataataaacacccatgaacccatcacccaccccaaaactagaccactaccagtaacatctatgtgctcctccctctctactcttacctctgttttagaagaaagcaactttcctgaattatgttattatcattttcctgtaaaattgtattctcttgactgtatcctgttatatttattgactaacagatcaaggataatctaacctaggcctctcaacctggcctcctacagacagacatcaaatcgcctcagtcagacagtcccatgaaattcctcccttgtgtttaacttgctacactaaaattctattctgtttcatctcccatctctagctgctagtgctttgtctgaaaaaccccttcttctgcacaaagatcattattattcactcctgtcagcattatttactctgcatgaaagcaggaagagattggcacacctttatcccatgtgcatacaacagaacagaccccagtggccagagcattcttgttatcctggaagatgcacctgcagccctcaagcctccagcctccccctcccaacctaaggcacaccctgtttgtcaagtgcctataccaacacctggcagcccctccacagaggcctcagaaaggcaggtgatagctagtgactaggtttctttcatccccagatcttgccctgtgggcagtggccatccccagaccatccaggattctccaggtgtgcaaggacctacaggattttgacaaatgccagcagagtggcctctttacaaatggatgacaacaggctgtgaaaagctttctgcatgcgtaacccaaaaatctagttcccccacttgttcactgatgcttaaaattgctttagggagagacaaaggctttcatctcacaaacagagaaagctttgaagggcctgggtgaactaatctatttagactaatacacactgttgtataaatggaatgaaggattagatgatgcaatgggcccctttaaaataggtgtgaagtgacacgggatgtagcagagaaagatggggcttttcttgcctccttgggtgcttaaaacgaacagtcttgagaccaggtgcggtagctcaaacctgtaatcccaatactttgggagaccaaggcaggtggatcacttgagcccagggattcaagaccagcctgggcaacatggcaaaaccccgtttataaaaatataaaaattagcctgtcatcgtggcaagcacctgcagtctcagctacttgggaggctgaggtgggaggattgcttagacctaggagattgaggctgcagtgagtcatgattaccccattgcactccagcctgggcaacagagcaagaccctgtctcaaaacacacacacacacacacacacacacacacacacacacacacacacacacacagtcttgaaaccggaagacctggagtaaagttgggccctgagccctactgccagctgttcgatcacaggcaaaattactcgaagccttgagcctgttttttatttccaaagcgaaggtaatacctaccttcagagtttactgtgaaactttgatgtcatcatgtttgtaaaagtgccctggcacagtgaccacattctaccctataaatattttctatctttccctgttgtccccaggcatctcaggctctgttcctatccactccatgcccctttcttagcattataaggtcaagagtgaggaatctgggaccacgcaacccagattcagatcctgactctgtcacttgctgactgtcatcttggacaagtttaacctctctgtgctcagttccctcatctgtaaaaatggggataacaatagtacttgcctcatggggtgacagtaaggatgaaatgagttcatgtgtgtaatgcacttagaacaattcctggcaccaaaaactcattgtaagaagtgttgttactatgattcctgaggaattctcacctgtccactttccacaagccgaaagatcaagctccacttctgccctctcacctacaaaagcgcaccgtcaatggctacacattccgccccacccccaacgcccccagcccgggtttcctaacgtccccagcccagtccttaaccctccaggccgtctggtccttccaccaccagcaaagcccaaaacagctttcagcgtcccctagcagcgccctagcgggaccctgggaacccgccgctgcaggagaggcggggcggctctgtgacgtcgcgcccggcgctacccctggtgacctggcagcggagcccgcgcagggtttgccaggcgaaggcggagcgctaacgtctaacgctaacggcggtcgtgccccgccgctgctgtcacccccggccgctgctgccctccccgccgaggttctactgctctccttcttaagaagggtgggaggcactcggtctctccccacacctctcgcctgaggccaggcgccaggtgtcgcctgaagccagacagccggtttgggagcgagcctgaggtagccaccccgaggggaagtggagggagggcagggctctgagcgccccgagggctgcgctggtctgagggaggagccctgccggacgccccctggattctgagcctctccttgttcacagggcaaggggaaggcaaggggatcttcaagagaatgtgactgtgggggattatggctttctggccaatttgtgtgcgtattttgtacccagaatactattatacggtttcttacccggaggacagtggttgggaggctcaagagtttggaatcagagccctccaccgaggagccacacctctgctttttcatcagcgacagggatataaaaatacctctgggtgaattgtcatgtggatgtcatgggcatacctagcacttcatagactcctatcacacattattttatacctagcacttcatagactcctgtcaggcattattttatacctggcacttcatagactcctatcacatattattttatacctagcacttcatagactcctatcacgcattattttatacctagcacttcatagactcctatcacgtgttcattttatagctagcacttcatagactgctatcacgcattcatttttactagtacctattgaacactaagttccaggcactgggctaggcactgggatggtgtggtgagcaaaaactgaccagtcctgccgtggagtttgctgggggagacacatgttactcaaagaatcacactaaggataggtaagtgatgctctggaagggtatgtacaatggaactgacagggtaatcagggaaggttaagcagacctccaaaggaagaatcaacctgttaa

SEQ ID NO: 9601 - DNA, 6000 bp, Homo sapiens
ttttcattctatgtactttatacatagtatgtggaatcatacaatattttgtccttttctatatggcctatttcacttagcatgttttcaagattcacccatgctgtaatataacagaatttctttccctctcttcctcactccctccctcttttccttctttttcattttttatttttatttttatttttttttgagacagggcctcactgtcccccaagctggagtgcagtggtgcaatcatggctcatggcagcctcaacttccccaggctcaggtgatccacctcagcctcccaagtagctgggactacaggcatgccaccacacccagctaatttttgtatttttttgtagagatggggtttcaccatgttgcccaggctggtctcaaaccctgagctcaagcaatcctcctgcctcggtcatcccaaagtgttgggattacaggcatgagccacttctcccagctgcatgtcagaatgtcagaatttcatttccttttttttttttttttttgaggcagttatgcactctgtcgcatagctcactttaacctccagctacagggctccaacttgagggctcaaatgattctgtctcctcagtctccctatgttgctcaggccggtcttgaactcctggcctccagcaatcgtcccatcccagcctcccaaagttctgggatcataggcatgagccattgcaaaggccttcatttcttttaaaggctgataatagtccactataagtacctactacatcctgtcttctgttcatctgttgatggacacttgggtagtttccaccttttagctattgtgaataatgctgctatgaaccttggtgtacaggtatctgtttgagtccctgctttcaattttttggaggatatacccagaactagagttgttgggtcatatggtaagtctatatttaattcttgaactcatcatagtttaaaactaacaataagaaacataaaatttctcttggttatccatgctcaaaccccgtcgtcaaactgatccaaaaccagcagcctcctttgggtccagaagcttagcagtgatcagacatggaatgttccagaagtagccacaaaggaaactgttccagtggctggggggggagttttgcctcgaggtgagcaatcagtgcatactgaatttaatgagtagatgaaagtcaaagcatttgaagggcatctccactctccagcttaataaaaaaaaggaagaagaagaagggacaagaaaaaaggcataaaccacaaagcaaaagctcagagcaaaggcatctctaaaccagttttaagatattggagcctggatcactcaggatttagagcttatggcaggtctgggcaagttaggggctcaggaaaccaccaggtgataataggaggggggctagtaagaagggaaccaggggcaggtttgatcgcagaactttccaagtgcagtttaggtaagtgacggactgtgttggatctgagtctgagacagatcaaactgatatttcaacagtttgtaaagcactggagttggaagaaggaaggtgacacgcagaagatccgctccacagggcctaggcttaaagaatgctagataaggccgggcgcggtggctcatgcccccagcactttgggaggccgaggcgggcggatcatgaggtcaggagatccagaccgtcctggctaacatggtgaaaccccgcctctactaaaaataaaaaaaaaatcagccaggtgtggtggcacacgcctgtagtcccagctacttgggagggtgagacaggagaattgcttgaacctgggaggcagaggttgcagtgagctgagattgtgccactgcactccagcttgggcgacagagcgagactccgtctccaaaaaaaaaaaaaaaaaaaagctagataagtactaatttttattgtagttattaaggcagtatttacccagtttccaggactccacgccccgtccatctaatccatcctacactcccctgacagacaaatcttttaaaatcaccacttggcacgcaacatctcatagctcaagctctttcagggcattgattgattgattgattgagacagagtctcgctttgtcgcccaggctggagtggagtgcagtggcgctatcttggctcactgcaacctctacctcctggattcaagcgattctcaggcctcagcctccagagtagctgggattacaggcacccaccaccatgcccagctaatttttgtatttttaagagacagggtttcgccatgtttagccaggctcatctcgaactttggcctcaagctatccacccgactgggtctcccaaagtgctggaattacagacatgagccaacgcgctggccccattatttataatcactgcctctcaaactggcataagagtagctccaaggccactgacctaagagacaggtagctccaagataaacccaggacagctcctgtaaaatgtttagggacaagcgttttacatcaaaacaaacatgaggatattatagaatatgttaaccccaaatatctgagaccagtctcagtcaatttagaaagtttattttgccaaggttaaggatgtgccagtgacgggaagtcctgacaatatgtacccaaggtggtcggggttacagtgtgcttttatacgttttagggagacatgagacatcaatcaatatgtgtaagacgtacattggtttggttttgtaaggcaggacaacttgaagtgggggcttccaggttagaagcagataagagacaaaaggttgcattcttttgggtccttgatcagccttccactgaatacacaatttagtctggctcagtgaatctgcatttttacataaacaataggccagagggagcaatcaggtattcatttgtctcaggtgagcctcagagggatgactttgagttctgtctgtcctttgtccaaaaggaatttcctgtgggtaaattgtgagggaggtatgtagcttcttagctatcttaattaggcataaaatgggaggcaggtttgcctgacacggttcccagcttgatttttctcctggcttagtgatttgggggccctgagatttattttcctttcacaaatactataaaggagcttgctatggactgctgcatctttgcccccaggcacactatattgtacttcaagaagtttacttcctcaggcattgaggcaccaccttgttagagtttgggaggaggccaagaaataaaggttaacatccaaactccttgagctgggcagttaggacagttttccactgggccctccaagccattcttccaccaggtccctggcctgcaaaggtgagacccctttgttctttcccccttactgcttcagttttagccaagccatgctgcacttttgaacgaggcatcctagctgtcacttcctccagcagttaacccctctgtccctcggttcctcaactggataacagtagggttgtcggaggatgaaatgagttaatatgggtaaaggacttagaacagtgcctggctggcagtgtgctctctgtacttggtaggtattctatcgttattttcccctacctgaatgtcgcctcttctcttgcctatcaaccactccactctaaacgcacttgtagcgaatccaagcccaaggcatcctttcctgcaccatctgaggaagaccccaccccactctttattggctagttcagatccagcttatatgtaaatgataagatgaaagcctgagcatatgtttttgagtctatcagtttgatcatggaaactgacagattatcagtaaggacaacgaaatatagcggcatattggccagtctcaaatccttgaaaggtgcaaaagttaaaaagtgaaaagtgggccgggcacggtggctcgcacctgtaatctcagcactttaggaggcagacacaggaggaatgcttgagcccaggagttcaagactaacctgagcaacacagcgagacccccatctctacaaaacatgtaaaaattgtccgggtgtggtggcgcgcgcctgtagtcccagttactcaggaggctaaggtggaggaacctttgagcccaggaggtccaggctgcagtgagccaagactgggccagtgcactccagcctgagtgagagcaagacgctgtctcaaaaaaaaaaaaaaaagaaaagaaaaagaaatgtaggttttacttgtgcctccacgccccaccacgccctcccttgctcatccagaagtcgctttgcggttccacgcgcgggcgtctacgtcccatctcaggccgccggcagtgaggctttgggaggatgaggcggtaccggcacgacccccgtacctgctctccctctcgcagtctagcaaccgcctttggcccaagtaatctcggctcgcctaatacagcgtgccccgcccctttcccgtggcgacgggcggctaagcaacgggagcgggctctactcagtggtttcgagccccccacgccccaagtgagtcgcaagcgacttccacctgggcccgtagggcctccgcgtcccgggccggtccccgcacagggcggagctggcccggcccggagctcgccccgccccgcctcaccgtaagctgaccgtgtggcggccgggcgagggcctggcaggggagagaaggggaggagaaaggagaggaggaaagtggagcctggcgggccggagggaggaagggaaggggcggaggccaggggcagagtgtgccggcgcgcgggggagtctcggcgctgggcgcgtctcggagcccaagtcgcggccgccgagcggagccagcccctcccctacccggagcagcccgctggggccgtcccgagcggcgacacactaggagtcccggccggccagccagggcagccgcggtcccgggactcggccgtgagtgctgcgggacggatggtggcggcggggcgcgggccagcgcgggcgccgtgagccggagctgcgcgcggggcatgcggctgcggcccccggccctcggcccccgcgctccggccccagccccggccgccggcccccgcggagtgcagcgaccgcgccgccgctgagggaggcgccccaccatgccgcgggccccggcgccgctgtacgcctgcctcctggggctctgcgcgctcctgccccggctcgcaggtaagccgcgccgcccacggcgcccagagaaactttgtcgcacactcagccgcgggcgggcgtctcggaggggcggggagcgcaggcggtgcctgagggcggagggcgccttcggggcactccctggtgggccagtcgctgggggacagccccgcggggcgctccccgcgcgcagccccgccgggctgtcgtgagtctcctgttccctcccgggctgaggaggagcttcccttcctgtgtaaacaggctggccggcctgctgacctagcccgccagggcccgcgcccagggcacggggaggaccgccgccagccctgccttggggcccgggctctccgttggcgggcacaaagcggtccttgtggccggccgggagcgggcgggctgctggggggatgccgtcggtgccctgttcccggagaagcaagggagtctcgaaaccccagccaaagcccggggccacctccactccggagggctcgcctcctggaacagcgggtgcacagggcccacagcgaatcctggagttcgctgcgcctaggctagccgcctgcctttgaagatgcagcccccaccctccccgccccccgcctgcttcctcctcgcctaggccaccgcaaacccgagggggcacccgcgtcccaaaccacagccccacctgggacttccctattaaattccttctgcccgactttatcccgcgatttgcacacgctcggagcctcacactcccctaactgtggaggattctggagcagaggacaggggctgtggagattgccttagcccgacgctgcggtgggctggcagcgttgcaag

SEQ ID NO: 9602 - DNA, 6000 bp, Homo sapiens
tatatggcaggcttcccttcaatagcagctctcagttccgatatcagctcctgcaagaaggttttgctgaccatcctatttaaagtagcacctcataccccacaagtcactatcccattgttgtgttttattttcttcagagcattgaccactctctaaaatcattgtatttaattactttttttgccgacctccactacccatgatctcacagaagcttcaggagagcagagaccttcatcatcttgttcactgcttcatcttcgatacctgatggatgtgcagagatgcctcgagtacctgggagtgactgaacagccccctcctgaacattactcatgtaaagcaaccattcactgaaaagttaatttcagagggtataaaaagcaagagtggaaatggttctgtcaatgtgtcatcaattagacatttgagttgggaatattgcattccacaagtcatttctctgggaatggtcttctgaattagagaggaaaatgctgatcagcttcatgtagtatctaaatgtgatatccgtaaatggtagtagtgactctgggaaggctatactcacacctctattgaggggctggaattagtgagaaggagataggagcttaacatgtatttacatttggttctatagacagaaaataatctttgggtctaactatttaatcttgatagaattttatgttttaatgatcctctagagccttatcatggtactgcagtgttgcagaatcaaagtagccaaagaggagctcttttgtttgagacagggtctcgctctctcgcccatgccgtggtgcagcagtgcaatctcggatcactgcaacctccgcctccagggttcaagggatcctcctgcctcagcctcccaagtatctggtactacaggcatgcattaccatgttaagataattattttaaaattgttttgtagagacaaggtctcactatattgcttaggctggtctcaaactcctgggctcaagcaaccctcccactttggcctcccaaagtgctgggattacagatgtgagccacctcacctggctagagaggctcttgatggatcaaattctaattctaaatggctctgatatagctctcttgagtttatgcctaaataactggatattgctttagattaatgggcatgtcccattcctctgcatagtcaatagaattattgaaaagctcaccctgaacaatagttcttttgcaaccaggtaattatgggtaaacagctttttttttttagctgacttggtgacaacgttaccaacatataacattgtttctgtgggaaaatggagtctgtgttcttgacttatagataaatacttagaatttagccatttcatactaataaatatcaaccctttttcctatccaggttttgagttctgtgagaagtaaaacacagagtacaacagatggagacaaaatattacttttatagaagcttatttttgagaatgtggcttagggctccctccttctggatccttaccttcttgggcacaacaatcctgaatccaggttatctccccaaatggaaactgcaggatctgaggtgagtattcccagtttattctgaaataagtcactactcttcctttagggcaaaatgaataaagacatgccaagaggccaggagtgtttcaggaattaaactccctccattagtgaggaaacatcagccctgaggaagaagaagtttccctcatgaaagctctgtgtattgtctctgtcatcctgcagtactgaagtcctgtgtggatgctttaggagcgggcataccggtgattgctgatttatactttgaggactgcctgactttctggctgcccatatttttccagatgataaggccagggaagagtcagggagccagatgcttggcagtactccatgccttcctggttatacttttcattctatgctcagcagataagtaatatagaaaaccatggaaatattgacactgttgtaatatggtggcatcagtagacattagtgatagagcactgtgggcgctactcacttgatatcttgaatctaagacatgatggggtgtgataggcttctcccagtttaggagacaggatttgagaccctgcatttgagatcctgcagctacttatgtgaccccaggccactttttcaatttttctagattcctggttaggcttttataaagtgaatatagtaagtttaaaatgccatataaaaatgacagaaaaggagaaaagatttgcaatacatatgtaaagaacttttaccattaaaaaccaagaagaaaaccaattcaacgatacaatgtgcaaattatttgaacaggtactttacaaaagaagagacacgagtgactaatatgcacataaaatgatgttcaacatcatttgtcatcaggagatgcaaattaaaacaaaagtgagatgccactacataccctttagggtagctaatataaagacggacaataccaagtgttggcaaggatagggaacaactggaattctcatatattgctgatgtaaaatggcataacaacttaggaaaaccatttgaccatttattaaaaagttatatagctaccatgtgatgcagccattccattctaaatatttaccctaaagaaatgaaagtgtatgttcatacaaaaacttgtacatgaatacttataacttttttttttttctcgagatgaagtcccgctctgttgcccaggctggagtgcagtgacgtgatcttggctcactgcaaataatacttccggggttcaagggattctcctgcctcaacctcctgagtagctggggttacaggtgcctgccaccatgcctggctaatttttgtatttttagtacagatgaggtttcgccacattggccaggctgatctccagctcctgatctcaggtgatccacctgcctcagcttcccaaagtgctgggattacaggtatgaaccaccacacctggccttatttataatctttttgtttgtaatagtcaaaactagaaacaactcaaatgtccatcgacagatgaattaccaaacacgccatggtacattgatacagtggaatagtgttcagatataagaagaaacaaactatgaattcacacagcaaggatgagtctcaaaatggttataagtgaaagaaactggctcaaaaaacaaaacaaaacaaaaaactacatctgtatgattccatttacataaaatgctagaaaatgcagactaatttatagagacagaaagcagatcaatggttacctggggttggggtggagtataggggatgtagcactaaaaagggacaagaggaaagtcccaaagggtgtgttgggaatgctcggtatcttggttgcaacggtagctacacatgtatatacatcaatcaaaattcgttgaactgtacactgtaaatagatacagtttattgacataaattatagctcaataaagctagtttaaaaagaaaagaaaaacaagcctttgtttaaatcctgatgccaggagttattcaagctgagaataatagcataacataatgggccttagaagtgtctttgctttggaaaaagtgtttaaatggacctctcagccatgtaagaacaaacccctgtcttattcttgaatggagactctaggacaataagcagcttatctgctgggcgatcatacaaaaatgttttgttttcatcaaggtcagggttaaaatttaaacccaaaggccaggtatggtggcacacgcttgtaatcacagcactttgggaggctgtggttggggattgcttgagtctaagagtttgagaccagcctggacaacatgacaaaaccccatctcttctgaaaatacaaaaatcagccaagcattgtggtgtatgcctgtaatcccagctacttgggtgactgaggcaggaggatcacttgagccctggaggcagaggttgcagtgagctgagatcgtgccactgcacttcagcctgggcgacagagtgagactctgtctcaaaaaaaaaaaaaaaaaaaaaaaaaaacttaaactcaaaactctagccacaactcacaaggtatcattagtttatattcctctggctggggctagacacagtagagttggggccctggactttaaggagggaaaattagattaagaagacccaaatccaagcagtaaagctggttcctgacacatggtgagaggtgaggggctgaggaactagagagagggtgagaaagggaactgagaagtggggcctgcccaatgagtggccaggagcagagagatcaaatcagctgttctaagttttctcttttctgtactttattgccaactccccaacacaccagtcacccacaagacttcagtaaagttaggttaaatgccatgatgtgatgtccattgtgcttgggaactttattgggggctgtatccaggtagagtcacagaagcttggagatgtgattacaaagttgctagacatgaccatcagagaggcccggaatggtagtccccagcatacagtgacaaaagttaagcaactaataattttgggaaacatgtaagtcctcttcagggattctcagaactacagctggaggaaagtggtttcctgcactcatatgtgggtgagtagagcacagtttgttattgaatgtttaatggaatggtgacctcctaaaagatggcggcttggagacatttgagatatcaagagattaaccaaactcatgtgccaccaacctcacaaggatatttggaatgtcctgacttattttgggctttgagtcagaaaaatgattcgtaaggccagctccacctcttctatctcaaaagctcggaagagatctatggtatttggccaaatgctagctataattgcctttctgtggtttgacgtcaattaatgactggactttgtacccgaaagacagttaaaacgaaaggtagccaggaagggaaatcatttcctcctcagattaccaagcaagaacagctaaaatgaaagccatcattcatcttactcttcttgctctcctttctgtaaacacaggtaaggaatatttttacattttaattcttccaatcatgtatgttgtctttgaggtagaatcagcaggcctatagctaccaattctcccagcccagcacatggtctattttataaatgaagtttcctctccagctcagctcaaagacacagacattttatcctgtgatggggaagatagagcaatagcaaaagtggtctgtgggctgggcgcggtggctcacgcctgtaatctcagcaatatgggaggccgaggcagatggatcacttgaggtcaggagtttgaaaccaccctggccaacatggtgaaactccatctctactaaaaatacaaaaaaattagccaggtgtggcggtgggcacctgtagtctcagctactcaggaggctgaggcagaaagaatcgcttgaactcgggaagtggaggttgcagtgagctgagatgacacggagtgacagagcgagactccatcttgtaggggtggggggaagaagtggtctatggagtgagatctgggggctcagcaaaccagaggtttctctttgagagttcctgaggccagataagaaggactaagtaggttgcaaggacccagttctctactatagcgttctggatcccctctcatgataatcagagagctgaccacagcaaaaagcctcctttcacaaatgtacttgaatttgagaatgctaaaccatagggagtaattgtcacgttgattagacttcagacatgtactctctgttctgagttaggaagggttctatgggccacatgtgggtgaggtcagcagtatgttgagaggtgagggttgtggaggccaattggcttcctaaaattttgcagaaaaatcactggcatgaagtagatggactaataggaaaaaaggcatacaactgtatttaatgtgtgtacccaggaacctt

SEQ ID NO: 9603 - DNA, 6000 bp, Homo sapiens
ccacaaagtcatgtagtgtcatttctgccatttctcctgttggctggggcacttaaaaaggtccactcaggctcagtgggaggtaacatagaccctaactccttttgaaggaatcccaacatcatattgtaggaagagcatatgggaaatacaatctaccccacattgtttgttttttaattttcttattcatctcccaccccaccccttccagattccaaagtaacgtatgcttgttgcaagaaaaaataaataaataaaaatccagaattgactggtttggcggctcatgcctataatcccagcactttgggaggctgaggcaggagaattgcctgagaccagcctgggcaacagagaccctgtctctaccagaacaacaacaacaaaaattcagaatttatacaccaaagtctatactcactatctcaatccctccctggagataaccactattaacagattgatgtgtatttttttttcttttctttctttctttctttttttgttttttgagatggagttttgttcttgttgcccaggctggagtgcaatggtgcaatctcggctcaccgcaacctccgcctccctggttcaagcgattctcctgcctcagcctccagagtagctggaattacaggcatgtgccaccatgcccggctaatgtttttgtatttttagtaaagacggagtttttccatgttggtcaggctggtcttgaactcccgacctcaggtaatccaaccgcctcagcctcccaaagtgctgggattacagacatgagccaccgcgcccggccatatttttctatacaaaccacatatatgtgtgtgtgtgtgtgtgtgtgtgtgtgtgtgtgtgtgtgtgtgtgtacactgctttttaaaacaacactatacattattcttcgacttgctgtgtttattcattattatgtgatgaacagagttccatgatagcatgtatagaaacatttaattctttgcttctttttttttttttttgagatggagtctcactctgccacccaggctggagtgcagtggcaccatctcagcccactgcaacttccgcctcccaggttcaagcaattcttgtgcctcagcctcccaagtagctggggttacaggcacacgccatgatacctagctaatttgttttgtatttttattagaaatgaggtttttaggacgaggcaggtggatcacctgaagtcaggagttcgagacgagcctggccaacacgatgaaaccctgtctctactaaaaatacaaaaattagccaggtgtggtggctggcgcttgtaatcccagctactcgggaggctgaggcaggagaatcacttgaacctggcaggcagaggttgtggtgagccaagatcatgccactgtactccagcctggcaacagagtgagattccgtctcaaaaaaaaaaaaaaaaaaaaaaaggaaatggggtttttattttttgtatttttatgagaaatgttggccaggcagctgggcacagtggctcatgcctgtaatcccagcactttgggaggttgagggggcggatcacgaagtcaggagttcgagaccagcctggccaacatggtgaaaccccgtctctactaaaaatacaaaaattagctggacatggtggcaggcgcctgtaatcccagctattcgggaggctgaagcaggagaatcgttggaacccaggaggcagaggttgcagtgagccgagatcatgccattgcactccatccagagcgacagggcgaggctctgtctcaaaaaaaaaaaaaaaaaaaaaacaaatgttagccaggctggtctcaaactcctgacctcaggtgatccgccggcctcagcctctcaaagtgctaggattataggcgtgagccactgcacccagcccagaaacacctaattatttctaatgccagctgtcatagtatggctgtaccgtttatctaagcagtcttctgttgatggacatttaggttgttctcattgtttaaagtattacaaagtaatgatgcaacaaacatgcttttcctagttcatgtagggcagtatcttcaaaatggcaatgtttaaaggatatgcaggatactatctctctctctctcttttttttttttttttttgacagagtcttactctgtcgcccaggctggagtgcagtggcatgatctcagctcactgcaacctctacctcccaggttcaagcaattctcctgtttcagcctcccgaatcacaggtgcctaccatcacacctggctaaatttggtatttttagtagagacagtttttcaccatgttggccaggctggtctcgaactcctgacctcagatgatccacctgcctcagcctcccaaaactctgggattacaggtgcaagccacctcgcccagccaggatactatttttcaacatgaggttttttgtttttgtttttgtttttttgtttttttaaggttagtgttattgttataagaaaaatctacattaagcaggatatatatatatttttctttgcaaagggcaggtttctgtagccttaacatgaagaaaataaacaactatatttgtttctgggtttagaagatgcttataagctttgaagggaacttctcatttatttagaaaatgacgagtgacaggaagtaggtggttataaagcgagaggtggattccccattctaaagtttttaactcaggctgatatggaattgaatgcagattcttcaaaattcatgttgacacttagagggagactcatcggaaggtgacagcaaacaggaaaccagcttgaggcaaaaaaaaaaaaaaaagagcagtgtcatgtatgacccaccaaaagtgaataagaaaaatgactctgctgatcattctgatgaatctgtggaaatacagtcagcccttcatatctgtggatttgaccaaggcaggtcaaaaatatttggttaaaaaaaaaagcatggttgcagctgtactgagcatgtacaaagttttcttcttgtcattattccctaaacaatacagtataacaacaatttacatagttttttttttttgtttgattgtttgtttgttttttttttaagacaggatctcactctgtcactcaggctttaatgtagtggtatgatcatggctcactagagcctcaacctcctgggctcaggcaatcctcccacctcagcctcccaagtaggtgggactacaggcatgcaccaccatgcccagctaatttttaaaatttcttttgtggggaaaagaataggctctcaccgtgttgcccaagctggtcttgaattcctgggctcacgtgatcctctcaccttggcctggagatttggaatttttgtaattccaaagtgctggaattacaggtgtgagctactgtgcctggccttgaattaggtattatacgtaatctggagatgacttaaagtatgtgggaggatgtgtgtaggttaaatgcaaatactacatcactttatatcagggacttaagcatctacgcattttggtattggtcagggggcctggaactaatttcctgcagatgccaagcggtgactgcataatggattccagtaacgtgactgtgtcagcctgtccgcccattcatcctttgttcacagatggttaatctgtaacttttggggggtctttttttctggcagagatgggttattaaaaatttctttgctgggaatgaaattctgacacatgctacaacatggatgaaccttgaggacattatgctgagtgaagtaagccagacacaaaaggacaagtattgtatgattctacttacatgaaatacacaaaataggtaaatccatagagacgggaagtagatgaggggagttacctctgagggtagacgaaacggggagttagtacttagtgggtacagagtgtctattggggacgatgaaagttttggaaatagcgatgatggttggacaatattgtgtgtgattaataccactgaactgtacagttaaaatggtaaaaatggcaaatatgatgttctatatcttcacacgcgtctttgctggagcagaagcgagaggttaggttctgtcagtgttcccatggcttagccttcccttttgtttttagaagaacaacctctatttttagggattttcacacaaaggcttgtgggcgtgggaagttctcccagctgccctcctgtttctcagaagcccacatggaagcctctcaaattatttaaggtttaggaaatatgccagattgggaatggagataatttaatctctctgtatgttaatttagggttctttttttctgcaacatgaggccctggaaaccttacttcacccctaggaaaggcagttctgggtcttggtgaagggggtaagggtaattcacccctacacagcatgcccagagcgctttcctggcaaaagcagttccacgccctcagagtctggggtcacctgatcacgcagccaggcacacacggagacccccggtaccggggtctcggtcagcttgtccagattcttctccacatctgcccagggggctgcgggtttccctgcactccgggcttatcccgggctttctcagtcctgcgtgcagtgctcacagccactcctcagagccgcacagggtaggctcctgtccctagtcccctggtcccggggctgggcatttccgctggttgcactgtcgaggggggagaggcagtggctggtcacttcgagcctgtgggcttgcggcccctactccctgttttcccccagccctgcccctacccaggtgaatgttcttgtccaggtaggcgcgaaggcccgacccttgcggagggaaagcctctgcagcgcctcctcgccacctgggcccgagactcccggtgctggcgtggcaggggtgcccccgccgggacgggacagctgggacccgcgcagccgagccggggcagccacgtggcggcggggcggggaccgggcgggccgggcgctgggagctggctgtcccaggagcaggtgagggcggaagggctgtggggggtggagagggtggtctcgggacagttcctctccccggcccgcagttaggagccaggcctggggtcacctttgcccccacctccccgcccaggtggatcctctcctaccgccggtcacccgcgcgccggcacacgggcctggccccagtacttggggtgcgggtccgcgtctgcgtggggtgccaaggggcccgggtcccagcgtggcccaaacgtgagggtaggggctccgcggaggagccaggtgaatgtgggcggaggcctgcggggcggcctgcggaggccgcggggcggcgggaagggcgagcggaggcctggggtcccttgctctgtgcggcgcgggcagccggggacacccgggtgctctggctccctacctgtcacccggcttttggcaggactgcagcccaccaagtcccccagccttcccagcttcccactgggctaaccctcctctcccaaccccccactcagtgctccgggcgccttccctcctcgccagcgctggctgctgtccttagtcgccttcttcccaggaagatcagctctaaccctccccctcgctctcttcctcccccttcctccttctaccaaagggtcctgagccccgtctaccttgcagcactgtgctggggagaggcgccacacagatcaaggggacaaactccctcctcccctcaaggaaagccaggtccagcgcgaaggggagggtgcctgggggtgggttgaggagctgccctagtcctgtccagccttttctcactcaccctcttcaatctcctacccttctccggccctgctccagaagggccccaaaacagcctcctcatggcccctctcccctctgctcagggcgcagctacattcactcaccacctgcagccaggtctagtgcgtcatgatgccctcctcctggagagaggggttcacgaggcacttgagggtgggagaggagtg

SEQ ID NO: 9604 - DNA, 6000 bp, Homo sapiens
gtgtggtatttctcacgtttacttgactatgtggaaacacttttctagagctttttactgagacttgcaacaccccagtcactctggaagtcatcaatggggaagaaatggagggaaccttggtgttctcctttcccacaaggaaaatcaggtgcacatacaacctatgaggagacatggaggtaagaaggattaatatttgaagagtcggttattttgtagaattttcttcaattttggtttgtctgattttatctattttttttattattactatttttttgagatggagtcttgctctgtcacccaggctggagtgcagtggcatgatcttggctcactgcaacttctgtctcctgggttcaaatgattctccggcctcaacctcccaggtagctggaattacaggtgtgtgccaccatacctggctaattttttgtatttttagtagacacggggtttcaccatgttggcctggctggtcttgaactcctgacctcaggtgatctgcctgccacagcctcccaaagttttgggattacaggcgtgagccatggcgtccggccttcttttttcttttttttttttttttgagacaaagtctcactttgtcatccagggtggagtgcagtgtcatgatcacagctcactgcagctacaacctcccaggcccaagtgatcctcccacttcagcctcttgagtagctgggactacaggggcatgccaccacactaggctaatttaaaatattttttgtaaagatagaatgttgctatgttgtccagactggtctcaaactccttggggtcaagcaatcctcctgccttggccttccaaagtgctgtgattacaagcatgagccaccatgcccagccttgttttgttttttgagacagggtcttgctgtcacccaggctgaagcggcatgaacatagcttactgaagccttgatctccggggctccagtgatcctcctgcttcagcctctcaagtagcggagactacaggtgtcagaggcatgtgaacgacaacaactccatcctgaataggaactgggtaaaacgaggttgaaacctgtgagctgcattcccatacagttaaggcattttaagtcacagcgtgttgggaattggtgggttcttggtctcactgacttcaagaatgaaaccgcagacccttgcggtgagtgttacagttcttaaaggtggcgtgtctggagtttgctccttctgatgtttggatgtgttcggagtttcttccttctggtggggttcgtggtctcgctggctcgggagtgaagcggaggaccttcgcggtgagtgttaacagctcttaaggaggcgcgtctggagttgttcgttcctcccggtaggtttgtggtctcgctggcttcaggagtgaagctgcagaccttcgtggtgtgtgttacagctcataaaggcagcgtggacccaaagagtgaacagcagcaagatttattgccaagagcgaaagaacaaactctccagtgtggaaggagaccccagcgggttgccactgctggctctggcagcctgcctttattttcttatctggccctacccacatcctgctgattggttcattttacagagaggggagaggtctgttttgacagtgtgctgattggtgtctttataatccctgagctagacacaaaggttctccacgtccccactagattagctagatacagagtgtccacacaaaggttctccaagtccccaccagagtagttagatacagagtgtcaactggtgcattcacaaaccctgagctagacacagggtgctgattggtgtgtttacaaaccttgagctagatacagactgccgattggtgtatttacaatcccttagctagacataaagattctccaagtccccaacagtctcaggagcccagctggcttcacccagtgaatcctgcacccgggcggcagggggagctgcctgccagtccccggccgtgcgcccgcactcctcagcccttgcgtggtcgatgggactgggcgccttggagcagggggcggcgctcgtcggggaggctggggccgcacagcagcccacggaggagggggaggctcaggcatggcgggctgcaggtcccgagccctgccctgcggggaggcagctaaggcccggcgagaaatcgagtgcagcgcccgtgggccggcactgctgggggacccagcacaccctccgcagccgctggccggggtgctaagcccctcattgcccagggctggcagggccggccggccggccgctccgagtgcggggcccgccaagcccaggcccacccagaactccagctggcccgcaagcgccgtgcgcagcctcggttcccgctcgcgcctctccctccacacctccctgcaagctgaaggagccggctccggccttggccagcccagaagggggctcccacagtgcagcggtgggctgaagggctcctcaagcgcggccagagtgggcgccaaggccgaggaggcgccgagagcgagggagggcgcacgctgtcacctctcaacaggatgagatagaaggtcggcacaaaatactggtcataaagaccttactgataaaacaggttgcggtaaaggagccggccaaaacccaccaaaaccaaaatggcaatgagtcctcactactacactcccaccagcgccatgacagtttgcaaatgccatggcaacatcaggaagttatcctatatggtctaaaaaggggaggcatgaataatccaccccttgtatagcatatcatcaagaaataaccataaagatgggcaaccagcagtcctcgggctgctctgtcaatggagtagccattcttttattcttttactttcttaataaacttgctggctgggggcggtggctcatgcctgtaatcccagcactttgggaggctgaggcaggtgggtcacgaggtcaggagtgcaagaccagcctggccaagatgttgaaaccccgtctctactaaaaatacaaaaattagccgggcgtggtggcgggcgcctgtaatcgcagctacttgggaggctaaggcagagaattgcttgaacccgggaggcacaggttgctgtgagccaagactgcgccactgcaatccagcctgggcaacagagcgagactccatctcaaataaataaataaataaaataaaaaataataaacttgctttcactttgcactgcggactcatcctgaattctttcttgcgtgagatccaggaaccctctcttggggtcaggatccagacccctttcctgtaacacaggcacttgtcaccaggcccggctgatttttgattttttgtagagatggggttttaccctgttgcccggtctagttttgaactccttggctcaagggatcctccctacttggcctcccaaagtgctgggattggtggcatgagccactgtgcctggccttgtctgatatttatgactagattgaggtaatggattttcaataattttgtggcaataccacagaagtgatgtgcctttctcaatggatcctattagtagatacctaatgttactatattttatatgtggtgatgttaactttgatcacttgtttaaagtggtgcctgccaggattctccactgtaaactattttttcctttgtaattactaaacattttatttttattttttaatttccttttgagagggagtctcgcccagtcgcccaggctggagtgcagtggcacgatcttggctcactgcatctcctgcctcccgggttcaaatgattctggtacctcagcctctggagtagctgggattacaggcacgcaccaccacacccggctaattttattttatttatttatttatttattttgagaaggagtctcaccctgtcgcctaggctggagtgcaatggcgcgatcttagctcactgcaacctccgcctcccaggttcaagcgattctcctgcctcagccaccccaagtagctggaattacaggcgcctgccaccacgcccggctaattttttgtatctttagtatagacggggtttcaccatgttggccaggctggtctcgaactcctgacctcaggtgatccacccgcctcggcctcctaaagcgctggaattacaggcgtgagtcaccgtgcccggcctaattactaaacattttagtagagatgttttgaaactttgcatatatcctgtttcggcttcaagttctgcctactaattttagcattcatccgtggatgttggggaaggccaacttttactttctcaatctgagcaaaatttcactgttttaaggagcaaaacgagcagaattattggacaggaagaatggtaggagagagtagagacctaggcaagggccgctcctgtaaaaattaggtaagtgaaaactagtaataataagtacactcgcggctgggcgcagtggctcacgcttgtaatccagcacttcgggaggccgaggtgggcggatcacgaggtcaggagatggaggccacagtgaaaccccatctctactaaaaatataaaaaaaaattagccgggcgtggtggcgggcgcctgtagtcccagccacccgggaggctgaggcaggagaatggtgtgaacccgggaggcggagcttgcagtgagctgagatcgtgccactgcactccagcctgggcgacagagcgagactccgtctcaaaaaaaaaaaaaaaaaaaaaaaaaaaaaaaaaaaaaagtaagtacactcgcactacgaacagaaggatatcccgagcagctctgagagggctttagcaatcaggcgccgggtcggcttcccggttgccccggagacagggtccttccttgttcggcgccgccatcttgtgtcaccagcccttgcccaatgaacggctgctcagtggcgggagggcgggctaccgcgcccgggccctacccgccctggcgcactgctcttcccggtcatggaggcgccagccgccggcttgtttctgctcctgttgcttgggacttgggccccggcgccgggcagcgcctcctccgaggcaccgccgctgatcaatgaggacgtgaagcgcacagtggacctaagcagccacctggctaaggtgacggccgaggtggtcctggcgcacctgggcggcggctccacgtcccgagctacctctttcctgctggctttggagcctgagctcgaggcccggctggcgcacctgggcgtgcaggtgagtgtgggcgacccctcgccgccgctcccgggacccttcccgcctcccttcctggcggtcccccgactccgcccgcgcccctctaggcctcaggaaatgcggagacccgggcggcgggcggggcacagggggtccgtgggattgcctcggggcccgcgaggagtcctgggtggccaggggccccggcgcctccgctgcccccggtgcgcgcccgccctcctgcctgggccacgtcagcaccggcctgcccccgcgcgggtcgctgctcacgtgggcagctgctgggatccgcggccgaccagcctcggagcttgcccctgtttgggccgttctcggcaccgctcgggagacctcgggccggtagaacgcacctcccttccgtaaggcgagcgcggcagcccctcggcccggtgccagcgggcgccagacttcatttctcacggcccgacgaggtggctcaagtagaggacaaataaatgaattaaagtgaatttcattctcttaattcagtatctggtccgttgtaggtgcttctttctagacatagagaaccatcagaaatgtaacaggtttcgcatttttaagttggtaatcacttgaaatccctatgaatgtgatgcattttaaggttcctagtgaacgctttctaaatgttaaaactctttttaaagttagttttaaaactcctgcacgtaatataagttctcttatgctgtacagaaaaggaaagtccaattttctcccttccccctgctgcttc

SEQ ID NO: 9605 - DNA, 6000 bp, Homo sapiens
ggaggtgatctccctgataatcatcatctgggtggagggagccctcctgaggggttcagaggataggctggagaagcccacatgggagctgaggctctagggcaggaagtcagcagacttcacacttcatgatgacacacacatgccccatcctcacagcggcccacggaggcagatcatgctcctctttccagatacggaaactgaggaccaagaagcagtggcgccgccgtggtcatgcagatggttagggtcaggcctctcagccccaagcaaggggcgcagggatgcagcggctgagagcagggcctggacgcctggaggctgtgcagctgcaggccagtggcacaccactctgaccttaagtgtccccatctgcaaaagtgggttgatcaaaggtccatcaatgatagactggattaagaaaatgtggcacatatacaccatggaatactatgcagccataaaaaaggatgagttcatgtcctttgtagggacatggatgaagctggaaaccatcattctgagcaaactatcgcaaggacagaaaaccaacactgcatgttctcactcataggtgggaactgaacaatgagaacacttggacacaggatggggaatatcacacactggggcctgtcgtggggtggggggagggggagggatagcattaggagatatacctaatgtaaatgacgagttaataggtgcggcacaccaacatggcacctgtatacaaacgtaacaaacctgcacgttgtgcacatgtaccctagaacttaaagtataatttaaaaaaaaggggggttgctaagaccccccccgcagggttgctcccacggggaaatgagacgggtccagcccccgagaagcagcagtgatggctcccggcaccacctaggcccatggctggattgccaagccgtccctaggactcttgtttccagcaccttcctgtggctgaggcggtgctctaaagcattaaccttgcaggggcatttcctgcaaggaaacgttctcagaggccaggcccaagggacgggagggcaggagccccctcctcccagcgcaaccctggccccactgttattttttccaattgaagaagaaaaacatttcctctgtctcctcacagctctgccctgggcagtcagaggtgagaatggacaggacagggtgggaagcccacccagtggggtggaaggcccaggcccgccttctccgagccagcatagccgttgaccaccgtgccccaagcaagactgccctgactcggccaccaggtcctcgtcttcaaaggcactgctggacatttcccaaatttcaggcattttggtggcatctggattatcacctatttcacatttgtctttaactcacttttaaaggacttcaatcaatgcatttatcaaggaagctttacatcattactgtacatggaaaaccagtagcacttgccaaaaccagaaagtaacggcaagtacaaagaaaacaaagcgctatcagtacattctagcacgctgatgtcaacagccctgagtttgagaccttctctctattaaaaagagacagtgacaaatgttacagtcattaaagacatgttagcctcaaaccaagaccttttccttgatataatcagacttgaacaaaaactgaaaaaggcccaaattgcagtgtgaataaccaactaggtctggctattctgggttagttcattccaagttagttattgctgggtcccacctaatccccactcctgagtacctttcatctccccttggttccctccaaaattccctctggaagaacacctcattgcatcttagtaaggccagggaaggtgtggtttgttccttcctttattcattcattcagccagtaattgtcagcacctcctctgcccagccaggggtataggggctgccaccatgagccatcctggcctgatggtgctcccagctaatgggtagaagggagaaatcataagatgtggagccagatctgggtttcaatccttaccttgctaatgcccctcagtttccccatctgtgaaatgggtttgctgaccacagcctagtcagctggctgcaaggatggtgtaagatctggtagggcagtgctgggcacaggattcactctcaccgtctggtggctctgctagccacattggggctcaggacaggaggtggagccctggtctttagttgcaatgccccccaccccaactcctggctctaacatgggcttcaggggtcatggttcactgccacaaggcggggagaaactggtgtttgctaagagccttgttgtgcttgacacctgttatgttatattctccatctcacaccctcccaggggcaggtgttctgctacgattgtcctcattttacagttgaggaaactgaggctcagagagggtgagtgccttgcacaagaccacacagcacttctcacctccagttgatgtgaggatactcagacccgaatacccttcacctagagagctcctaaaccccactgctcagcttggcagggagcttgtgtcccaagtgcccaggatcatcaccacaggctggtctaagacaacactgagcattatcctcacggctcagtggggggagctgcaggatgcagcaagatgaaccagatgagcgggagacaggaaggaagagaggaggggctggagagggagtgggggtgagggatagggagggagacagagagagagacagagatagagacacagagagacagatgaagagtggaaagggaagggggcaagacactgagagaaggagagacaaagagagtgaacgggaggagcaagacagataggaacagagatgggtgggggcaggagagagagagataagacagagagaccagcggatggactggggtgggggcactgaggatgtgagtgaggaggaggggcatggaggcaggccccatgcacccctgctgggctctgcagttggcccccacgggtggcacgatgtgcgccttctccatccagagaggaagacagggacacagtcccacgggcagtcccctgagtggctcttggtgggtggatgggcctgggagggggcctccaatttcctgcagctcaacactcccggccatcaaagcagtggccagaccagggctgaggggtctggaacaaggcgggcaggatggcaggaaggcgagggtgttgagggaagtggggggcggctgcaggcccagcctttcctgccggccccatggtgcacagacacccctgcccttccttcctggttgggtgggaaagaggaaaatgaggtcccgctactctcagagtgaggcccaccgggcaccctgtggaagctgggggtctgatgggaggccccgttctgagaggtcggagctgaagggcttttgctttcaaacactgtagctctgctcctcatgagctgtgcatcttgggccagtcccttcccctcagccttggtttccatatctggaagatgggttaccaatagcgctcgcctcgggggaatctgtgaggaaaaagagagcccgtacatggcaagtgcttggcacagtgtctggcacgggctagccctgtgtgagcacccccgcaaaacagccacggcgcatggtcctcacagggctgtgaccttggaaccaggctgcctgcccctaacgctgcttttgagatcaagaaccctgcccagtgccggcttttgtgggactaatcttccactaagcctgggaggatgtcagggaaagtgcctggcgggggtgccaggggtgggggtgcggctgggtctccacaggaggcaactgtgggctccaggaccaaggccttgctctggctatcggttgtgggccactggctggaactatttcctctctccatgttttcctcatttatatatctgaccctgagcactggtccctctggccctgccacttgtaaatcccttttatgggtctggggtttgggggacagattatggggtctggggggcccgactggccggcaccgggggagcgaaggcctggacagtgcctgagaaaggtggtggagggaggctgagtgtggaggggagacacagggttcgggaaggcagagggagaaggaaaggggagctcagagggaccgagagagggacggagggtccgagggggaggcagagggagccacggagagagggagcgagcgtcagggacggaaaaacggagcaggagagagaaggagactagaaagggccgggggcggggctgccagggactggagagcgaagcggagtcggagggagaaggagaagcagaggcagaacccggagaagcgccacacgcgcggagtttggggtggggacagagacggagagacgcagagaccgagagacgcagagagagggagagacggggtgggggagagggcggaaaagagaaaacaggcgcgagcgaggcaggccaagcggccaagtgggaggaaagagcgaggagagcgagcgacggcggcggcggctacggggagggaccctggggccgcgggcgggtcctggagggcgcgggcggcgggacccgcggacggcggggcgtggcccagggcggccaggggcaggcgggggtcccgggggcgggcggggccggggcggggagtgagggcgtgtccgcagcggagccgcccccgccccgcccccgggctgcgcggcgaggctgacccgggcccgggcgccggggtcgggggcggctggcgcgggcaggaagcgcatcgcggcccgggcccgccccccgcctcccgccgcctccgggctcccggctcccggccgcgcctcgccccatgcactcgccgcgccgcgcagcccgcgcacgcccggatggctcctcgcgccgcgggcggcgcaccccttagcgcccgggccgccgccgccagccccccgccgttccagacgccgccgcggtgcccggtgccgctgctgttgctgctgctcctgggggcggcgcgggccggcgccctggagatccagcgtcggttcccctcgcccacgcccaccaacaacttcgccctggacggcgcggcggggaccgtgtacctggcggccgtcaaccgcctctatcagctgtcgggcgccaacctgagcctggaggccgaggcggccgtgggcccggtgcccgacagcccgctgtgtcacgctccgcagctgccgcaggcctcgtgcgagcacccgcggcgcctcacggacaactacaacaagatcctgcagctggaccccggccagggcctggtagtcgtgtgcgggtccatctaccagggcttctgccagctgcggcgccggggcaacatctcggccgtggccgtgcgcttcccgcccgccgcgccgcccgccgagcccgtcacggtgttccccagcatgctgaacgtggcggccaaccacccgaacgcgtccaccgtggggctagttctgcctcccgccgcgggcgcggggggcagccgcctgctcgtgggcgccacgtacaccggttacggcagctccttcttcccgcgcaaccgcagcctggaggaccaccgcttcgagaacacgcccgagatcgccatccgctccctggacacgcgcggcgacctggccaagctcttcaccttcgacctcaacccctccgacgacaacatcctcaagatcaagcagggcgccaaggagcagcacaagctgggcttcgtgagcgccttcctgcacccgtccgacccgccgccgggtgcacagtcctacgcgtacctggcgctcaacagcgaggcgcgcgcgggcgacaaggagagccaggcgcggagcctgctggcgcgcatctgcctgccccacggcgccggcggcgacgccaagaagctcaccgagtcctacatccagttgggcttgcagtgcgcgggcggcgcgggccgcggcgacctctacagccgcctggtgtcggtcttcccagcccgggagcggctctttgctgtcttcgagcggccccaggggtcccccgcggcccgcgctg

SEQ ID NO: 9606 - DNA, 6000 bp, Homo sapiens
gtggctctagaggaatggaatcttgaggatgagttttctgaatttgttctgcgttttcttgaatttcttgaatttcatgaattcttatatgattacatttaaaggcactagtgactctatttccagtggtgaagagggcactgggagtccatggcatgataaagcatcgaatacgcctaatgaaacacctatagaaagcaaggttatgcgtgactgtgtatttgttaccttagaatattttagttaaaccaaggaacagaatggcattggccataactgcactgaagaaagcaggcaaagaaaaggatgagctcagggtttcagattcccacctttcagtgtttaaagctttaagctatgcatagatgacctggaagcttccatatctgtcctgaaaggaacccttagggccacaatttctgaaaaccaacccagagtctcattctgcaaggggctgatacagatgctgtttagagcctttggcaggccactgtaggtgaatcacgctgcagacccttaagattttggagcaaagccctgcagaagagtactgtcctcttgagaaacaacgtttggcttgctgggcctaagcagagactgaacagttaaccgtgggtcatcaagttaccatgtgacctgagctgctcatcatgaactaagtgttatctgatccaccaagctataaagttgtgcactcacagcaacactccattatcaaattgaagtggtatatatgagattgggctcaaatgggccctgaaggcataggtaagttgcacgaggaagtggcccaaatatccatggccccaactcctgctacattaccttctctctcccagcctgcacctatggcgccatggggcattccttatgaccagttgactgaagaagggaaaactcagttgtggttcatagcccaggtttatgatggttctgcacaatatgcaggcaccagtgaaaataaaactagtgtccctttctgggacatccctgaagaataatggtgaaaaaaaaatcccccagttggcagaactttgaagagtgtacttggttgttcatttttcctgaaagtagaaacgtccagaggctcttctgaccaagaggtcttagttccaaaagaaggaatgcttccaccaggagacccaacaacatttccattgaattgggagttgaggtggtcacctggccaccttgggtctttcatgcctctgaatcaacaggtaaagtgggaagttcctctactggctgaggtgactaatcctgattactaagcaggaaattcggttgctactacaagatggagacgtattaatgataggtaactttatattgcagtattaagttataagacatcaaaggtggagaagaaacatcactcaaggactttgcatccccttgggaaaagtgttgttatgttttcaatagtatgcaggatagttatatcatgttaagtgaaagtatgactttgttattgtctttaaattttttttttttttgagacatagtctcactctgtcacccaggcttgaatgcaatggcatgatcttggctcactgcaaccgccgcctcccaagttcaagcgattctcctgcctcagcctcctgagtagctgggattagaggcatacgctgccacatccggctaatttttgtatttttagtagagatggggtttcaccatgttggccaagctggtctcaaactcctgacctcatgatctgcccacattggcctcccaaagtgctgggattacaggcgtgagccactgcgcccagccaaagactttttttttttaagagatatggtcttgctgtggtacccaggccggagtacagtggtgcgatcataggtcactgcaaccttgaactcctgggctcaagggatcctcctgcctcaggctccccagtagctaggactacaggtgtacactcccacactggctaattaaaaaaaattttttttgtagaaatggggtctcattaggttgcccaggctggtcttgaactcctgggctgaagcgatcctcttgccttggcctcccaaagtgctgggattacagggtccctggtgtgttattgtcagcctttagagatcaagtatggttaaggagatgtgtaggagtgtgattgctgggtcatcggtcttaattttagctatcctaatgagagtgttgtggttttaaatggaaaaatccctagttgactaaagatgttggtaatctcttcattgcttataggccatttttgtatcttgtgaactatctacaagatataaaaaaagcctttgcccattggtttattgggctggcttattactcatttataacagttctttatgtattctggatacaagacttttgtctaatgctttctattgcaaactctccacctgtggcttgccttttcattttcttaatgttgtctctcaaagagtaccagtttttaattttgatagagttcaacttatcaattgctttcttttttttttttttttttttgagacagggtctcaccctgtcactcaggctggagtgcagtggcgccatctcagctcactgcaacctccgcctcccaggttcaagtgatcctccttcctcagccccacaagttagctgagactgcaggtacgtgccaacaagcccagctaacttttgtattttttgtagagatagcattttgccatgttgcccaggctggtcttgaactcctgagctcaagtgatctgcctgccttggcctcccaaagtgctgggattacaggtgtgagccaggccatgaatcactttttatggttcatattttttgtgtcctaagaagtctttgcctatcccaaggtcacaaatactttttctatgttttcttctaaaattttcttttataggtttagcttttaaatttaggtttatcatccattttgagttacctcaggtggctccttcagtgcttctgaaatctataaatgcatcctccaccaacctcaaatctaagtaaaccttgccacctccttctccttcactcctcattcaatttattgccaagtcctgtccattttaccactacattagcactcttctctgtcactaccctcctactttgccttgactatgtggccagtggcctcctaactggcttcccggccccagctttgagactcccatcagaccactcttcacgttgctatctaagtaacttaaaaacagacataatgggctgggggcaaggtggctcacacctgtaatcccagcactttgggaggccgaggtgggtggatcatgaagtcaggagattcagaccatcctggccaacatggtgaaaccccgtttctactaaaaatactaaaaaaattagctgggtgcagtggcgtgcacctgtagtcccaggtactagggaggctgaggcaggaaaatcacttgaacccgggaggcagagattgcagggagccgagatcgcgccactgcactccagtctgcctctcaaaaacaaaaaacagacataatgatcaagttatttcccctgcaaccctgctgaaaaaaacctgaatagcttctaccaagcactcagattaaagtcccaaatccggccgggtgtggtggctcatgcctgcaatcccagcactttgggaggccgaggcgggcagatcacaaggtcaggagttccagaccagcctggccaagatggcgaaaccccatctctactaaaaatacaaaaattagccaggtgcgctggcgtgcgctggtagtccagctactccggaggctgagacaggagaatcgcttgaacccaggaggcggaggttgcagtgagctgagatcgagccattgcactccagcctgggtgacctgggtgacagagtgagactctgtctcaataaataaataaataaataggtccccaatcctcacctgttctcgcctacctcttcccacactcgcagtctactccacattcaatattctttagcgctccccattctggccatgccaagacctcaccccttggagcaactaactcctcccaactcaattcctcagattctaccctcttcatcctcaactaaatcaattcccccataaagattctcttagtaccatatacctctcagaagatttttactaattgaaaacttaattttgtctgattctcccatgaatgttttccttctccaccagatctcaaacttcatgagaccagggactccgttgaccccatatggtactcccagctccttgaacacggaagaagcctcattacataagtaataaaaataaaataaattaggaaaatgggaattataaagggatgggctggtggctgcttacaatcccttcagtggtaatacctggtgcaaagtaatgagtctctgcccttttccaagcagcctgctaggtggaatgaaggaaggccttgcgactcaaatagggagaacaaacgtgtgatccagagcggcgggcagaaatccgacgaaaccccatattactcaggggcgttgctcctagggcgagggtggctcggttcctagagctttttgagaggaggagcttacctggagcaactcagcactacctgcagcggcgcagctcaaccagcccagagaccgcgtgggaaggcgggctaggggaggggccacgccttccagggcccatccccgcccctgcggcgtgcgcgcgcccgtccgcccgctcccttgcgcgtgcgccgccggccgggggcggaggttgtgggcggtggcggctgtggcgggggcgcgcgcgcgctcgctctctcgcgccggttcgccctcccgcgccggggctgaggcggcggcggcggtggcggtgactgaggcggcggcggctgaggcggcgcggggggagggtcgggaggggggggtggttgtgggggatggaccgggtgcggcggccgcagtggaaggagcaggcgcttgagctcgagcgacggcgctggcggagacgccggctgctcctcccctccccgccggtgagtgagcgcccccgccccggacgctggcggcggtcgcggccccctcacggccctccgcggtgggtggggacagtcgtgagggagcgtggcctggcggcgcagcggacgcgggcctggcctcccgctcgcggcctgtcggggctgggacctgccgtcgcccccgttcgaggttgaagccccgggcctaggactcgacccccagcatcccacggggcctctttcctttcccggctcattccgctgtcattttgacctggggttcccctccagcccctcgcctcgttcccttcccagcatcccagggccgaggtgagggaggggcgtgtgagaagtcgggccgaggcccgagggactgtttaggagccggttcccgtcggaatctggggttttaggagccctcgatcgccatggcgtcccagaagttagccaccaggactcagccatttccacctgaaaccagttttgcacctattgttttgattttgaactgtctttcgaggggaggagggagcccggcgtactggggagaatatgtagtgggaggtgggatgtgaggaggagctggctgggcttggtctcggcctcaggatgccccctgttaacccctgtaggataggggaaagaggtgcagcgagttgcaccttccctaaagggccagagattcgtttatagcttgcgaatctctgctttttcagcctcggtaaaggggtatcatttgtggttggtttggttcgtcccttaacaacattcttggtgaggaatccccaggtgaatctgccacggagtgaagcagcccacttgagctgttggctacccccggcccccgcaacgcccgttggcttttgtgacacgttacacgttagtgttggtagagcctagccgtcagaggtacctgtaccataagcatctctacgaaaggtgtgaattcctaaattagcttattctgttcttaaaaaaaaaaaatccagggcataaatatcagatagctgctttaaaataaaacaaaactttgatttgttccag

SEQ ID NO: 9607 - DNA, 6000 bp, Homo sapiens
catctcaattcctaccagccacatttgaagtactttatagccacatgtggctagtgcctactatactggccagtgtagaactacatgatctcaatgtgaaaggtatgtgaagaaagagggaagtgaaagcaggctgaaattcctgttttgtttaaagttagatatggccactaaggaacattcagtaaatgtaataactagtgtttggtacaaatggttaaccatatggaaaaaataaaattgtatcatgtgccatacataaacataaattccagatagattaaggagctattttttaagagaaaaaagtacaaaatacaaaaagtattaattgggggacctttgaaagacacaaaatgcggaagccataaaggaaaagattgtcagatttatctaaaatagaaatccaaaatttaagttaagtaaagaacatcataagaaaagttaaatgacaagggatacagtaaaagaaaacatccataaatcaataagaagacaaataagctaactaaaaaatagaatatgtgggcagatatttcaaagagtaatttgaatatgcaataagtatatgagatacttaaccgcactagtgatgagggcaatgcagattaaacaacaataagctatttttctttcactagactgtcaacagcaaaatgaaaaacattggcctattaccttgtgtctctcatttatgccacatttggaaatgtatatttgtaaaatcttttggaaggcaattcagcagaatctatcaaaattaaaacataactcctttggacttgaagattccatttcagagaatctgttcttctaaatatttatacatatgcacaaagatgtatgtgcaaggatttgatgtgtattaccagaactggtaaaatccatcagttcatcccaaccaaaagaacaccacagggatgcctctgtatgccctgtcatgagaacatcctcgagatctcaacttacttagatcagtcaaaaaagcaaatcctgtagatcacaactttttgttgtgttgtccatttctataaggctgaaaaagagcacacacatacaattgtgtgtttaaacccatatatgtgtgagtaactgcctagagaaagggctctcagaacatacatcaaactgggcagtgggtaagagagacgagggtgtgtgtggagggacatatttatattttatttcacatacttctgtgctgcttgactcttttacagtgcaaatggtttaatatattacttgtggaaggagaaggtttatagagagagccacattcccaactgctcctggcaaaagacgaggctgatttcaggacttggagccaccccttctccaaccacccacccccacccagctgagtggttgggtcaggtccatgttgctgagttgtctctgggtgtctgtccttgcgggcaccaggtattctcagcccacaccagaggtcaaacatggaacacccatcatctctgtgtagctttgaccccacgctcccatctacccatctaccccatggcatctcaagtccaagactggctttttaaagtacaagtcctgctgatggtatttcctggccatgctgaaatatgtctcctggaggaggagaataaggtcaaccactgtgacaaacaaaaccaagagtggagggccaatgtgtggattgtgttgatgactgtggctttcatttccccaaggcaaagaaacctcaggaggctgtggtcatggtttctcattttcatgctgaggctttttgggaaatttcagaagttgccacccacaccttgttaggggagggagaggaaacttcctcttcaggatgggctggggattgtgggaagacctttgtgtgagaccaagtgtcatgcagagacagcaagagagagactgggaatcaattccttctccaagggtttaattaaagtgtggggaagtttgcaatcttattcagaagttaacatctgagcatagatttgaaggaggtaagagatgaagccatgtgggtgtcagacagaagcattccagagacagggaacagcagtgcaaaggccctgaggtaggattgtgtctggtttgttggaagaacagaaaggaagcctttgtggtgtggcaggaactaagggagtaggcggtgagcagaagataaggtcagagggaagggagaaaggtggagagtgagaactaccttgacatcttggaaagactttgccttttattctaggtgagttggggaaccactggtggtctgaaagccagagagtacatgatcaggctgacgtttaacagaatgcctctgtctgctgtgttgggaacagactgagcgagtaagggagaaagcaggcaactgcagctgaccaaaagagagacaggagagctgagatattaatggagtgaccagcagcatcagaattaccaggaggcttgggaaaacagattgttgggccccagccctggagctgctacctgttagtatgggcagtgtccaaggaatttacattacaagttcccaggtgatgatactgctggtctgggggccacactttgagaacttgtctttgtagaatttatgaaaacatttgtttatcaaagttctcaaggaagcacattgctcgctcctgtgtccccagtgcctagcgtgatgcctggcacgagtcttcatcgagctcaggctctgggccaggctcagtgctattgaatgaggttcatgagggtcccaggtttgaactgtttggaggtaactggtgatgaaactttcacaggaagtggtcattaaagggaaaggattccttgtaattacaataacaacaggtgtgacacctacccagcgtctgcctagatgttttacttgtatccctctccaattaaatcctgtaaaagccctgggagtcgggcattatcccgggatttttatgaatgagagaaccaaggcttggagagtttaattttcccaagaccacaggattaacaagtaccagaacccagccaggcctgagtgggagctctctgctgtttacatcataggccgcctgaagaagtcactgacaagacctagtaattaaagaacctcgagaagctaggagtttcattctttgaggactgtgagcttttttaaaagtgcaaagaatatgccatcctttaaaaaaatgcttcccatctgaattgagattcctgttcacacaacatgttttgagcctccagcccttcctggcagaaccctggtagcagtggctgtcccaacagaagtatttttgctgacttttgtggcttaaaagccttctctgatggagcacttttcctcccctcttcctcttctcagcctcctccggcaggatgaagggtgtaagattttgtgctgaggcgctgaagcttgacaaattgaggccagcctatctctaaatggaatccgtgtatcttgctagggagggagaaaatcaagttccagcacttccctccttatcagcctctccttttccctacccttccctgaggataaaaataaccgcttcccagggcctcactgcgatggagcaactgtgccccgaagccaggcctagctgtcagagcagctgctccccgaggcacggccccgcgagagccttggggtcaggacgggggcctgtccgcagggacgaggtgtcccaggacagggcaggggcccttggagcctcaccaagagagggggcactggtgcaagtttgaccgcgatggtgggcggctcacaaaaatacatcaggaggcccggaagtccatgcactggctggctccaccgcctttaagtacacgaggtctatctgcagttcttaacctctttgagggcacaaggactccctagaacaaatgatgacataccacctctctgtgtgcaatcaagcatacacacaacacacagaaacatggacgtggacacaaatacgcacggagacacatacacttttgcacacagtttcatattattggaaggctgtcgaagcctggtatggaccacagattaacaaccccaaaggcaggttgattatagtgatgcagaacgattataaaaaaaataacaatttggcagggcgcggtggcttacacctgtaatcccagcactttgggaggccgaggtcagttgatcacgtgaggtcaggagttcgagaccaacccggccaacatggtgaaaccccgtctctactaaaaatacaaaaaaattagtcgggcatggttgcgggcgcctgtaatcccagctactcgggaggctgaggcaggagaatggcttgaacctaggaggcagaggttgcagtgagccgagatcgtgccagtgcactccagcttgggtgacggagcaagacttcgtctcaaaataaataaataaaaatataaaaataaataaaattttgtaacgtaaaaatagggttagtaaagcgtgctaagatctttctggaaaacaaatatatgtagtataaattctaataatagatacggaaacgataaagttgatcaccgatggtaagataaaggatgatttctatttatttgagttttcccactaaacaggaaagcatgctgctttttcgcaaccagaacggccgcatccaggcgtttccggggacctggggcgcccactgagctgcaggcgcggccggtggctccagcctggcccgtccgtcgggaaaggagggttacagacaatagacaagcaaacattagacgcagtgaccgcgtggggcggggaccggctcttgcggagagggtgacccgagcccttcgcccgccgaggcactttaaaaccccagcgcgttgcccaggccggcccgcccagagcgaaaggtgcgtgcgcgctcccggggaggcggcggcgcgcacgggcgcgtcccgcgggcagcccccaactccggacgatgcagcgaggaggcggcggcggcggcgcgctccggaggtctgaagccactgctggctgccacgggccggcggtgcgatgagctgggcagccgcccccggctcggggctgtgagcggctcggggccgggggtgggcggcggtgcggcgggcggccgacgctcctcttcggcggcggcggcggcggccatgcgtgggcggcgcggctggggcggccgggccggagttgcctcccgggggcccgcggctgagggccccgccgccgccgccgctgctgcttctgcttgcgctgttgccgctgctgcccgcgcctggcgctgccgccgcccccgccccgcggcccccggagctgcagtcggcttccgcggggcccagcgtgagtctctacctgagcgaggacgaggtgcgccggctgatcggtgagtggggccgccgaggccggggcgggcaggtcgggccggctggggcagcttccggccgccggcggatcagtctgcgagccgtggacctcgggcgagtaccctccccgccccccgcgcccggattcgcctcgcggcccggtctctgcctgccgtgctggctgggaggtgtggtccctgcccggtccccagctctgggtcagccttcgtgccgccctcgctgccccgccgcgatagacccagattcaccccatcccatcctcctcactgcctccttagcccttctccctagaagagtcagtcacccttacaactttttttccttgctgcacgaagtttttttgacgctttctatgtgtgtcactctagggccctcgattttgaatatctcgaaattcacgttttagactgaacttgcaaaccctttgctgtggttttgatgctccagtagaggccacgctctgtgcttacccttttacaaaaaaaaaaaaaaaaaaaaaaaaaacgagagagaaagaaggggaggttataagggcaccaaatgttcgtggcagcctccaactcttgggacgtagatttggagcatatgcttagattctaagcatatttttagtgaatgaatcgccaggtagcagacctttttagtttcaatacctttttggtttttgcattgggtgtgttgggagtttggactgactctgtacttctg

SEQ ID NO: 9608 - DNA, 6000 bp, Homo sapiens
tgactgactttggcttgagaactccccagtgattatgctgaaccttctttagacaaggacagccttagacaagccagcctagaatgcttccctcaacttttctccgatcttcattgtggcttcacaactgtcccagccatacaaggctttcttcctctttttctgaaatatgcatttccccaataaaaccttgcacagttaatttcatcatagtgtctgcttctcagaggacctgaactttatagcttagatgtgaggggtaagaagaaagaagagttaagaattagcctctggtttctggcttgggcaactgagtgcatggtgattgtcagtcactgagataaggaagaccagggatctccatttaaagagaaaagacatagcaagaggacagagtaggggtgtgtggaaggacaaaaggaaggaaaggcagagaggcctcaggttaggaggacagttccacttgctacaggtttctgttgcagatgaagttactccttccccactgaagcctggtcccagttctgtatatcttaagaacagctctaatttcactcatggctcaaaaacagattctcataaaaacatgtgtaaggggattggacagaagaaacctaccctggggtttctgtcttagcatgggctgctataacaaaataccacagtttgggtggcttaaacaacagacatttattgtagccactttctctctatgttgctcacgtagcctttccatggtgtatatgaagagagagagagagagagagatctatcttccccttcttctcagggacctattctaaacctacttacctccaaaggccctgcctccaaacaccatcacattgtgggttagggcttcaacatatagaggggcacaaacattcaatccataacagtttctttcagccatattggaaagtgctcattctcagacactcaggctttataaagtcctgtgccatgtggacacttagcatagatgaccctaagctgatttctgttccttacaggaaaaaggaactaaactccggcttacagaacttagcaaggtcgcttcaaatagcccctcgctctcagaaaggtgccactcttttctataggcttcttgcagaccctgttcttcagtctttgaaagtggtgtctggggcacaactggtttatagggaacatttattaacttttttccccttatctccctgaccttatcccccacctactcttttatctgcaagtaaatttaacaaagaggggaaactacatgtgtgaacacaataatttccagaacaaacccggaaatcaattattgatagctatgtaaagtgttgcaaacaggggcatgtttgactgctgtggctgagtggagaacaaagagcattatcaccagatacacaaggctagattcatttccctggaaatgcagaacagtttaaaatattgctaagggacaaagagattttactccggtgctaactcattgatttttagtgaaaaatactttttaacaattacttttttcaggatttaatgttgataatgtcagtccttaatgcatgtcaattattttattattcctctatgggtttcctagtgttatgctatggattgttcttagtctgcagtgaaatgcctctgtccagccatctcctctccattcatgtaaacccagcattccagtctttgttccaacttcagaacagtggtgaagggaattggcattgttgataagatatcactttgtgtattggtttttccctgttaataactgaatgctttaacaagtttatcagccccgcttgcttaacaaatatgttaaaacaggaactgtggttccaaaggctccaaagtaaagaggacaaatattgctgggttgaaaatttccttcttgcaataaatctgagttcaaagaagctatagaattaagcattgtgcttttcatgtgaaattcaattcgacaaacatttattgttaaaaaaattattttaacttccccttcttaatacagtgggtcctgtagaaggaggaagtttagtgccaaacactgaactattttcaattgaggttatcagaggtcatccatagggctgaagagttggggaaatgtctcctcttctcctccagttctatggtttttctccctggtctgccctttttttttttttttttaacactagttccaaacatccaagtataatagaaaaacgctgaattcagaggttttgtcttatcctgttaatttatttggggccacatcaattcacatttcctaagttctcatcagtcagcaacaattgcccaggctccatagtctgttggattgaccaagtctggcttacattataatggaggaagcaagaactcttcacacgactcagaaattcctaggaaagtagacaacacctgaatgcatatgtgactgccatcgctgtattcagacacatccattgctcaaagacaagtagttctttgtacatctctactcagatatctacattggggttcctaggggttgcttggctagttggagaaggcctgagattgtgtagtgaagaaatccagaagaattttgagcagagttagtgtcaaggagggtcagggagcagggacatttcttagggaaggtgatatgtaggaaaaggtatggacaagtgacatcctgggttaaggtactgatgtaaaatatggtgccagggttcagggtctcctgaagcccatccttggagcttctagggatctgtaaagtccaggttaagagctgctgctgtgacacctgcctgaacagacagaagttagtgtggtataggccaggaaaggcagaaaggggtgcagaaggaagggaaagtagttctgtttctcaaaccaaagggaatgctgaaggatggatgttgggggccctgagaagttccaggtagagtggctcagatgacaggaggccttctcagaaagacacaggaaggactttgggctatgaacctacagaggctccaagtaccagtgacctggcttctgaacgcatctcatcaactcttatacagggttgaagatttccctcttaaaagttcactggggaccaggcgcggtggctcatgcctgtaatcccagcactttgggaggccaaagtgggcggatcacttgaggtcaggagttcgagaccagcctggccaatatggtgaaaccctgtctctactaaaaatacaaagattatctaggaatggtggcacatgcctgtagtcccagctacttgggaggccaaggaaggagaatcacttgaaccagggaggcagaggttgcagtgagccaagatcacaccacagcactccagcctgtgcaacagagggagactctgtctcaaaaaaaaacaaaaaaaaaaaaaacaaggttagaatagggaatagatttcactcatctgaacaaaacaaaacaacttaatgtttgttatcagggagtacaaataccatccatattgatataattctatttttctcttctattttccttggtagaaagtgacaataacttctttggtttaaagagaactttcattctcacagtgagcctgaggtcggtcattttctgcacttttcaagggagttgaggctctgggcagtttaggggcttgtctagtgccctcagcctgtggtggctggaggcataactccaagctcagtgctacttccatcatgctttctacttggttcttggtcagataggtcctacttttgtgcttgggatttcactgcattgctgatgctcacattcatcctcacctgacaaaggccattaactacatcactgatctctgccttgaccacttgttcaatagttttagccactgggctagcagttgggaggcactaagatatgtgacccacctgaggcccaggaatgtgttatcactcccacagatggggtcctctagttacccctgggcaaggagcaggagcactaatctccactccccttcataggaaagaacaaccaatctgtccaattacagagaactttggaaagatgccaaggcactctgagcccagaattaatgaggtccagagaagaaattcagctccaaaaggaagaggtttgtggagacctacaagctgtttctggggtccttggacacatagaaaaccagaagccatcaatgagtggggcagctttaactcccttcatgtaggacctgctatgttagaatctaaagtctgctcaggagcaggcctacctgctcacactagagcatccagggggaactgtgaatacctgctcatggccaagacaggtgactctcagcagaggatggctccaaagaagattgctaagagctcatttcaggggcggtggagaataggccacaggtgagtgctaacaccttgggaaatgtggggactgccacatcagtggaggacaacaaagctggcttcctgagactgggacgaggcttataccccataagggggaccttggggaaaaaggagccttcctgcagccactgtgactgacactggggaatcacttctcattctagatcactgggcctttggactgcagggctttgttcattgcttatttgtggtgatgggctctctttccttttaatcaaactttgtgcttgcaaaggggagtttgtaccaccttacagggtctctgtccataattttgattcaagctaaactgatcaagtgcaggatatgttggctccaaggttatgccaggatacagttttctccaggtgaaataatccctttataacccccataatagatccacaaacaggcaggattagtgtgtgggtcaccttaaaaatctggtaaacccctcttgttcccaagtggctgtgtttgggagaacttagtaaagggaggagcttcctgggaactttttgtgtttagtctcaatctgccaatgatttacttacccctgtgttgttgagttggaagattgggtggtgatttatcagaaagtgtagcaggaagaacttgtcatttctaagacctcaaatactggttaactgcatttgcagctagaagttaggctctgattcactgttttgtattttctaaaagggttatatgtaatttgaaagatagacctgccaagacgtgagatctgtgttctccttggttagagctaacatttttggtgaggaaagcactgcaggtaacggttcagagcctggactttggtggcaggtggatgcaagttacagtcacagctctgctacttgctaatcgtgtgatcttggcaatttatttaactctttagccttcagtttgcttcctttgttaattttttttcttagttctattagtttttcagttatgttttctgaacctagagatacttttgcctcttttaatattcgtagtagaaattcatttctcttgttttattgcattggttacaattatcagattgtaaccaatgatgtcagtgacaatgacaatggacattcatatcatattcctgatcttaatgggatgtttcaaatgtttcatattaagtatgataattgctatatgttctggtagacattgtttaaaatcagcttaagaaagtttccttgtactttaaaaaaattgtgaatggatcttaaagttagtcacattcttggcatctcttgagccaaaatgatcatatggcttttcttctttagactgttaagataatgcattttatcaatagttttccctattaactaattatttttaatgtcaaatcattttaaaatctaagataaatcctgattggttatgatgcatttttctttctcacatatttcttgtctttttctttttctttttttttaaatttttgtgatgattttcactatgctgcccaagctagtcttgaactcttggactcaggggatcctcctgcctcagcctccctagtagttgggactacaggcatatgccaccatgcctggctgcattttttttttaatattgctggacttgatttcatcatattttatttaggatatttaaaatttaagtttttaaa

SEQ ID NO: 9609 - DNA, 6000 bp, Homo sapiens
ttttacactttcaggtaaacaaaagttagcatcctctgcatctggaattctacatcaaactcccatggagtaaatttaacaaatttaaaatgtttagaaggtagtcacatgaagtgtacagcacattgtggttggtcaatgcttttgcaatcagtccaacatttgcctctaagtgttgggcaaccacaaactccatttttcttggaagacagttcagtggatctccaactcaatttagtctgctgctggctgctacttgactatgtggtcaaaacttttgctttcattcacctcatacagaaatcaggctgataatcttaacatttcctctaacaggaaaagtaactgacatgtgatgatgtatcagtaatggagcatgaagattaccctacttaacattcttaaatggttccccagagcctacaggataaagtccagactcctttaactggctatcatggatcttcagaatctgaatctcatttatctttctaataccatttctcaatcctcccccttcttactctctggcccaggcatgctgaactattcttagctctctggaaaagtcaaatgctctagatatactctcttgacatttacctggctagttcctactcacactacaaaggtccatttagtggcctgcatccatttggagcctatcataattaaatcaagcatgccctaaatgcaggaacagtcaacccacttacagtgagacacctctcacatcaacatttgcctttcttcactaatcgcttggtaaaatagtttatactgatgacctctactttttttatcatccaataatttctaaaccctttgtaaacttgccttccctaccattactcaacttttttgaaggctgatagtgtcctcataatcatttatttcattggcaatagttttggcaaatactaagcctccttaaattctctaaagctatcaagatgctagtcacccagtcacattttccctttcttttccttctgtgacataaagttattctgggtctcttattctgattgttcctacactgactccacttctttttctttcactttttcttctttcctgattctctttctctgattgttccttcattggctccactatcattcactggctccacatcttcctctgattaaagatattcttctgggttcattagattaaaaacatcagcaataggatgcctcccactccctcaattcaacaaacgcatttgtgtatccagttgattctagcttctcagggaaaaaaggagaaattacaatccagtaaaaaaagatgttagtatcattaaatataacttaggttcatatctcaggtctgtcagtcatgagcaatgtggcatgaggtatactacttaatcaatttaagcctctgtttttcatctataaattggagaaaataatgcctatcttttagtattactttatgaattgcagtatgcaaagtacatattccaatggcaggtaggtacatagtgggcatttaataaaaatttttccttattactgttatttccacactcacttccaccaaacttatatagtctgtttcaacttcttttagtgtgtcatacacatcaacaaaagacaaatcatctagagtacagatataaacaggtttcctatctggcccagtaagtcccaactgcttgactcaaagctcaatttctcccgatttaaaaatcttcaggttctagccccaagcttcctcttcaaccttctccctcactgctcttctaaatgaataccattctccaaacaaattggaccttttttggttctcaaacatgccgtatactcttcacctcaaagtccacctcagattctacctcctttatgaaacttatctccctagctggatattttatcttcagagtattttactggtacttctctcagaaggtactcatattctgcctggtattcaattatttgtgcataaataacctttcctgcttataaattgtaacccctttgaagggagaaactaggttcctattcgtgctagtacttaccacttagctaagtgataacacatgtatatttaaaaataataaacaaggctgggtgtggtggctcaagcctgtaatcccagcactttgggaggcaacgcaggcagatcacctggggtcaggagttcaagatcagcctggccaacatggtgaaatcccatctcttctaaaactacaaaaatcagccaggcgtggtggcgtgcacccgtagtcccagctactggggagactgaggcaggggaatcgcttgaacccgggaggtggaggttgcagtgagctgagatggcgccactgcactccagcctgggtgacaatgtgagacaccatctcaagataaataaataaatacaaataaaataaaataataaacaaaaaaccctgactctttctcaacgaattattttcctcaacttcttatgaagaggtaggaatagggtgggaagggaacagtgtatatagggtacttacagaggcactgcaacctgaattcccacttggaattctcccagctgctgcaaaaaggcagggctgaaatagctattatagaaattgactaggtaagactttaagatctgttaatcgattgcagtcaacctcttgggaaaccctttaccaatctgctaagcttgtctatatttcttttcttcccaacggttatttttcctaaccttccagtctcctctaaaccaagtaaacaaaagattttaatttaaacccacagtcgaacgcctagtgaaatacacgtgtatatttaatgttatgtattagttcctatttaagaattttatttctttaaaatttatttcaaccaaaatccaacaccaaattctatgggtaatatcttaaggcagcacctagtatagtgctttgtatatagtacacattcagtatgtaatggttaaaagagtgaatttacagtctacaattgcaggacttaattttggctaattgcagtggaaaacatgagaaaagatatagtccaagtaagaatgacacttgagggttcaggcccgcaacaccagctaggtagacccttaggtggcccagtggtatacaaagatttaagcattcccagctgagccccttgacaatagagatacatcattttattttgtatcacttagtactgtgccaaatccaaaaatactctctcaagtgcaagagtattcaggagttagaaatattgaaagttccactattcaagcaaattaggtatagttcatataattttttcaactcaggatcctcagtcactccatagagtaagcaaagtatgcaattactagaattattagtctcaatttacataagatcacactgctggcactaaactccagttccagactcttttttccactattgaatgccacagaaacataaaaaaaaaaaaaatggaaggatctttagaaaccatgtagctggattttttttaagatgatgaaaactgaggcccatgaagagagtcacattagctcaaggctcctactaaagccaaataatttcgtgcaaaatcatctccctctgattatcattatctacacacacaaatacataatttttctttttgcctttctgaaaatctggaggtctgaaaagactttaagatttctctcaagttaaaaatacacgtttgtacgtgtaaccagagggcaagttttctatggtccacatgttttcttaaaaaaaaaaaaaaaaaggaaatacaggagatgtgcagtgcgtgtgacaggcaaatgttctcgaactttattgtgtagtgtaacccctatggcacaggcccttagaattcagccacattaatgaagagatatttttatgtagtagaaagagcacaaactttgaggtgttttgttttgagacagagtcttgctctgttgcccaggctggagtgcagtggcgcgatctcagctcactgcaacctccacctcctgggttctaagcgattctcctgtcagcctctggaacagcttggattacaggcgcccgccaccacgccaggctaattttgtatttttaatagagacggggtttcaccatgttggccaggctggtctcgaactcctgacctcaggtgatccacccgtttcggcctcccaaagtgctgggattacaggcgtgagccaccgcgcccggcccaactttgaggttttatctgccacttactatgcagtcttggctagaacacttaacttctttgagcccgagtttcctcatcattaaatggagataattcaggtttgatgtgaagatttgagaagaaggtatgtctgacacactgccgaagatcgataaatatttgttgaatgaataacacagccagccgaagctcaacaaaagacacatacacaaacacacccacacggttgggtagttgccgtctcccggggagctccagaagtgtaagctctcagccctccctctgacttcagaagcctgaagctactaagcccgcagcccggtgcgtctcttcgcagccttaatcagtgcccgggcaaaggcctgcagagaattctctgggcctcgcaccaggccccaagaacacactggagactcgtttcgccttctccctcgccgtttcccccctccagggccagagtccgaggaagcccgatagcggttctcggcctccgaaacacaactacaacactggggagcttgccctgcagttagcgtccagcggggattaggcacttcgttttcctcatcgtttcaatctctatcttctggtcggggtccaagctcagcggcaccacgtcacggcccttagtggtctaggccacacccctccttcccgacagcctcaagtccactaccagcggtctggaaggccacgttgcctaggaaactggggcggggcttgggaaacgacggccctgcgcgcagtttgcgcaggcgctccggccctggcctctgactatcgcgagaatcggctcccggaagttccacgtcagtcagtctgacggtcagtggatcggtgggtttatctcaaggcctgagtagccggtaacaaacgagggttcccgggattggaccgacgcagccatggtaggtccagatcccgtagaagggagcggggtcccataggttacggccgattcctggagcttctggactgagggccgcggtaagcagtggtctgggctcccgctgcggccgccgcctcaggccttgcggggtcttggtcgtttgattccaggaagggagaaggcggtggggcctaggggaccggggtgatttggggaggcaaagcctgctagtgaggggttttgtctcccctggcgcttgtggcgcttgccagagctcctgcagtctgcagcgggatcggtggtgtagggaaacacagaagccgaatgtgttgaactccgtaggaggctttggtaaaactaaagtttgcctttaaaacggtggtagttaatctacactcctgttgggcttattctggggatagtgtgtgctggctacaaactataaacaagcaaagaagccaaaaacaaatgtatatggagtcaaaaatggaatttcaaatgctttgatatctcagctgttaggtttctaaggggagaagaagggttgggaggaagggggtgctgtttataacactggctggtgtgcttttatgcatttgcaaatccagtggctggtaagaatagtaattgttagagcactttgttattatcaccgtaaccctaaaaaacgccctagactagtttgcacaagagtgttataataataaggaaagaaaacgatagtataagaatatcttccgtctctattgaaaatgcaaaaaaaaaaaaaagaaattagccgggcgtggtggcgggcccctgtagtcccagctactcaggaggctgaggcaggagaatcgcttgaacccgggaggcagaggctgcagtgagccgaggtcgcaccactgcactccagcctgggacagagcaagactccgtctcaaaaaaaaaaaaaaaaaaacttgt

SEQ ID NO: 9610 - DNA, 6000 bp, Homo sapiens
gaagctgtagaaggggctgaaggcctgggcacttgggcaggtctggtcagaggttggggactgttggcttacagatggtgaccccaaacagcctttccagccatctgagtggcaggaaatggcatccatcttggatctgggagaggggatggaagcaggctggacaaacaagagcaatggactatcgagagtaggtcagcagtttgggtcgcacattcttatcaggtgaagtgttttggttcaccctcgtgtcccaacatattatttatacattatcttcatagactacatattagtgcatcataaaaccttcacagagcatgtgcatggaaaaggatgacatctatttaagcagaagtaatattttattcttccccttcattagtcttgtgaaaccactctagagaccccaggaagaaaataggtgaatttgctgagggaggggagtgtagcattgtcactcccttcataaagccttagaaaaccaaaaaaaaaaaaccccccacccccaaaacaaaaagcatcctcaagtttcccttagcttttcttcaaaacagatgcctgtcagctgggcgcagtggctcacacctgtaatcccagcactttgggaggccaaggtgggcggatcacttgaggtcaggagttcaagaccatcctggccaacatggtaaaaccccgtctctactaaacataaaaaaattagccgggcatggtggcatgcagctgtaattacacttactagggaggctgaggtaggagaattgcttgaacccagggggtggaggttgcagtgagccgagatcataccactgcactccagcctgagtgacagggcaagactccacctctaaaaacaaaaaacaaaaaaacagagagacatgtctgtcacccagtcagtagcaggcaggaacagtgccagataactcagtctcccactgctctctcccagccctctacctggctttctgattgcacttgtcactagaggttgctacagttacacctgataccattagattttccacaattaggaagcttagactatatgacttggtagtgactatatttgacctgtcagatcatggctgttttccatttagggaaaagggaagcactttgtttaaactatatatatatatatatatatatatatatatatttttttttttttttttgagacagagtcttgctctgttgcccaggctgaagtgcactggcacaatcacagctcactgcagcccctgcctccaacgttcaagtgattctcctgccttagcctcccaaatagctgggactacaggtatgcaccaccatgcctggctaatttttgtatttttagtggagacagggtttcgccatgttggccaggctggtcccgtactgctgacctcaagtgatccacctgccttggcctcccaaaatgctgggattacaggcgtgagccatcgtgcccagcctaaactatatattctgagaagagggactgaaccctacagagttctctcttaatacagagtcttgggtacaattaagcactaggtccatagtgctgtgcttttctttcttcctttccttccttcccttccttctttccttcttttttctttcctttctctctctctccttccttccttctctctctccttctttccttttctttctctcctttctttcctttcttcttttctttttatttctttctttagttggttgttttctggctaaaaattagacaagaaaaaattatttcctctaaaaataggtatattattagccaataacacagcatatttttctgctggttttacagatagctaactgcccttactaaacaacatcaaatttgcagtggcatttttacatatacttaatattattcctgtagaaagaaacaaaaacgtgtagttggtctacaagaacattaccaaagcaaaccagactgaaaagagcattcatcccttttgctacagtttcaacacatgacacatgactgcattttgcagccaggacccctcaacacctggatgtacagagcctccactgaactaccaacaccacatttgtggtcttgatttaactttaattgatagaactagctggcatttgcctctaaatgccagcagtggctttccagtgtaacttggtgattcttgtctgtcaaaaactttgcagtcagtcctggttaccttagagatgccttatgtcccaatgcaccttcagggaatggcaccctgctcattgcttctgtttagccaagtccagaggatgtgagcatggttcccactgacaagagacagtttgctggagttaaaacaaactacaaaactcagcctgtgcaggatttgggggccacatttttatatctcaatttaaaaagtaagagaaattaattctatagattggtagcaattaaggaaaagccatattgctgttttactttataagttaggtcagttttgctgtttccttagttcctttttactgagctttgtcaaggtatagcaaggacagctgactgggctctgcaccagtgaactttcatgaacaccactcactccatggcatcaactggttttgtgcctcaagcagggtaggggatgtgtgagaaaggacaaaggcagatatcacaaagactttttcaaagacttaacatgaaacattttttttttactttataaaatactgattttttaaaagaacatattttattagagtcaatctcaccattctttgtcataaagatattttatctaactcaagtttttgcatacccatttacagtcaattccattgttttgcttgaagtgaactttctattatatttttctagattatgtaagcgagctgattatgcaactaagagtgtggtaaatataagaattattataggatcaccatttttacacgtgacagctctggttgtttgtggagtaacaaagggaatatgaaaaaaaaaaaagttcgggcctgccctggattcaagtttatcattcctacacttgattaaaacacctaaatttaatccattttacaaatagccatgggtcctcagtccagatataaaaggaaattagatttcaatttaaaacaagctacaaacagtggaaaaccagaaaacactaaaataagacactggctaaataactacaacaaaatctcacttcttaaaaatccacgcctaaaaaaaaaaatccactagacaggaatgtgtggcagtgcagaaaggcagaagactgaagcgcacgtttgatctaattgtgtaagagcttgctaaatcagttactacttgaaagtatacttcagagagaagactgaaacttctagactgtttctagcatccttaagtaactgcagacacttataatactgaatgatatcctagttataaataattcttatccataacttaaatccatcttgaggctctactaagtaaatcttccttaacctacttagaggatgtgcagtagcgatgaaagtagcctttcttttctttttctttttttttttttttttgagacggagtctcgctctgtcgccaggctggagtacagtggcgcgatctcggctcactgtaacctcctccgcctcctgggttccagcgattctcctgcctcagcctcccgagtagctgggactacaggcgtgcgccaccactcccacataattttttgtatttttagtagagacggggtttcaccgtgttggccaggatggtctcaaatctcttgacctcgtgatctgtgtgctgggagtacaggcgtgagccaccgcgcccggccttaagcccctttctttaaggctcaagggcatattttcacactgcagtgcatcacaaccgttttcattcttccagtgttcctttcttctggtctccagccacctgccaggtacttctgattaattacatataagatttatccaagccaccccctccgtttctaccaactggacttcattctcttcagttcctgctagaatgcacctcctacctgaagtcttccctcatcaatgccctccatgatcagcctttgactctggaatcccttaatatattcctcagatcattagaggttttctgagtcatcatctgagatttttcattaaattgtggagtttgagcagccagtcctgagctgtcggactcagttccaaatagaagtcctagttaaagacacaaaaacaagaagatgggttagctgcggctcgaagagctggtgagcgcgaccacagggcagcttgcggacggttctttcggacaggacaagggcgagggaaacggcagaatggtgacgcacctgagtgcgcccactagacgaaagaagaccaactaagccttcgtgtagtgcgtagacaggccgacacacacacacacacacacacacacacactaacacacacgcaaagacagtgagggagcgagaggcgcatccccaggtagctgacaatgacacggccccgatccggacgcgggcttaaagccccccgacttccggagtgcccccctccccggcgacctccggagattaccgctggcgcatctctccgccctgcccggctccggcgccctcccctccccccgcagccgcagctccccgccccccgcgaacgcggctccccagtgtcctccagaacgcccgcgtggctgtcgggtttcgaaccccagggccgactctagtactcggcgcgcgcgccgccgcgtcgccgaccagcctgcggcccccgcatcaatcattaacggggcggcccgggctgcggcggcccgaggagggggatggtacggaactcgagacaggggacaactctatcccccgaagcggccgcgaaaccctagcctgggaggcccccgcccttcctcggtgcgcccgtccctccctccgcgcctcggctcgcacatccccacctcccgctccgggggcggcggcggcggaggcacccgcaccgcgcgatgcccagtcaccgctgccgcgctgccgccgcagtcagccgcgccgccgccgctgccgcagcgcgggcggccgcgcgccggtagcaggggcttggcgaggaagccgctgagcctcgcgcgctccgcgctcctggcggtcgcagcgctgcctattaattgattctcttattgatttatttaatttttaggagcggctgctcggaggcacgggtcttctcctaaacctgcagcgacgcccccggcgtgggcacaaaggctccgacggcggccggcgggggctgcccagcgcccgggagccggcgccagaggtcgcctgcgcgcgccctagccgagccccgggcaccatgccgcggcgcctgcagccccggggcgcgggcacaaaaggccctccggccccggccccggcagcttcgggggccgcccggaactcccactctgccgcctcccgggaccccccagcgtctgccaagccgctgctgcgctgggacgaggtgcccgacgacttcgtggagtgcttcatcctgtcgggctaccggcgtctgccgtgcacggcccaggagtgcctagcctcggtgctgaagcctaccaacgagacgctcaacttctggacgcacttcatcccgctgctgctgttcctgagcaagttctgccgtctgttcttcctgagcggcggcgacgtgcccttccaccacccgtggctgctaccgttgtggtgctacgcgtcgggagtgctgctgaccttcgccatgagctgcacggcgcacgtgttcagctgcctgtcgctgcgtctgcgcgccgccttcttctacctggactacgcgtccatcagctactacggcttcggcagcacggtggcctactactactacctgttgccaggcctcagcttgctggatgccagagtcatgactccatacttgcagcagcgcctgggctggcacgtggactgcacgcgccttatcgccgcctaccgcgccctggtgctgcctgtggccttcgtgctggcggtggcttgcactgtggcctgctgcaagagccgtaccgactggtgt

SEQ ID NO: 9611 - DNA, 6000 bp, Homo sapiens
ataatttaacacatagtgtcttttagctagtgaggtcagaattattacttggtgagatacagagtagcagttatattctaagaagaatgcaaatttatcaagtggacacttaatgggagatcaaagaaatgaattttctcagctcttatttcagaaattttgtgctaaaacaagttgcagcatggaatagcatgtctccatcttttccttcttggccttggctccagagctcacttcttttcacccatgaagtctttatcttgggttaggagtaggttccagccactgtgatgagcccgcattacctctgccttatgcagaaccagcagagactgaataaaacaagaagcccgtgagtgaattttttttctcatgatgggccctccaagatgtgcaagacagaagaggggacctatagactgaagtttattatttctattgaagaggtgtcctttctaaaagaaaagagatgatgtgctgtggacagaaagctgaggacaaaagcaggggattgcaggaaacagggtgaagagggcctgagttgggaatcaagggatttgcatctgggaccctccttattccccaggcttcagctgtaagattgtcccccctttgatgacatagggatgacatgactggatcacaggcattgtgtcagatttgcttcaacctggctgtatacagttttgggactcttcaatgaaaaaaatacctaaataacatccagtacgcattgggtgggccaaggccagccaaatagcctctagtgcaggtggaagaagattccccttttctctggtcgtcactgagtgatggacttctgagcatcaagaatcaacacagagataacagttcacagagggaaacagtgaggtctgcacccatttttccctcctcagagaatggctggaatgcacttgttgggtagaagaaggaaaggatcccctatccatgccacacacatttctacacttgcattgttaataaaatgattcaaattctctaatttaactcgttttcagtgatttttaatctcaccttcccactataatgaagagcagtggaaagaacatggagttggggtcacatcctgggttcatggccctggatcccacagaccagactttgtaaaggctgaaggaaagaaaccaagcattgaacagtgaatttggggtgggcttaatattgtccaagtgtttactatgggatttaattacccgtgaaatttttgaactttcatttctctatggaaatatactaatgggaggggtccatattattcaaatttaggggcaacttatgctaacatgtgacttttttcaggtggggacagctaagataggtctatggtgagcttgaaaataggataggggatgaattttgggatgaggacatcgtgtggctttcaagcaaacttaattacagtcctgtcctggcccatttcagaagcttggagtagggtggggcaaaatatgaaacttccatttcactggtctcagagagggataaatagcaagggaaaggccacatgaatgagacggtggaattttcctataacccagggcctgtgttgtctgaagtattctctgttaacactaggggctgagagagaactaagactgggcattgtggagctccagggagatggagaggggacttctcagtatgtctccctacccaaagcaaacttagcttctcgacaccctgaccccacaatcttcaatgacctcttacaagaatgaggagctctcaagtgattggttagattctgtaaagctgattggatcccattcactaatgggtgagattaccgcaccatgcaaagttacactggcctgggaggttccactcttcagttctttctttcattgtggctggatgggcaagctgagacagggcacactgactgcaacaggctgggccatcctgttctttctctttgctgcttctcacttgcgtgtcgcatcttgcagtagccagcaggtattaatattgagatttagggacagtcaagaattcctctttggtccttgtgcctaagttttgagtccatcccaattttatctgagaacctggaactaatgatcctggttaccaggtcacaaaacagcatgtaatttttaactgatattgtttcttgtgtgaatatctccttcaggaatctcatgaaaaatagtgattactgacagtacaggatttgagaatttgaggaactttggctgttagagtgaccaagtttgcttgtttgtctgtgagtgagggggtttcctgggacacacaactttcagtagtaaaccaggaaagtccctgataagctaggatgagttgatcaccctggctgaaaagccatctaaaggccaatacaccccacatgcaatttaactcctactggctgtgtgaccttggctatgttgccaaatctccctgagccttaaattactcaccaggagaagggtgagtattttctgcacattaaattagactaagttaaattccttggcatattttctggtccatagtagactctctattgttacatgtttccattttattttctcacttacgttggtacagcaaaataaaaaatgatattctaaaaagaaaacacaaaataggaagaattgaattccttttctggatggaggaattggagatgtttcctgagccccttttcttcaagcttttccccccaatgtgaagcagcatcaggaatgaacaatggaatagtgaatgtactccattcctggaataaagcaggggtcatacattcaaacatctgcaggggccacacggggaccatgaatgaaagaagagggatgaatggacttgtggcaagctggttgcaaatgcagcaggcaaccactcagccccaacagattgtggccatgtaagaagggcccagtgtgccagatcttacaagtttttcttgcaaaaagccatatgattttttaaatgttaaatatactgatttgaatgtgttgacatcaaacctaaaactttttaaaaagacgtgtaagccaatcaaaacattctatgggccattaatcttttgtcaagttgcttcattggttaaaagagtgaaactggatgtcacggatcaaccagagaatgtttattctactcagatggaataattgtgataaaagaaaaccaaagtaattcaataatgacaaaaaacaaaaggacaggaagtttctgaatttgtgttatcttgtatatctgacaactcgactgaacctgtggagttgcaaaatcataaaggtagaacctgctagcaaagctccatgaaatgcttgcaagcattagctgataggtttcaaaacagtatgaatattagtcatcacagatattcctgccaaaaagggtagcgtgtcagaagaacatctgcagcacacataaataccctctgctaagttaaactcagagaggaaataagcttccaaagttgcacaaagcaaagatgctgaaacagcagagctttgtattaaggggttgatagacttgctctcatggtgaaactgtttgttgaggaggtagttagctcccaataatattacatgcttgacctttagcttttagtgacaaaaattgtttcaggacgcatttgggctcagcctactcaataagaaatcacattgtataaattgagcattaattgtgtcaaaatggggatcataagtgattaatactcccaaattacaatgatatggtaaaatgaaaaaaaaaatcagctaaccccaggatatacccaaatgtgttataggatcaagtgttaaaagcaagcaggtcataatatttgctaagaaaaaagaaagaaaaggaaaaaaaagctgcagaacccatggtattatcttgaactattttaaagtagaaaaatatgaaatcagacaggagcaacctgccacatggaagatgatctgaagaatcatcactcttatgatcagaatcctgtgaatacagagctttcatttctggtggcagaaccatttctcagtgagcaacattgttttgccataggacagaggaggttgtgatctattgcagatttctgtgggtcctggatgccgagaccaggaaccctacaaagagaaatccatgcatgtggcgttgctgaggatggctgcgtgagtttctctttcgaagtaatgtgttttgttttttttcttttttgtctcaacgtatccaaacagtacagttgtagagatggggatggaattttatttgtcttttgctttcattgttttctcttgttaaaagaaaaacaattgatttagagtttaaaggctgctctgcaactatcaattatataaagccaaatagagtcatatactaaatcctttcttgcttctcaactaaaaaaaaaaaaaaaaaatcctgtgaaatcactttaggtttgcttaaccaatgtacagtcatgatttgagagcataagaaaccctataagaaaccctatgccttaagtgaatcccattgtgagatacttgagctatgaggcggaagtttcaggctaagcagtgtaatatcttttcaggaggctaatatgctgatccatttagagcacagaggctgattgataactgtgctatcaatccccatcactttggcaggtcttggttagagaggaaagatcttgcatttaggtgaagttgagtcaggaattggctttttgaacttagaaaacgttgctagtgtaaggctaccttttttattattaatctacagttcatatttatgcagcttaagaagacttatttggaataataagaccgtgattcaagatcttagcatcattgcttgcagatttgtccagtatgaaagatattttcatgagatgaatcacttaaagacattaagagtcagtgatgaaaccacacactctcgagtttgaaaagagacagggctgctttaagagagaaacaggaagttgtaactagaagccatctgaatactaagccagggcagaatgcttgtgaagtagcaactaaagtggcagtgtttcttctgaaattctcaggcagtcagactgtcttaggcaaatcttgataaaatagcctttatccaggtttttatctaaggaatcccaagaagactggggaatggagagacagtcaagggttatgtcagaaaaggatgagtatcagtttcaacatcagggagcggtggagctgcttgtcttcaattttttgctcatccttaccattttgacaatctggttatttaaaaatcatcgattccgcttcttgcatgaaactggaggagcaatggtgtatggtgagtgcataaattgtgagattgatgtgaaacttgttgcttgagcgtaattagagacttgtgctcagatagcaaagtaccgaaactggagaaaatgtgctgattgaaatgtcattagtttgatgaaaggtgctgcagcgtaacgaatgctaatctctttacagacaagccgccgaaatttgccatgtcacgagagcaaatgtcacagtcatgttctcacacggcacataatgcaagtctgttgacagatgcgggtccattgtcatgtggggagtcgagggcgagctgtttgtttttgtaatgatgttgggaagtgatggctctgcagtcacaaagagcagccttctctcactggctgcaccgatgaacattacgaagttctagaaaaaacatcacttcaaaatgcctggagtaattcctcttatatcaactaatttcaagaagaaaacttgcagaaactaaccccacccctcttaagagaatattgtgtccaagtcctttttatttatacgaacagtgtcttattttcttataataaaaagttataaataaacgagagtttctttatgcagtactttttacttcttagcctgatttcagatgttctaatttataatgatcattgctagtgttatttgttatgtatctcctatttatgtattggaggccaaggtgtggaaaaatatttaacacctgcagtattgctctttctgggcaacttaccgtatc

SEQ ID NO: 9612 - DNA, 6000 bp, Homo sapiens
tgacatctgcagcagagacctgatttagaatgaagagtcacagcacaaaagttctgcttcatggtattctctaagccctcatctccagtttatatcttatattcactgtagtttctactcccatctaagttctgatcttaaacttgtgtttcccaatgctataatcaatgacctctctgaggcttcctcctattccccagtctctcttctgtaatacttttcctatttatctgactttaacagtctcctttgctgatttcttttttcctctttcctcaaaagggtccgccctctctgagtttcagctcttggatgtctggtggtttttctttgtcctctaattcatttaacatcccccttcctctgtacctccagggttattccgcgaattcccaaagctttacttcttattcactccacaaatattcattgaataaatattcgttgactcctttttctctcctacgcccacattcagacatcaaattttgttgactctacattcaaatctatctggaaattgaccttcatttactgctactgacttgcttaaagcctccgtcatctctctcctggaccactgcattagctttcaagttggtctacaggtctacagactttctgttttatttctccactcactctcccttatcttcctctaatgtggcagctgtggactctgtgatcctttttaaatcctacttcagatcatgtcactgctctgcttagaaccatccaaatggcttttcaattcatccagggtaaaggacaaagctgttactaggttctacccttatcacactgtctgtttatctgcttgcctccgccctgcttgttaccttctcaggcttcatctcctactattcttatgcacagtcactgaacattcaattgccctcttgcttcctcacaacactccaggtatttctggtctcacagtccttgcacttcctgtttcttctgcctggaacacaggtcccctgtacatcctggccccctctttttctcaccactttcaggtctttgctcaagaatcgtcttctcagtggggctttcccaggatcccttactaaggttttggtatacctcccctccttattggtccttcccagttacctttcctgatttactttctctctaccacttattaccttatatgtttatctctgtttcacctgaaactaaagcacagtagatttttgttttttctgtcactaataaatttgtttttaccaatatctatctagaacaatgcctgagatatagtagtcatggaatattttttgaatgaatcaatgaataaacaaatgtgctactatggtacttactctttgatgatgaaaaataattgaatcctgaccttaacagacacactgtctaataataattctaagaaaagaccctgtcacaaatgagagaggtttgcttcagaagttagaaatcatggaacagggacatctaaacccatcctgaggtagggtaagttaccccagttgggcttcctgtaggaggtggcacttgagcttgacagacattagcccaatgaaggaaggaggacaggttttgtcatcctttttttttttagatatagggataacatgaacaaaggtatggttgctgagcaaatgctgcttctctcatttctcctcaaatttccttaccatttctgagcatgtcaccctgacttcttatgatcaagagttacatcatcagagtggctgctaccatagcaggttgggaatgcctgggaattaatgagtgtccctcagcccttaagtcaatgactgataggtgttgggaatatatatcccagttctctgacccattgaccaggatatttttgagtgatatatagtacatcaattttgtgggattaagctcccattacccactgtggttgatttaattggatattttccctttcctgtgtcattttagcttcacctatctggttttctcaaaactctccacaaaccgctagtcactgaatttgggctcatgcttgggcttcagaggaacccaaatgattcctacctaaactttagagaattaaagtgacaaagtatttggtctgctttaggagataataaagcaaactacgttggttgggtttagtttggcatgaaggaatctgaatactaggttagggaatgtggattgtttccaaatctgttatgaaatctgtttggggatgaagcaatcaaaaggatatctgagtatgattaatctagttgtggtatatagtggtattacactggtggtagggaaagtctacaggaaatggcataggatacactcaagagtgcattagttagtgaggtagcagtgagaatggaaaggaatagatgaagagagaacatgaagggaaaaaatgacaagatttggagtccggctctgtgagttggcgggtgtgggggatggaaagagagaagtaaaaatgtctgaggccatatgagttagagagcagtagtatcaacagagatgagggagccgagtgggatctggatttgatgagttaaaagacatatcaggccgggcttggtggctcacgcctgtaatcccaacactttgggaggccgaggcgggcggatcacgaggtcaggagatcgagaccatcctggctaacacggtgaaaccccgtttcgactaaaaatacaaaaaaaaaaaaaaaaaattagccgggcctggtggcgagcgcctgtagtcccagctactcaggaggctgaggcaggagaatggtgtgaacccgggaggcggagggagcttgcagtgaggggatatcgcaccaccgcactctagcctaggcaaaagagcgagactgtctcaaaaaaaaaaaaaaaagacatatcgagtttttgccaatggaacatccaagtagaaatgttcagcagatggctggaaatgtaagaaagcaggaaggatttggtttgagaattggggctctttcagactgttagaaatgtctaggtatttgaaaatcccaacacttgctttatacgagtctcacagcacagatgttgtgactcttaacagagaaggaagaatgtcaaaataacctgaaattattagtggacttttggagtttaaacacacacacacacctgtgatgcagagaagccggtaagcattcatgaggggaacgggggtttgggagggcaggaagccaggttgtagctctccaagttcttaaagatactggagaaccaaggaagcaagaagtcaagttcaaggagtttggcaattgcaggtttggctttctggagacagatctggccaaaacaccagccattcctagcagagtccttggactcagaggactgatgctgtttgctttgtgcctagttttatgaagctgtacttgccacacatgaaaggctgttattaaggaatccatcttttagctttttttttccccttcagactaaataaaccttatttcattcttctcacaggtcatagtttccacttctttaattatttgttactcttctcagaactttctccagttttcctcttcttttaaaaaactgagaccaaaccttcaaaacagagtaataactggcttagttctgggcacaggaaatgattctttctaaaatgtcacatcccaggcaagatttctttgcagggttttccacctgtttttaatgctatcaagatgaaagcattaagttcatgttatcttgatatgttaattttagacaaaacgtgatcataatggaacacatttttccataattttctgtcttaatttcaaaggcccagagttataacgggtgttgtctcgattctgtttttttctaatttcacgaaaatttaggcaggagattccagaatggtagcagtttggttctctttctcctataaaatagcttatgtcattaaatgtatgaggcaaaactgtcaagcttttttcttaattgtgcttttgctcccactcattccaacaagttaaacccttggctagttaaaatgtgagaacagaaaaaagggaattttcttagacatcagtcaaaagtggaagcagtgggggccaaggctcagagatctcgacctctccgaccacgtctttgggagtaattttccatgcggactggagcacgatcttgtaagcacagccccggcattacacacgttgggctccgattccgcaggatttacaagcctcattactggaaagagtctaaggctctcttggcacaagcggcggagcaagaaatgttcactggacaataaaactttcggtttacggagtaaaataaaatcacggccttccttttacagggtgatgaacctgcccctgaattaatgaggggcgatccatttccatggcttaagagtctggcgaggtcccagtcagccaagattgccgcagatttgcagtcacttcagactgggtggagtatccaagtccatagaagagcaaattctcacccttcgaggctgctgtggaagctaccggggctgggacagcagagaggaacccagacgggaacaccgccctcccgccagactcccggcggctcctcctccctctcccaaacccactcccaaagctaagtgcaggcttccccgttccagccagaagcgctgcgtgagcctccacacgtagccgcaggcagctccttaaatagcgtccgcgctgagcaaacagtccagacgtggggcccaggagggcgagctgaggcgaccgcaccgggcgcgcagcggcggcgggtcagccggcggccaatagccagggcgcggcccgccccgtcgcctcccctcggggagcctataaggcctccgcagcgccccgggcgcctgctgctccgtgcctccaccgacgacctcactcagctgcgttacgcgccgctccggctgccggccgcgcgccttgcccgccggctcccgcccgcaatcggcggctcagggcggacccgggtctctgcgttctcgcgagaagcgcggcgctgcggggccgtgggcgcctgagcccgcgcggccctcgagggccgaatatggggggatgcacggtgaagcctcagctgctgctcctggcgctcgtcctccacccctggaatccctgtctgggtgcggactcggagaagccctcgagcatccccacaggtgagcaccccgcggtccgccgctgtcccgcgaggctcggccggcgggggggcagttcattcatccaccagcccttccgcggggctggccaggtgagtagtgggggcctgtccctcctctccaggaccgccggggtcttccccagaattgcggtcgggcggcgctggtccctggggaagtgtaggggcacccgccctcgttgactccttggagttctcggtgaactcagcgtgcccgaatttccctgcagaacaagttggagtttccttttggacttgcaggtcatgggcaccaacacctttcctgcagctctcctttcccctcctttccgagagttggcatggatttatccttgatggacgaggcagtactccttctgtgacctaaacacggggcttagtgtactttctaattgatggtgacacattccttccagcaccccaggaagcagccggtaacacctccctcttgccaaaaacaacgctcgctcgaaaaccttagttgttttcagtaaggctgcctggctacccagtacctccaggcggcagctttcttcctttgggatctgaaggggaagctgtggacacacagctgctccccttacctacccttttcttgagcccggtgctgtctctcgttttcagaagctgtgtaaaacaaaacgttttatatttagccagattaaagagagtttcaccacgtctgtctaaacatgctttgctgccttttgtggcacatgaaaaatccttggagttttccacatttgtgctctttgtgctcaactctctgaaattagatcttgcatttaaatgaccttctaatgtcctttttgttttgttttgttttttgttaagtcatcttggcaccattttttcccccaagtttataata

SEQ ID NO: 9613 - DNA, 6000 bp, Homo sapiens
ctcctcctttgccttcttccatgagtaagaactccctgagtcctccccagaagcagaccagatttaggtgcttcctgtataagctgcagaactgcgagccaactaaatcactattcttttaaattacccagcctcaggtatttttttgtggtgatgcaaaaatgtcttaattcaactagtgaagaagggaattacaatgactgagtgagacccacgcttatagacactttccctgtgggtactcccagttctcagatgtaacgtagctagaactcaagtaggatgcatcagaattactgagttgtgatatcggtgtagagatttcaggctaccagggtgcttataaatgaagagtaatcccagaaagtagggagacacagagacaataatattaatacctgccaattaaaagtcctcaaatccttgactgaccgtggaactgtgtgtctattggggacgctccaatgatgccagcagaaaggagaaggcagcagctgaaaggactggacagagatttcaattgctgtatacagcaaatgaaatactgtttggaatctgagtaacacaaaggatagaggagcctagtaaaatcttcaggtattcaatagtcatgccttaaagtataaaccaatggctccggatgttaaaggtgatcagccctcaaatgcctgccagagaatgctttctccttagaggaagaagacataactcagatatattatttgcaatgccctgtgcataataaaaaagtaatatccattgtaagaaaaagaaaatcatgactcatcatccaaaaaaaaaaaaaaaaaaaaaaccagcccatagaaatacatgacaaggtgaaatacatgttgatataaagtagtaaaacagtatgttagggtgttcttgcattgctataaaggaatacttgagactgagtaatttataaagaaaagaggtttaattggttctgcaggctgtacaggaagcacttgagactgggtaatttataaagaaaagaggtttaattggctctgcaggctgtacaggtttaaatggttctgcaggctgcacaggaagcacagtgataccatctgcctctagtgaggcatcaagaagcttacaatcacggcagaaagcaaacggggagcaggtgtattaatggcaagagctggagtgagacagagaggggagaggacacactcttttaaataaccagatctcacaggaactaccagagcaagaacacactcatcactaaggcaatggcactaagccattcacaggagattctcccttataatccaaacacctcccaacaggccacctttaacactggggattacatttcaacatgaaatttgggagggacacagatccaaaccttatcaaacagttattataagttaaaaagttaagaaaatgatggtcttagtgaatgaacagatgtgaaatctcatcaaaagacatggaagctgcacaaatgaaccaaatagaaatactagcactgaaaagtgttaatactgtaatggacttaacagtagattgaaataagggtcagcatatttttgagacggatccatagaaattatttaacttaaagagaaaaaaatcaaaaaaatgtaaataaagtcttggtgagctgtgagtcagtatcatatggtccaacatacaattaattgaactgaatttccagaaggagaagagagagaaatgggtatggtgcagtaaagaaataatgactgcaagtttttcaaattttgtgaataatatctacttatgtatctgtgaaactcagaaaaccacagtagaatacagaaagaagcatacatcatagactaactgcagaaaaaccaatgataaaaagttattcttaaaaccaacaatatgcattctgtcagataaaaatggaggtcaaaattgttggggaataaaataaaaaaaatctgtacacccagaattctataaccagtaaaaatatcattacaaaattcatacaaaataaaaacatttttagatttaaaaatctaaaaagattttgtctgtagctgttctgcactacaagaaatactaaagggactaggtatagtggctcacacctgtatcccagcactttggtaggtcaaggcaggcagactgcttgaatccaggagttttagaccagtccatgtaacaaagccaaatcttgtctcccccctccaaaaaaaaaaaaaaaaattagctgggcatggtggcatgtgcctgtaatctcagctacttgggacgctgaggtggaagaatcacctgagcccaggaggtcgaggccgcagtgggctgaggttgtgccactgtactccagcctaggcaaccagagtgagacactgtctcaaaaataacaagaactactataggaaagtctctagcctgaaggtaagtgataataggtgaaattaagatctataagaaaaaaaacgaggagcacaggaaattgtgtatatgtggaaatatagaaaagctattttcttcttttaatttctgtaaaagacaatgcactagttaagcaaaacttaaaacattttgttgtgtaaagtctataattaatgggtatgtaaaatctgatagcatttgcacatacaattgaggaactgtaaagtaattataaatttcttaactttatgtgaagtggtacattattaactctaagtagactgtggtaacctaagaacaaccagtgaaaaggaaataacacgaagaaatacacttggagcaacagagcaactaaaatgggattagtataaaaagtagttaatttgtcatccctcgaaatgtccaggttggaaagtcatcagatcaggaaatttcagaaaaacaggaaattgagttcttcttcttcccctcgaaagttgtgatttggggtatatgacatacttgattttattttaatccctcaaagcaatatgtttcacaagacatgttttgctcttgaaatttttggtatcttcacgtggccactgtggatgtttacattcataagctcaattacttggcctctttcataaattttaaacaaaggtaacatgccgagaccagctcagtcggggagaccctaacccagcggcgctagaggaattaaagacacacacacagaaatatagaggtgtcaagtgggaaatcaggggtgtcatagccttcagagctgacacccccgaacagagatttacccacgtattaacagcaaaccagtcattagcattgtttctatagatgttaaattaactaaaagtatcccttaagggaaacgaagggatgggccggattaactgcagcaggaacacgcccttaagacacagaccgctcatgctcattgtttgtggcttaacaatgcctttaagcggttttcgccctgagcgggccaggtgttcctcaccctcactcccgtaaacccacaaccttccagcttgggcattagggccattatgaacatgttacagtgctgcagagattttgtttatggccagtcttggggccagtttatggccagattttggggggcttgctcccaacagtaacatatgctattataatttagtttcaccaccagtttctttgttttatgctttcagtaaaacactatgtctgcatctgagaaatgttctgtgcaattattactgagaagaacagtatgaattttttaatctattctcacatgaatattaacaaataacacacatacaaagaaaaatataaaattctagaactccactcccacatcccttcccctttccaaccttctcccacaatggggttctgccaagtactcctcagagcttaatcaagcttacttctgtccagttctgattctttataaggtcagaggaccttcagttctcccacttcctgtcagtgtattgtgcttctctccaagcaccaccacagaactgaatcccattggtctgaaagaaatatttgtgcctaacagtaataagcaaatggcatttttctcccaatgtcagaaaacatgggcaacctgctccctttcccctttattggcgtctctcccgccttccctccaagatcaaattggcctcccccaattctgtggaaaagaaaacagaatttctgggccctatgcccaagtgtttccagccagcacggcattgccaaggctaaatcaccaagccaaggacctgggggtgggcgcaaatgcaaatcaaaaaggctcttgaggccgggtgcagtggctcacgcctgtaatcccagcacttttggaggccgaggcgggcggatcacgaggtcaggagatcgaaaccatcctggctaacacggtgaaaccccgtctctagtaaaaaatacaaaaaattagccgggcgtggtggcgggcgcctgtagtcccagctgctagggaggctgaggcaggagaatggcctgaacctgggaggcggagcttgcagtgagccgagatcgcgccactgcactccagcctgggcgacagagtgagactccgtatcaaaaataaaaataaaaaaataaaaaaggctcttgagaaagaggggtttcttcattttctctctaggcgcagtaatctatgaacaaagctccctttcccaggccctgcaacctgcccctctgattggaagtgaccgtgggctggcttttatcttttctttcacctcttattagagtagtgacaacttattttcttcatttcttcctccccctcggcttttaggtttcagcggacttcagggtgccccacctcttccaggaagacgctcccccgggctggcggctctcccagcgcggggcggggtccgagacggggaagccgcgcgcggggaaggagggtccaggcgtgccggacccgcccccagaacccgcgcctagccctcccttccgcgcgcttactttgtttataacttgaaaaatcctctccgtctcccttccctgcctcctttcctttccctttcctctgccagtacaactagacccggcgtctggcgtccccggtgcccagcattctgcggggcaggcggtgagtggggctggacaggcgggcgcagagcaggacagggtggcgcgggcgcccgggctgcggggccgagggcgtcgtcaggggaggcccgaggccgcggtgcctgcgggcaggcgcggaggttgcgcggcgtcctgcgctagcagttcccggacactgcgctcgcgtcgcatcctcaggtggttgcagaagttccgtggtgtcgggcgcgcgtctgcactgcagacgcagagggtttgggagcgagcagtttcctgcccagggatgggggtcctggctgcacttcacgggggcggccctttcgtttcgctctgcgtgacaggtctcgcttgattgggtttctcatgggtctctggcgtttctacggcgcggctctcacggactcaggccaggccactcgcaggtaaaaacgctatttatagtaactttttaattgctcagcgagtggaggcggtgacaggagagaatccctctctcttatttccaattctggcaaactggggcgatttggggctgtgcttgatttgtttttaaaaacgttcatatttaaagacttaggattttattttgtggccttatcttctcttaggatctacaatttagtttttaattttatactgcatttagaatggagccaccaaaataagtacttgtgaagatataatgcaccaaacttgatactgcttaaaggggaatagattgcctaatttaaattgcattctcctgtaatagtaatagaacacaacctccatctgtctatctgctctcatggatagctgtgaaatactagcagcatttccattaaatttgaaaaagacaagaatgctaatcattacactctgtgacatggttgtgaattctatgggcgagtgacaacaggtaggggaacatattatcactttatgcatgatgtgagtgtataccttaatgtccataggaaacactgaaatttgatgggaagcataagtgaatttatcaaagtttccaattgcatcatacttaattta

SEQ ID NO: 9614 - DNA, 6000 bp, Homo sapiens
aaggcttcctggatgacctccttcaggccccttcctggcccctgctcaccttggtaaaggtccgggaaaaaaataaaataatgaataaacagaaaagttttctggcttccaggcacatgattctgtatgtatatgagcttttgagattttcttttaatgaacggtattttcttttaacaaagtataattagaaagaatataaaggtatgtaatatggaatttttaataactattagtgacatagtaatagtaaataatgtaaggaagaggagggccaatcaaaacactaatgagcaagcttgtattttgtaactgagtttttcttacatatagatgtgcataatttaaaatgcaagataacatgtgaaagatttatttgaacttccgtctgtggtaaaactggcagtgaagaactcatatccagggacataatactccaattttaccatagatggtgatttttttgtgcccagtatttagtctttcttgcttttttttttttttttttttgagatggaatttcactcttgttgcccagactgaagtgcaatggcgcgatcttggcccaccccaacctccatcttccgggttcaagcgattctcctgcctcagcctcccgagtagctgggattgcaggcatgcacccccatgtctggctaattttgtattttcagtagagacagggtttctccatgttggtcaggctagtctctaactccccacctcaggtgatccacccgccccggcctcccaaagtgctgggatgacaggtgtgagccactgcgcccagctattatttcttttataaatgtgagagggaactagtatttgaactttgaaaaactgggtgattcaagctattgtctgatttaaactcacctgattttattacattttcttatcttgctgaaaatataggtgttttattgaagcaattacattcttaagagaaggaatttattcttttcactgttaatgtatacaatgtctcagaacataaaataatctaggtgtttccatgtggccaaattgtaaaacaatatgttctaggattctgccaagtgacagtgttcccacatctcccatataggattctgccaagtgatcagacagtgttcccacatctcccattcaagatcacaggatatcagctttaaagaaacagaactctgaagcccaattaatctaaaaggtggtccatttttgttagtttcttggtttcgggcactgttctgttttattgtacaggtcacaaagttcatgtgaagtctgtaactgatccagctttcccagttgaaaaaataagtacccagttcacctccttgcctctaaatggcattttgaaaattattaatcaaactactcttctaataatagattgatttcatccatctgtagcaaaagtaagtgctggataattaaattcaattatattatcaaccataagaaataagtaaatcattgttgcttctgaaatccaaatatgacaaggatttgatttcaggcacctgaactttgtagctcagtcaatttgaacaaaaacaataatggttatctaagctttggttttcttacctctaaaattaggataataacctcttcattttaaagtttgtattaggataaagtaaacatgttctactattattcttatttttattattaatgcaccattaattttcaattctacttagatgacattctgctgcaaaccattttttattaatttcatatgatgtaggtagtaatctaactgattaattttttaaaagaatgattgtctattcatccttggtattggatatatctaatctagcattttccttctgaggaattaagtgctttcttcaacactggtgtatgtttgtgacgtaatttcaggtcttgatatgtaaagaaaagtatgtatttgtgtgtgtatctacttacttaacagacgcatacttcagtttgttttccaattttagatttccaaattttagttttgtctaaacttgtaaacttataattttaattcagcatatccatatatcaaaatatgatcacttcctttagaattcaaataagagtgtgtgagaatagatgcactaccggggaattttattaccagaagaaaccctccagtataatttataaatacaaaaactgaggttttaatgttactaagttaatgttaaagctcattattattactccttaaagattctgggtttcgaggtgtctatattacctcatgagtttggtaaaaacagagaacattgaatcagtgactgaaaaaggaggaaattcagttccgggtaaagaaggttttgaggcactattctctttcaaaaatctcaatatactagatgttgcagtgagacactgttgtttccatgttttgtttcatcacttttatgtcagtgttctgtaacctattgtgtccagaattggtgggttcttggtctcactgacttcaagaatgaaaccacagaccctcgcagtgagtgttaccgttcttaaaggcggcattgtctggtgttcgttccttttgatgttcagatgtgttcggagtttcttccttctggtgggttcgtggtctccctggctcaggagtgaagctgcaaacctttgtggtgttacagctcttagggcagggcgtctttagctgttccttcctcccagtgggttcgtagtctagctggcttcaggagtgaagctgcagacctttgcggtgagtgttacagctcataaatgcagtatggacccaagaagtaaacagcagcaagatttattgcaaagagcaaaagaacaaagcttccacactgtggaacaggacccaaaccgcttaccactaccagttccggcagcctgcttttattctcttatctggccccacccacatcctcctgattggtccattttacagagagcctattggtctgttttagagagagctgattggtccattttgacagggtgctgattggtgcgtttacaatccctgagctagacacaaaagttctccacgtccccactggattagctagatacagagtgctgattggtgtatttacaaaccctgagctagacacagagtgccgattggtgcatttacaaaccttgagctagatacagagtgctgattggtgtatttacaatcccttagctagatataaaggttgtccaagtccccactagactcaggagcccagctggcttcacccagtggatcctgcaagggccgcaggtggagctgcctgccagtctggcgccttgcgcttgcactccccagtccttgagcagttgatgggactgggctccgtggagtagggggctgtgctcgggtgcactgcgcaggagcccacggcagagcggggaggctcaggcatggcgggatgcaggtcctgagccctgccccacggggaggcagctaaggcccagagagaaatcgagcacagccctggtgggccagcactgctgggggacccagtgcaccctccacagctgctggcctgggtgctaagcccgtcactgcccggggccggcagggccggccagctgctccgagtgcgggcctgccgagccgacgcccacccagaacttgggctggcctgcaagcgctgcttgcagccctggctcctgcccgtgcctctccctccacacctccctgcaagcacagggagccggctccggcctcggccagcccagaaaggggctcccacagtgcagcagtgggctgaagggctcctcaagtgtggccagagtgggcaccgaggctgaggaggcgccaagagtgagcgagggctgccagaacgctgtcacctctcactatgatctaggttagtggatccaagagggcccagttctgggaggctaagttgctccttactggcccagataaaggggaggttttcaacatgctaatctggctgagggcttatgagactatttgcttgtgacccatttagcctctcttgtcttctccatggggaagttacacaatttattttggacaggccaagctcatctttcataaagtggcagcctttatcctgtattgtttccactgattaatgccagtaggttcttatctgtcttgaccagatgctgctgtgaggtgctaaacctgtgcccttattcacaggaaatgcaaccccgcccccaccaccaccctgggattcattgacatcatagtcagtggaagaagtaacttcatgcccatgtaccttcacaagagtccaaatcccttcactttgttcagagaggattacagacacccaaggctgttgtgttgtccatagctaagcttggcaaatgggcccacacaagagagtcacttaccatagtatccttaacattctgcttctagatcctgtaattgaaatgtgtatccaggttgtttcatctctcatacattgtgaatacttttcctttctgttctgagataccaaagagatacttttcctcttactcaaatcctactacaaaacataatgttctaatttacattccacttaggctttctctctttttatatgactgagaagatctcccaataacagtgtgctcttgcacaaagtgcaaagtaatgaaactagtacaacagaggacaacgtacaatgctctgaaaccattttatgcaccatcatgtaattatttgattgttccattttattgtttaacatgtagtggtaaagccttaggtatcagaaacttcatgtggaactggccccacttgatcaattattggaatataggaggtgtgacatactactttgaggtgtgaatactgctttgaggtggcacactgcttgcaggaggcatgaccactgctttgagcctttgctgccattccaacaccatgggagaattacaagctttatatcctggtatgcgtacaattattcatagaactagtcagcttcaaagttctaaatggaatgtctattgttgtggttgcttgtatctgcccatcttagattcttcctagcaataattctgagagactctggattgtgggccgaatggagaatgaagccttttcaaattcacctcccaggtagccaatgacatgtagtttccagagactaacgtgcttcaaatgttgatctctataactactacatactcccttttgtttatgcatatgttcctattcacgaactacctaatggggaccttaaactcatactaggtatcttaaacagtgtgaactgctgtaacaaataccatagactgggtgacttataataacagaaactggtttctgtacttccagaggctgggaagcccagaattaaacagatttggtgtctgatgagggttcacttcctcacagatgaccaacttctcactgtaacctcacagggcagaagcggggaggggtctttctggggtctatttctataagggcattgctcccaattctgagaactcctcccttgtggcctaatcatcttccaaaagccctacttcctaaaacctctgggagttaggactttaacatattaatttcagaaagatatattcagtccattggactgggaaactgtagtattcagaatttattactttgctgatgcttcattgttgcccatataatataaaagaatattgtgatgtatttttagagacattgcctaggattccaggtttgggacaaatctctgagcttccactcagtacaaagtgtccaaaaataggaagaagacatttatgttcttctctagagagaagaaaaacgaatgccatagttggagtgtaacaaagcctccaacttcatcttacatctaacttgaaaatcaccatgtatatgaaatatgtctgaccctgaatgaacctcttctctcctactctaattgatactcctctttcccaatccattatttatgtcaactattcctgccattcctcttctttaggatacctggattcactttatagctcttccatgtataaatctaatggataacacaacatctctgaggctcatattttgatccataaaactgggatcag

SEQ ID NO: 9615 - DNA, 6000 bp, Homo sapiens
acaaatctggttggtttgatttcaaaacatatttaaaatatcatttggtatagtcccatttatttatttttgttcttgtagcctgagcttttggtgtgatagtcaagaaatctttggcaaggtaaatgtcaaggagcttttctcttatattttcttccaggagtttaacggtttgaggtcttacatgtaggtcttttatccattttgtttttgatttgtttgtgtggtgtaagacaacagttcaatttcattcttttgtatgtgaaaatccagtcttcccagcaccatttattcaagagaccatcctttcctcattgtgttctcttggggcccttgtgaaaaattagttgaccgtgtatgtttggatttatttctgagctattttgttccattggtctacatatctgtttttatgtcagtgccattctgttttatataaatttgtaatataatttttaattaggaagtgttatttctccagcttcaatttttttctcagaattgctttggctatttgaggtcttttgtggtttcatacaaatttgcattgaatctatatattactttgggtagtatgaacattttaacaatattatttctacatcaaaccaaaaacttctgcatggcaaaggaaacaatcaacgaaatgaaatggcaacctatagattggaaaaatatatatctgcaaatcatgttctcagaaaagggttgagtttccaagatttataaagaacttatacaactcaatagcaagaaaacatataacccaatttaaaaatgggaaatggacttgaatagacacttcttcaaaaatgacataaaaatagccaacaggtatatgaaaatgtgcccagcatcactattcatcagaaaaatgcaaatcaaaatcactatgagatactacgtcatacctgttaggattggtattatcaaaaagacaagagataacaagtgtcggcaagggtgtagagaaaagagaatccttgtacactgtaggtgggaatgtaggctggtgcagccgttatggaaaacagtacggaggttcctacagaaattaaaagtagaactaccatatgacccagaaatccctcttctgggtatataccaaaagcaaatgaaatcaccgtctcctgaagatagccgcactcccatgttcattgcagcattattcagaatagccaagataatagaaataatctaggtgtccatcaatagacaactgtataaataaagatacatatattccatgttgtgtgtatacacacacacagatacacacaaaatagaatattactcagccttataaaagaaggaaattctgccaggtgctatcacatggatggacctggaaggcattatgctaaatgaaataagccagacacagaaagaaaaattttgcacaatctcacttatatgaaattaagaaaaggtcaaatatatacaatagtggtttatagcaggggtccccaagccccaggccacggacctgcacatgtgagggatctaggtgcatatttcttaggagaatctaatgcctgattatctgaggtggagctcaggcagtgatgctagcatcgggcagcagcggcaaatacagattaacattagcagagagttttgactgcacagagaccataataaatacattgattgcagactcatatcaaaaccctatcagtgaggggcaaatgacaagtgacaattaagctgtgtctggaggcaggctttatagtggaaaattgatgtacttcaattgtacagttgcatctggtggcaggctttaagtcagaatccaacacttattttagtctgtgcatggcccacccattattttaccacttccatctgcacctcttttccacactgtgcacttgtcttagtcacagttttgctaagcccacaagctaacccttgtgaaaaacaagggtttttgttaaaaaaaagtttttgttaaaaacatcaaagtgagtgaaaaacaaacatcactggacagcttctttgaaaatggggaaaaacccaaaggtgagataacagaagactctaagactgctaacaaaaagaaagctgcacttaaaggaaaatgccaagagtcctacttaaattacaggttcattgcaacaggtggttcacattctccaatcctgctttgtataatatgtggtgaccaactgcccaatgaagccatgaaacctgcaaaactactttgccacatggagaccaagcactctgcattaaaagacaagcctttggagttttttgttttgttttgtttaaaaaaaaaacagaaaccatgaaaccatgaacacaaagaacacatagaagcaattattgaaggccaccatgtcatcaaatgtgtctgcactgagagcatcattcatagtggctaactgcattgctaaagctaagaagccctttactattggtgaagaattgatcctgcctgctgctaaggacatttgttgggaacttttaggagaggctgcagttcaaaaaatagcacatattcctcttctggctagcaccataactagatgaattgatgaaatagcagagaatatcgaggtacaattgttagagaggattaatgagtcaccattaatcctctctagcaattggtatgcaatccaggttgatgagtctactgatattgacaacaaagcaacaatgcttttttgtgtgtgatatatttttcaggaagatgtgcacaaggatatattatgtgaatttttgttgccaatcaaaaccacagctgaagaactatttgtctttgaatgattacatatcaagaaaactgaattggttattttgtgtaggtatatgcatggaaggagtggctgccatgactggatggctttctggtttcactactctggtcaaagagaccagaatgtgagtctatgcactgtgtcatccacagaaaaatgctggctagctgaaaaatgttacctgaacttaacaatgttttgcaggatgtgacaaaaataatcaaccacattaaagtacattttcttaactcacatctgtttgtgcagctctgtgaggagatggacactgggcatgcatgtcttctcttatacacagaaatgagatggctttctaaaagtagatcactggctgaaatttttgaattatgagagctgctccagagatttattttagaaaatcagtcaccattggcggcacatttcagtgacacagaaagggttgcaaaacttgcttacttgtgtgatgtattcaactcgatctatgaactcaacttgtcgcttcaggagagaaggacaactgtgttcaaggaagcagataaattggttgcattgaaagccaaactggaattatgggggcaacgaatgaacattgagatttttgacatgtttcaaacattagcagagattttgaagaagactgagccagcagcttctttctctcagctgatgcatgatcacctatcttagctttcaaaagagttcgagcattactacccaaccacaaaagaaccctgaactgggaatgaatgtatccatgacccatttgtgagtaagtcaggtgaatcgattttgtccgtactagaagaggatcaattgcttgagatcacaaatgatggtggccttaaaagtatgtttgagacagcttcaaatcccatgttctggattaaactcaaggtgggatatcctgagattgccacaaaagcactgaagagtctgcttccatttccaacatgctatctttgtgaagcaggattttctgcagtgacagcaaccaaaacaagattacggagtagactggacataagcaacacacttctggtgtcactgtctcccaccgttcccagatgggaccttctaattgcaggaaaacaaggtcagggctcccactgattccacattatggtgagttgtataattattttattatatattacaatgtaataataatagaagtaaagtgcgcaatacacgtaatgtgcttgaatcatcctgaaaccgtctgccacccggccctggtccatggaaaaatcctcttccgtgaaactggtccctggtgccaaaaaggttggggaccactggtttatccagggtcatccaggttggagtggggtcaggagaaatggggaaatttaggtaaaagtatacaaagttacaaacacgtaggatgaacaaatgggaagacctaatgtacaacatgagggctatagttaatgatagtggtattcaggatttatgctaaataagtagattatagctgctcttgccccaaggggggaaatgtgtaattataggagttgatggatatgtcatacaaataacttaaatacacagaataaaaactattttagtttaaaaaggaacaatatttataaaaaaataaagtgagctcgaaaacattcaaataactgcttaaaaattaaaaagtaatatcacataatttaatagaaggaaagaaagagcaagacagcaagaaagaaaaggcaccataaagaaaaacaattttggcccctcctcatttgtagtcttaagctgcctctactccctcgccttgaaaagccacgggcttccgagggatggaggtcaaagccagagtaaagaaagttcccgggggaggccactccccagctgatgactttccagttccagttagtgtcggagtcccagttcctctccttaaccaccggacaaacgtctctggagtctctccaatgagcaagaaagcaagtcgggggtaggggaggggcctcacaccagggggtgggcgcagtccctcctccagctccttcaccctccagtagtctcgtgggtccccgagcgccagcgcgggaaccgggaaaaggaaaccgtgttgtgtacgtaagattcaggaaacgaaaccaggagccgcgggtgttggcgcaaaggttactcccagacccttttccggctgacttctgagaaggttgcgcagcagctgtgcccggcagtctagaggcgcagaagaggaagccatcgcctggccccggctctctggaccttgtctcgctcgggagcggaaacagcggcagccagaggtgcgcgggcggctttctctgccgcctcctggggacttgggcgcgggaactgcgcggagcctgcgctggggccagggccggggtcaggtgtggagggcaacttgtggggaaccggcgcgagggcccgcaggttgtgtttgctgctctgggggtggaggatgtggggtgaaggttggggccagaaatgcaagaggcctctgaaagggaccctggaagtggagcaggtacacggcaaggggccccaggcggcccagcggcacccgggctcaccccagaaccattcgaatgacaaggggtgccctgcctgaaaacgccttgcggggctcagcttccccttagctacactgctttacaggtagagagcggccctgaatcctgggtagagtctgggctcaggagcatgtgccagcgtagtggggctattagaaggaatggttaatacagcctgcaagctgtcatttatcagtaagtattcaatgaagtccgccggagcccacatctatgctaggccctctacaataccagcttaggaaagatagtggcggtatctagcacggttcctaagaccattagctccagtcaggctccccgactttaaattcggcctctactgcttcacgtctgtggactgtcagccactttcttcttatatatgttctttccattgcctcatctctgaaattgtgtaactattaaatgagctacagagtattaatgtaaaattcttagagcagtgcctggcgctacagaaagtactcagtgaaagttagctcttattattttaaatatttgacaaagttcctgcttctccaagctgattctctggttcccaggtggtttcattcatgcactgttattcctggaagtcttggcatggccacttcccagttccaggaacaggcagtcgttgttttttctggcttatcacattgagatacatggttactacaagtgacacttaa

SEQ ID NO: 9616 - DNA, 6000 bp, Homo sapiens
caatgattctgctccccacaaacattaacaaaatgtaatcttagtcactgctctccaaagagcaaaatattgacaataaaaagttttttttaaagtcaaatctcaattaagttaaacctccttagaaccttgcaagtatgtctagtagaacacagctacttctgggtttcctggtagccaatgacccccttcagcgattattctgctcccaccctttcttaattctcgtttcagtgcctgttagaacctctatgagagaaggtttcacatcgaggaaaacgaagagccaaatcaaacattttcatttttttttaaattctgcttaaaaatcactgggaaggggagtggtgactattggattaagaaactgtaaatttcaatgctagatgatatttccatctcccacctgcagttcagtccccctcaaggttactttctttttttaaaaatttattaagtaattagtttattttttattattatactttcagttctagggtacatgtgcacaacgtgcaggtttgttacatatgtatacatgtgccatgttggtgtgccgcacccattaactcgtcatttacattaggtatatctcctaatgctatccctccccctgtcccccaccccacgacaggccctggtgtgtgatgttccccttcctgtgtccaagtgttctcattgttcagttcccacctatgagtgagaacatgcagtgtttggttttctgtccttgctatagtttgctgagaattatggtttccagcttcatccatgtcctcacaaaggacatgaactcatccttttttatggctgcatagtattccatggtgtatatgtgccacattttcttaatccagtctaccattgatgggcatttgggttggttccaagtctgctattgtgaatagtgccacaataaacatacatgtgcatgtgtctttatagcagcatgatttataatcctttgggcatatactcagtaatgggatggatgggtcaaatggtatttctagttctaaatcctccctcaagcttattttctttcattccttgaagagtctagcacctggctttctaaatgtagtcattctctcccaaactgacattgtctaattttttattttagtattcattataaatgataattccaatacacttccctttccattccttttcaccagtcatcttgtcctccacctccctacactactcactcctaggatcacaacttgtgtcagtctgctaggactgacataacaaaacaccacagactgggtgacttgaacaaaagacatttattttctcacagttctggaggccagaattccaaggtcaaagcagatttgtaagttatgtgccaaatctcaaagcagatttgtaaattatgtgccaaatctgtgttggcagattggtttctcctggggcctttctctctttggctagcagatagccacttctcactgtgtcctcacacagtcttttctctttgcacccctggaatctctttgtgtgtccaaattccctctttttataatctgattggattatccccaccatgctgtcctcattttaacttcatcatcactttaaaggccctatccaaatacagtcacgtttgagattatggggggttagaacttcaacatgtgcatttaggagagacatgatcagcccataacacacctccagactttttcttcgcctattcctgaaacatctctaaaatctcaaattccagcatcacacttctcaatcactacttcctctctttctagctcactctgtgtgttacctaaaaccagtaatttttcagccacactgggacacacaatttacaaatccagtgcctcttttactatttctcacactccctcacgtccttacttccctccttactcagcttaagttccacagtccatcattataaccattcacttgcatacattcttgaatcctttgcccatccctctcttcatggtatctgcctggcaaagtcccaatcctggttgactccagctttcttcctacttgctggctacacctctgccactgaaccttactaggaaaaatacccaagtctcctgtccagtctcactatccattcacggtcacagactcaagtggtccctcagcacctgccacatttctctagtctgttcattctcccactttccaagccaactgtttgaacttctcctctcttcctttaaacctttaacaccctctccccatcctcattctcagctgataaaattgcctcctgtttccctgagaaaacagaagtataataatcagaagttcccgctaaccacctccaagcccattgctatgttctccttctgttctgttgctgacactgacctgccctgctgctatctaaggtaagctcctccatctgttcacacactcccaccctttctcacctactcaaggagcctgtgccagcaatcctctcctttatctcctttatggtaaatacctacctaccctccctcataccccttcccacaacagtatacaaatatgctaccattttttccattaatttttgtcccttgacttctacttttcctctagctgctgccccatttctctgccctcctttacagcaaaactctccaaaagagttacctcatctatttccaatttctctcctcccattctctcatgaatccactgcagatggactctcatctcatctctaactcaccaagaaagctcctcttatgaaggccaccagtgacctccacgttgctcaacccaatagccgattctcagttctttcgtatgatgtgccctttggcagcatttaactttgttgatcacgccttcttcttcttagaaagtcacctttgagaataagctcctgatcttcatttctggctcactggccatttctcagtatcctttctgccttcctctcatgtccctaaactcagtcctgggctgcccaggatttagtccttgggtctcttttctatcaacatgcatttccttagtgtctcatgggtttaaataccatttatatgctgacaactgtcacatttatatgtcacccagacctcttccttgaacttcatatttgtatatccagctgcctagttgacatctccacttggatttctaaaaggtatttcaaaacttagcacattcgaaactgaccatatcattcctcttctcccaaccctgctcattcagctgacttgctcatttctgttaatgacaattttattctcccagtttctcgggcccaaatgatgtcgtctttgacttctctctttctcttatacccacatccaatctgccaccaatcctgttggcacaagcttcaaaatatatcccaaatccagcttccttttttttttcttttattattatactttaagttttagggtacatgtgcacattgtgcaggttagttacatatgtatacatgcgccacgctggtgctctgcacccactaactcgtcatctagcattaggtgtatctcccaatgctatccctccccgctccccccaccccacaacagtccccagagtgtgatgttccccttcctgtgtccatgtgatctcattgttcaattcccacctatgagtgagaatatgcggtgtttggtatccagcttccttttaccacctctgctgctactaccatcatgatccgagtcatcattatctcttacctggatggtggaaatggcttcagaactcatctctatctcctccacaccctttaccacctatttacaacacagcagccagagtgaaccttttaaaacatcaagcacagtgcctgccacataagagatgctcaatgaatgctcaaccaacaatgttattctcttcccaatcatcccaggaactctagtaaatatgattttatgctgcttctatgtgactggaaaaaacgtctaatgcccagattttttgatgcacttagatcaaaagcactagagggaaaaaaaaccatatccacaagggggtgccaagaaacctctttggaacctggactgctagtttctttctttctttctttctttctttctttctttctttttttttttgaaacagagtcttactttgtcacccaggctggagtgcagtggaacgatctcggctcactgcaacctccgtctcccaggttcaagtgattttccttcctcagcctccagagtagctgggattacaggtgcccagcactatgccagctaatttttgtatttttagtacagatggggtttcaccatgttggccaggctggtcttgaactcctgacctcagatgatccacccgcctcagcctctcaaagtgttgagattacaggcttgagccattgcgccagccctacctttgttttcttaatagtaggaaaaatatgcctttatttctgttatgatttttcagagaggtagagataatagatgcaaactcttggaaggaaagctgtactgatctaaccaagatattttgtttttctcatccaccagtcactttctcagtcctttcttatcccttgcaatttgaacaaagcttggtgaatagtgtgcacacaaaaagcacactaggtgaaagacagatacataaaaagggtaaagtcaggatattttaacaaacctatcaagctctaaatataagcctccttggtagttttctctttaaccctctctccactgttggatgaaatttgctgcattcaattccagttcccaccccaacttccttcttaacacaaggtcagggttaagccttcggtgctttaatccagaggaaaattacttattttaaaaagcagtgaaaaacaccgcattcctttggcacaggatgaagaccagctcagctcttcagttgttgatcattgtctattgttctccaaacagtaaaccagtatttcacactgagattgtcggctgcgggtatattccaattccccgtctcctcatgaatatgaagtgaagggctctgaccctggaagtggtaggtaatctcaaaaaaaaaaaaaaaaaagagagagagagagaaaaaaaaggtcaggtaggaagaagaaaaatagactttctgtgactgtatactcttgaaatctcccgcaggttctaagcagggcaaaatggggtctcggaagtgtggaggctgcctaagttgtttgctgattccgcttgcactttggagtataatcgtgaacatattattgtatttcccgaatgggcaaacttcctatgcatccagcaataaactcaccaactacgtgtggtattttgaaggaatctgtttctcaggcatcatggtaagtatgaatttggagacttgggagagaagggggagttgtaattgagacttaccttgtaactagtagaagtaatgaataatggaaaaatcattctgctaatcttgggtgtaggatttgaaagagggatgggggtgaaggggcaggtaatctgctggcatttgggacatagctctgttttcaataagctgctcagcaatgcagcctcagtaatgcaggaaattagtcctaatgaaagtctgtgggacactggcctgtaaaaacagtatgttctcatgaaccctgcatatcaatttaagctatttgatcttcagtggcattactgttttctagaacagattttctgtctgcactcatgtttttctagcttgaaggggcattaggacagcatgaaaaaaaagcagagacttggctattcagacaaacctgcatgtaaatctaagctctgtcatttgttccatgagaccttcagcaagttactcagtatctttgagcctcagtgttctaatgtgaaaaatgtgaataatggcatttacttttaaagataaaatatatataaagtgcccaggagagagactgacatgtagtagatagccagtgactgttgtaattatgattattaaagaatgagctgtgtcatcattaaaatagtcctacattagaccctaataatggagggagtttttgaaaagtaaattgaattatcaatggcaagaatc

SEQ ID NO: 9617 - DNA, 6000 bp, Homo sapiens
ccaaaacatggggctgagaaccagcagctcatgctctggaacctgcagttctgtgatgcagtaaaaaccaccgcttccaagggtatcatggattaagggtgattccagaagggatgagggagctagaaatgagttttactataaccgggggaagtccagtattttaaactttatcacgaaagataacaaaggaatccaacatatattggagtgatagaatcccagaaaagtaaatataatgaatcacagatagagacatctcctctgagagagcgggctgataaaaatagtaaataatcataagtaactttttttgagtgactgctaaatgccagatgcttcaagctttacgcacattgactcatttctgcataccacaaccctatgaggcagattctattatttgtctcagagaggtcctctcagtaaggccttctccttctcccacctattccccttttctgctcttatcaccatctaataccctctgtgttttacttactattttttatttgcctctctctttttgatagagtggatactccttaaaggcaggaattttgttgtttgctttgcttactgctatatcctcagcacttataacacatagtaggaatcaatagatgttggtgaatgaatgaattatagaaatagaggtacacggtacacaatggttagtagcttgccccaaatcgaacaaccaggcagtggtaggccctgggagcaatggtgtgagtggctggtagatcttgggctcacagagaggcataatgaaattgagggtggggagactggagcatcagccgggttaaaaagaggcttaaaaactcatagattcacttattttagtcatccaactattcaatactatttactgagcacctattatgcaccagacatgctccaggtactggggaaacaatggtggacaaggcagaaggtgtctgcgctcagtggggaggggagggaagatgacaacagaaaaggaaacaagcaaatacacagaataacttcagaggctgataaattctgtgatgataatacagcagagtaatgtgatggagcataactagagatagggggaatatcttcactaaataggtcttcagaaaggacttctttgacaaaattatgtatgagcagcatcctgcagcatgtatgtttcttttttctggggagagggtttttttttttttttattgatcattcttgggtgtttctcacagagggggatttggcagggtcataggacaatagtggagggaaggtcagcagataaacaagtgaacaaaggtctctggttttcctaggcagaggaccctgcccttccgtagtgtttgtgtccctgggtacttgagattagggagtggtgacgactcttaaccagcatgctgccttcaagcatctgtttaacaaagcacatcttgcaccgcccttaatccatttaaccctgagtggacacagcacatgtttcagagagcacagggttgggggtaaggtcacagatcaacaggatcccaaggcagaagaatttttcttagtacagaacaaaatgaaaagtctcccatgtctacttctttctacacagacacggcaaccatccgatttctcaatcttttccccacctttcccccctttctattccacaaagccgcgattgtcatcctggcccgttctcaatgagctgttgggcacacctcccagacggggtggtggccgggcagaggggctcctcacttcccagtaagggcggccgggcagagacgcccctcacctcccggacggggcggctggccgggcggggggctgacccccccacctccctcccggacagggtggctggccgggcagaggggctcctcacttcccagtaggggcggccgggcagaggcgcccctcacctcccggacaaggcggctggccgggcggggggctgactcccccacctccctcccggacggggcggctggccgggcagaggggctcctcacttcccagtaggggcggccgggcagaggcgcccctcacctcccggacaaggcggctggccgggcggggggctgacccccacacctccctcccggacggggcggctggccgggcagaggggctcctcacttcccagtaggggcggccgggcagaggcgcccctcacctcccggacaaggcggctggccgggcggggggctgactcccccacctccctcccggacggggcggctggtcgggcggggggctgacccccaaacctccctcccagacggggcggctggccgggcagagggcccctcacttcccagtagggcggccgggagagccccctcactcccggcagggcgctgcggggcggggggctgctcccccacctccctccgcacggggcggctggtcgggcggggggctgtccccccacctccctccgagacggggcggctggccgggcggggggctgaccccccacctccctcctggacggggtggctggccgggcagaggggctcctcacttcccagtataaaggaaagaagtttaattgactcacagttctgcatggttggggaagccttgggaaactttccattatagaggaaggtgaaggagaagcaagacaccttctttttgttttgttctttttttgaaactgagtctcgctctgtcacccaggctggagtgtagtggtgctatctcggctcactgcaaactccgcctgccgggttcacaccattctcctgcctcagcctccccagtagctgggattacaggtgctcgccaccacgcccagctaatttttgcatttttagtagagacagggtttcaccatgttggccaggatggtctcgatctcctgaccttgtgatccacccgcctcggcctcccaaagtgctgggattacaggcgtgagccactgcgcctggccgcaagacaccttctttacaaggcaacaggaaagacaatcatcaagagaagggggaagagctccgtataaaactgtcagatctcatgagaactcactcactatcacaagaacagcatgggggaaactgctgccatgattcagttccctccccccagtctctcacttgacacgtgaggattatggggattacaattcaagatgagatttgggtggggacacaaagcctaaccatatcagtagtttaagcatcactttcccccattttggccccaggtgggatagatcagcagacaggagggttgcaatgattatgcttcaacaaaggatgccgtcattcacccataggctctgtcaccagtggaatcctgtctctaagccatcgggccaaacacacgttccctgttgttggacacatagtggtgacccaatgacactcttatgaggatttgcctgcctccgcctgagcaggtgggtggttccacgcttcccaactccactgatttatttcctcaggccatcctggattctggcttcacccctgttagtgtgctgaggccacacttcttgggccctcctccggtcccatgccacatcactaaccacagctggtctcctcaaatttggtatgtgtcccgccctctagttccgggccaaatccttcagactctagattcgtgaacctcattcaccttcttcttctaagctaatgcctccctaccttggtccttttctattttctgtactctctatcttgtcctggtgacaaggccctccaggcctggccccacccggccaccctgtccacctcccaccaccatccactggctggtgcaatctgctgttcaaggcataaatttattcagtgcccagcccctccttctgcaaggtaaccacctagaaagttagtctaacaccctttctctgccctgtgtggggagcctgtggaagctggtctcaggatctggctgggtaaaccatctgtttacctctgtgtgggttctgacactcctagccagttctgtttctctgaaccttgtttctccactctgcttgccaagtccctttgtcttatttttttctccctctccctccttccttccctccccccatccttccttccttttttccttccttccttcctccctccctcccttcctccctttttccctctctccttctctccctccttctcttctttccttcctctcttccttcctcctttcctctttccttctctcccattctcttcctccccctctcttcttcctctttttatttttgtcccatgctttaggccttccttggcccttcctggcattgcttttcctgacagcaacactcaataatttttaaaaagcacctgagccctttgtgttgactgatgccacctctgttgtggtgcagatttgttttagaggcagatgtccagggacgctgaacactgaaatccatcctgcagagcttgctgtaggcagagtaaagaagtttgctctgtagttttcccaacagccttctcaaatccatgggagacgtctcagacaccttgtatttaatagacaaggaaatgagctcaggagatttgccccaggttgtaaattaaatcagcacaaaggtagaaatgaacacagagctctcagattggaagctgtccagacagctgcatggagcaggggcacagctcactgtctttcaaagcctcaaccagggctgttgcatctcggacacttggcagttactggaaagtcatgttaggctttcctgttgattctttatcttgtggaggagttgcacagtcaatgccttgttcaagattaatcattttccctgttgcctatgactgaggctgtttctcacatcctgcccctggttttgcctgtcccaaggatttcgtctgaagggcgggacattccccctgcctcttcgcaccacagccagagcctgccattaggaccaatgaaagcaaagtacctcatcccctcagtgactaagaatcgcagtatttaagaggtagcaggaatgggctgagagtggtgtttgctttctccaccagaagggcacactttcatctaatttggggtatcactgagctgaagacaaagagaagggggagaaaacctagcagaccaccatgtgctatgggaagtgtgcacgatgcatcggacattctctggtggggctcgccctcctgtgcatcgcggctaatattttgctttactttcccaatggggaaacaaagtatgcctccgaaaaccacctcagccgcttcgtgtggttcttttctggcatcgtaggaggtggcctgctggtaagtcattcaggattattactgaattctctcctgtttcctagatgttttcattatgtattttcatggaaagttttttgtaatgcatatttctaaatcaagtgacttttttgttgctgttcattcctttgaaagcagattatacaaaagcgagattggtacagtatagcgtagtaattttatgagatgttgttttacaaaatgctctttcaactaaaagtgaactgcctttttgctaaactctataggtaggaaacagatattcgcttttaaatcagatttgagagactatagagtttctactagaacgggcagtcatttaacatttgctctggggagccggaaggggttggctggttctctgcctaaatcaacagttttgaatccaaattctctgctgtttattttcagccatctgtgatagggaaaaataatgaattgtgagtgcattgctattttaaaagaactctaagctttctcctttatgtaaggctggggtgtggcgtctaggaaaaaccctacagttagcagcaggtcggtgtctgaagctaatagtggaatgtgttattttttccaagaattgtttttgattgaagtgagaggaatttccctgccaacctgggagctgaaagcattagcttcaaccacagcatggaaagaatgtgagcaaacttaagtttgctactttaaagtgctgggattaaaaattttaaggagaaattttatggaatggtaccatacgtgataaattttcttaatcaagtaaaagatagtaaaa

SEQ ID NO: 9618 - DNA, 6000 bp, Homo sapiens
tttgtcatatatggctattattattttgaggtgtgttcctttaatacctagtttattgacagtttttaacatgaagcagtgtttaattttattaaaagtcttttctgcctctgttgagatagtcatgtggcttttgtctttagttctgtttatgtgatgaatcacatttgttgatttccttatgttggaccaaccttgcatcccagggatgaagcctacttgattgtggtggtttagctttttgatatactactggattcagtttgcaagtattttgttgaggatttttgcattgatgttcatcacggatatcggcctgaagtttctttttttgttgtgtctctgtcaggttttggtatcagaatgatgctggcctcctagaatgagttggggaggagttcctcctcctcaatttttttggaataggttctgtaggaatggtaccagctcttctttatacatctggtagagtttggctgtgaagccatcaggtcctgggattttttagttggtagggtatttattactgattccctaaatagaccgataatgattttagaagtggagtcggttttttcctggtccagtcttgggaaggtgtatgtatccaggaatttatttagctcttctaggttttctagtttgtgtgcatatgggtgttcatagtagtttctgatggttgtttttatttccgtgggatcagtggtaacattctcttcatcatttcttttttttttttttttttttttttttgagacggagtctcgctctgtcgcccaggctggagtgcagtggcgcgatctcggctcactgcaagctccgcctcccgggttcacgccattctcctgcctcagcctcccgagtagctgggactacaggcgcccgctaccacgtccggctaattttttgtatttttagtagagacggggtttcaccgtgttagccaggatggtctcgatctcctgacctcgtgatccgcccgcctcggcctcccaaagtgctgggattacaggcgtgagccaccgcgcccggcccatttctaattgtgtttatttgaatcctctctcttctcttctttattaggctagctagtggcctatctatcttattaattttttcaaaaaaccagctcctggatttcttgatcttttgaatggtttttcatgtatcaatccttcagttcagctctgattttggttatttcttgtcttgtgctagctttggggttgacttgttcttgcttctctaattctttcagttctgatgttagtttgttagtttgagatctaactttttgatgtggacatttagtgctataaatttaactcttaacactgccttagctgtgtcccagagagtctggtatgttgtatctttgttctcattagtttgaaaaaacttcttgatttctgtcttaatttaattatttatccaaagtcattcaggaacatgttgtttaatttccatgtaattgcatggttttgagcgattttcttagtcttgacttctatttttattgtaccgtggtctgagggtgtttgatatgactttggttcttttgcatttgctgaggattgttttatgtccaattatgtggttgattttagagtatgtgccatgtggtgatgagaagaatgtatattctgttggttttgggtacagagttctgtagaggtctattagatccatttggtccaatgttgagttcagatcctgaatatctttgctaatttcctgcctccatgatctaatactgtcagtaaagcactgaagtctcctactactattgtgtgggagtctatgtctctttataggtctctaagaacttgctttatgaatctgggtgcttctgtgttggatgcatatatatttaggatagttagatcttcttgttgaattgaaccctttaccattatgtaacgcccttctttgtctttttttttctttgttggtttgaagtcttctttgtctgaaattaggattgcaacccctgcttttttctgttttctgtttgcttggtagattttcctccatccctttattttggacctatgggtgtccttacatattttatctttatctatccatccagccatccagccatccattcatccgtatcatttttaaccaataaggacttttaaaagcgcaaccacaacaccattaacataaccaataaaatctataacaatgataaaatatcatctaatactcagtccatgtccaattttccctcgctatctcaaaatcgtcttcttagaaatggtctgttcaaatgagatcacatggacagaggaaggcgaacctcacactgtggggactgttgtggggtggggggaggggggagggatagcattgggagatatacctaatgctagatgacaagttagtgggtgcagcgcaccagcatggcacatgtatatgtatgtaactaacctgcacaatgtgcacatgtaccctaaaacttaaagtataataataaaaaataaaaataaaaaaataaaaagtgaaaaaagaaaaaaaaaaaaaaaagaaatggtctgttcaaatcacaaaccagattcagaaacaatagccatacattacattttattaatatgtctcttaaatttcttttaatctattacagtctttggaatttttatgtcttcgtttatccttccaattattaaaaaaaaagtatttttgtattcattgaatagacaatgcttgcagaaaagtaaaaaaaaaaaaatttagtacaaaaaggtacatagtgagctgttccttagtctcccttcccagaagcaatgttaccacttttgtacaaatagtctctgcctagacacacatgccagtccctaaggtggctgtaacaaggtggttaagagtgagaacatgaattcaaattcctattatgccactcactaagtataaatcttggtcatggtacatgcctctgtgcctcagtttttaataatggtacctacctcatagggctgttgagagaattaaatcagataagtgcttaaataactattaatatttattattattcacattcccttttggcttttttcccaaatagcagagtggtgcacatatgtcttcatttatttggcttgttttttcacctcacatcacattttgatgaataattccatacatgttgttatagatttgcttcattctttgtaatcattgactaatattccattgtatgaatatgctactgctaaacatgtacgttatttccaacctcttattatcaagaaatgctgcaatgaatatccttgtaatactttagtggattcatgtgcaaaaatattcataggataaaatcctgaaagttaaattgctgagctaaagggtatgtgcattttaatgctttatagattgcccagctgcctcaaaggaggttataacaatttacactcccaagaaaaatgcacaagggtccccatttccccataccctagctaacacaggatattgctaaatgctttcatctttgtaaacatgatgtattgaaaatggtatctcaaagttttaatgtgcatttttctgattgtgagaagataaaggaaatgtagtacaactaaacatcagcagtcaaatgacctggccatgactcctgagtgaggacactggtaaacaccatcaggatccaaacacctctgtatttacgaagaggatgctccctattggatagcactaagcttatttcatgtatgtacatatgtagttagttaattacatccagcggtggcaaagggcttgttctgacccaatgaaactttctctcctggcccccttccagcatgtggtcaggagtagagtgttgtggccatgaggcatgcatttgtacagatgactacttactcctccttgaaacatttttttccatttgcttccctgctgtctcactcatgggtctgctcctaattcacaaatcactcttttcccagtcttcttggttgggttttctcctcttctgtgcttgtagacatgggggagccccagggcttctctcttgaactacagcttctccctgggttcatctccttgggatgtctgttccaatgggtttaaatactagggctaggactagggagaggtcattgaggcacttagcacataaagtttaaggaaacattctttatcaggcccatgcaagtgcaggactggccctggagggtgactaccaccttaccttttccaccctaggcaccttgtttgccttaccctagccccagtcctctttaacaccccagtcttctccctggacctccagaaacataaatcctatttgacatttctacttggaggttttaaggtaactcaaacgtaaaatatctaagacagaactcttgcatcacttcccatcctggggcccaagcctgtctcttctactagtctatctcagttaacagcatcaccatttattcagttgctcaggacaaaaaatttgaagtaatccttgactcttctttttttttttttgagacggattctcactctgttgcccaggctggagtgcagtggtgggaccttggctcactgcaacctctgcctcctgggttcaagcaattctcctgcctcagtcttctgacctcgtgatccactcgcctcggcctcccaaagtgctgggattacaggcgtgagccaccgcacccggcctggattcttttttttttttttaaacaagtcctatcttccatctccaaaatgtatcccaaatctgacaacctctcccaccgtaggccagcccccatctctcccctctgaaaatagcctcccttagatctctggacatttgttcttccccacccccttgtgatcactattcagcattcagaatgatcttttaatattatgaaggagactgtgttcctctcctacttaaaattctctagtggcttcctaataaatttagaataaaaagccaactcctcgccatggtcaccaggccaggatccagtgggtacaacaatctgttcccagcacaataatcccacttctgcctccccaccattcaccaggctccactgcactggctcattcctgcctcagttgtgcttcttttccctggaaagttctttctgtagatctttaaagggtgatttccttctcaacattcaggtgtcagctcgtttcactttcctgaccatgcccatccactcagagatcactcaaaatcccattaccctattttatttctccatcatatgtatcactatctgaaactatcttgttgttgatgcaggctattttcttgaccccttcatgggactcccaacaggggtaccccatttactcagcctgccctgctcaacctcttgcaggagggagcacacgagtgaacgagtgcaggaaccagctggctgctttagtgctgtgaggagtaaactccatgcaggccctgcagcagcaaccaggtaggggtgcctgcaaccccagggccccagagggtgtgttacaatgctctcgtagctctgccatctgtggacagcagtgtgttgtcagctcagtgggccctttgcttcatcatgtagggtggctgccctctgcctgtgagggcaaagggccagggtgacagtctttttgggtacccacaatttgtgcatcctgaattcttgtttggtgcccaagaagaatggggtcacacagatgaactgaaggatggtgaatgcagagaattagcaatgaaagtggctctcagcagagagagaagctgaaaagggaatgggaagggcaggtcactctcccctgaagtcaagtcacatctctccaatgtccagccaccatctctgaagtcaagtttcctctctctgatgtccagccacttctcctctctactggctgagtctggggtatttataggcagaggataggtggtggggcaggccatacataattttggaaaaggcaacattctattggtaaaaagacattattcataaagaaccaattgggaaagagcgggcacacagggatggaagttctcactttgggctgcag

SEQ ID NO: 9619 - DNA, 6000 bp, Homo sapiens
aaataaaaataattctcctgcctcagcctcctaagtatctgagtttacaggcatgcgccaccatgcccagctaattttgtatttttagtagagatggggtttcaccatgttagccaggctggtctcaaactcctgacctcaggtgatccacccacctcaccctcccaaaatgctggaattacgggcgtgagccaccatgcccggcctgttttgaggtttttgttgttgtttttgttctcattttcctttatggagaattttaaatatgtacaaaataaacagaatggtctcatatgaacccttagtgtacctatcaccaagcttcaatagtctttgataatctgccattttaaattcaagcctccatgaccaccaatccccatgcaaatagtttgtttgtttgtttgtttgagacggagtctcgctctgtcgcccaggctggagtgcagtggcgggatctcagctcactgcaagctccgcctcccgggttcacgccattctcctgcctcagcctcccaagtagctgggactacaggcgcccgccactacgcccggctaattttttgtatttttagtagagacggggtttcaccgttttagccgggatggtctcgatctcctgacctcgtgatccgcccgcctcggcctcccaaagtgctgggattacaggcgtgagccaccgcccggccatagtttttttatagttgtttgtttgttttttgagataaaactcttatgtattttgaaatgcagaaattttaactgtgcaatttcaatttgtttttgaaggacctagtttggaagtttctaagaacatagagtaaaaagaaaaaggaaagttatgagaaaaagcttaaggggtaattccagtaaacaaaatataagtttactaggacttttagggggaattaatgaagaggaaaaaatgaaaaagcaaagatattattaaggaaaatttctctaaaatcaagaaagatttgaaactttgttaaaaaagacctaataaatgttgaacaagattaatagaaaaacatatatgtattatacaatacataccttcatacatcctggtgaaaattctgaacttcaaggataaagcgaattttcacaagctttcaactggaaaacacaggatacctataaagggacaaggaaaaaaaaaaaaagcaagaaaggatcatggcgaccaccagaagggttttatatttggcagtttcaccagcttccccaaaacacatcaatcagggaacaccagtattccaaaagaaaggggaaatgatattaactgaagtgagttaggggagttgaaaatgcaaaaaaaacaaaaacaaaaaacaaaaacagctattcatgacagtatgggctgaaggtcccatgcggtatcagttttgttttcatagtgatagtgacatttgttccacatttgctgagggacactgagggcctggtgggggtggtgttcccaggtttgtagagaaatgtcttagtttgtgttggaaagatactaccactaagtcttctaagaagacaacagcaatttgggcatggcttagcaacgaatacttgtctctactctttatttagcattagcaggggtggctcaccttggggctggaggattctcttctcactgtgttgcccagactggagtgcagtggcacagtcttggctcactgcaaccaccacctcccaggttcaagcgattctcctacctcagcctcccaagtaggtgggattacaggcattcaccaccacacccagataatttttgtatttttagtagagacagggttttaccatcttggccacactggtcttgaactcctgacctcaagtgatccacctgccttggcctcccaaagtgttgagattacaggcataagccattgcccctggcccaccttatcactttaataatgcatacacattgaattggggtaacatgaaaaacacttttcctgatatttgcctccagtcatttttcctattgtttgtaactcttgcctgcatagatctaaagatttaacatttgataggaagataattgaaccactaaaggggaatcattcttatatgtagggagaaatcaattatttccaagaagattccttatttaaaaactgatgtggcgggacacggtagcacacacctgtagtcccagctactcaggaggctgaggcaggagaatcacttgaacccgggaggtggaggttgcagtgagccgagatcacactgttgcactccagcctgggcgacagagcgaaactccatctcaaaaaagaaaaaaaaaaaatgaaaaaaactcaaaactgatttggtatctatacaatggactaatactctgtgatttaaaagaaagacggacatacattgatactgatatattaccatcttaaatggatctcaaggacattttggtggatgaaaaaaaaagttgatccccaaagttgcatactatatgattccacttttataatattcttgaaaggacgtaagtatagccgtggagaacaaattagtgattgccaaagaacagggaggaggacagtggactggtgcaactattaatatgtagtactataagggatagcactatgaaagggtaacacaggacacacacacacacacacaagctagtgcatgtaaaaactggtgaaattggaataaagcctgtggtctggttaacaatattttacagatgtcagtttcctggttttaatattgtactataatcacgtaagaggcaatgatcagaggaaggtgggtgaagggtatatgggactctgctatatttgcaatttcctgtgaatctataattatttcaaattaaagaaggggaaaaaatcaaacacaagacatacaaactcatcaagtatttcctttttttttggaaaaaaaaaaaacacctactgattgtgaatggctttattggctgcttcctttaactcccacaactctctgaaatagatgttatgaactctattttaattttcatcaaaatggaggcttaggttaagtaatctgtccaaggcacaactactgttagagccagggtttgaatccagcacaatataaatcccactcatggttgttttggtttaatcttgattggacttaaatgacaccgttcttttctttaacacccagactggagtgcaatggcatgatctcggctcactgcaacctccgcctcccgggttcaaacgattctccagccccagcctcccgagtatctgggactacaggcatgagccaccacacccagctgatttttgtatttttagtagagacagggtttcaccatattggccaggcttgtcttgaacccctgacctcaagtgatctgcccgcctcagcctctcaaagtgttgggattacaggtgtgagccaccgcgcccggccaacactgttcttttctgcaatctattcttctacttaacaaagattagaggactttacagttgccttttttttttttttccagacggagtctcactctgtcgccaggttggattgcagtggcacgatcccggttcactgcaacctccgcctcccaggttcaagcgagtctcctgtctcagcctcccaagtagctggggctacaggcgcgcgccaccaggccgagctaattttttgtatttttagtagagacggggtttcaccgtgttggccaggatggtctcaatctcttgacctcgtgatccacccgcctcggcctcccaaagttctgggattataggcgtgagccactgtgcctagcctgccattacgtttgtaatcccagcactttgggaggccgaggcaggcggatcacgaggtcaggagttcgagaccagcctggccaacatagtgaaaccccgtctctactaaaaatacaaaaattagccgggcgtggtggcgcgtgcctgtagtcccagctactcgggaggctgaggcaggagaatcgcttgaacccgggaggtggaggctgcagcgagccgagatggccctactgaacaccagcccaggcgacagtgtgagattcctctcaaaagaaaaaaaaataataatctttctgccagaggtgagagagcagaaaaaaaattaatcagattctcaaattcctgtacgtctcttagtagagacgggtttctccttgttggtcaggctgatcttgaactcccaatctcaggtgatccgcccgcctcggccttccaaagtgctgggattacaggcgtgagccaccgcgcccggccacaagacgttttattgcaacataaaaacaggatgtaacgagtcttccaatcaccaatgtaattagagttggttaccaagtttccccacgcgtcttccaccatgagggagaaacggactgcagacaaacctagcaccccttgagcagtttaattcgtactataaatatgtaggcaccgtaaggacgcgattctccagtttgccaggcctttttctatccttttgggggcacaaggcgaccttgcctcctgattcaaaaacttcgtaaacgtcaatccttctacccttttctggtcagcccacgaaagcagcagcatggcacaactcccagcctagagttcgggcactgcctgtcgtcagcataacgaagaaacctacacccacgaagacttcagaccccacgtgattacatcactcaaccaccagcgctggcctggaggaacccgctgtcacgtgaccgctcgtgcccaatgaccgaggcccacgctttccagaccgccacagtcgctgtcacagggcctgagtttgggcggcgccccgccccggccgcacggtgcgccggcgttaatcctccccgaaggttccggcagccaagattgcaggttcccaccaagcattgtttccgaactgggccacgagagcgtgtccctgattggcttgctctggaggctgggaagggacctgttagagactgggaccacttcctgaagcgcgaggcaggaagttatatgctttttctggagtcctgtagagaaagtgctctctgccgcattgatagcagcgagagctggaggtgttgggtcgggagaccagccgttcgatcccgccgcaggtaggagctggtttccatcctggcaccacggcacacacctccagcctcgagcccggcgctgctgcccgggggtctccttcaggctctttgacgccgttccagggggcacctatccaggcatcctctgggcctctagccagaggactggctcccggcttcagcactccgggctgcagtaagaagtgcccttatcgctctgagccctgccaccatcccgtgaaccaccgaaaccctggtccagcgcgacagccttggacctgggactggacggatccaaaacgctcagcctcggccccccacagacggggctctgcatcgtctctgatatgtcacccaccatctcccacaaggacagcagccggcaacggcggccagggaatttcagtcactctctggatatgaagagcggtcccctgccgccaggcggttgggatgacagtcatttggactcagcgggccgggaaggggacagagaagctcttctgggggataccggcactggcgacttcttaaaagccccacagagcttccgggccgaactaagcagcattttgctactactctttctttacgtgcttcagggtattcccctgggcttggcgggaagcatcccactcattttgcaaagcaaaaatgttagctatacagaccaagctttcttcagttttgtcttttggcccttcagtctcaaattactctgggccccgttggttgatgcggtctacgttaagaacttcggtcgtcgcaaatcttggcttgtcccgacacagtatatactaggactcttcatgatctatttatccactcaggtggaccgtttgcttgggaataccgatgacagaacacccgacgtgattgctctcactgtggcgttctttttgtttgaattcttggccgccactcaggacattgccgtcgatggttgggcgttaact

SEQ ID NO: 9620 - DNA, 6000 bp, Homo sapiens
agtcctaaaagatgagcaacaaattacacctggcttctgtatcacctaagccattccagttgaaattcgtgacctactttgtctcacattccgttgccatagtgcctgggttaaatgtgtaacgaaagaaaattgatttccagtgtaaatcttaatttttattgtgccctgaagtgctgcatgaatgatgcatgtgtgataagtctcacatttagaagattctggggggagttttgagatttaaagtattatggcctctatcagtggttattaaaataatatattttctgtagatgtgtatcattttcttaaagaagtaagtgactttatgaatatccttaggcacaaagggaacaggtttttctgactgcttcagaagcaatccccaatttacattggtcacatcagtgtttcctaaaaaggaaaacaatatctatcttgaaaagtataagcttcaagctcaaagacaaatgcttgttccccaagtgttttaatgcctcattcagtttaaaaatcaattccatagtaaagtacacatttagaattcttgaaaccttatctttattaaaaaaaaatcgcagctggcaaatgtctcctgtcaacagtagcatatgtgtgtaggggaatgggtggttgggggaggaggcctaaccaactataagggccaacttccagcattctctccaaaaaacacagtttcttctgaaatggtaagattttatttttttaaattacacttcactttttttatattatttgcatttgagtctgtctccttaaacctgggaatttatggggcagattaaaccccaaatctgttgagtttggcctacagaatatttgctgttgattctagttttctttctgtttaatctatttcagtttgagtgcttttggaaaggtgagctttccagttgtattgagcctaccactacctcatgtcctatgcctggcacaattcactccctgaagttatttacttgaatcttatagacattttgatcttgttacctttgccttaaaccttttgggtggagtgatacataaattaacaaattgagtacagttattcatctagatgttcatttatatgcagaagttgtttatattatttatttacaagactccagatctgtttaacttttattttttgaacaagtattttagctttattgtaggtaatgggggtttctatcaggtctacagagagaaatagggaagccctaaggcacttggagcatctctctaattatcccttttctaatttacagctgctggggagttatgatttgtgctttccacctcttctcagtttgcttcccttgttctgtatacatctattaactgttttgttttgttttgttttgttttgtttttttctggggtttcattttcaaactccctgagacagagaatcaggtatggagagccaaggcctgctcaccaaggtttgcctattatcctctctgtccaaaaatacactagggagagctgcagtgtgacaggactgtgcctgataattggtagataagaaactacttttggctgcttgctcagtgtagggcttttgtgagcagtcatgcagaatcagagattccactgcatggaggagaccagaattcatttgtagttaagagcatacatcctggaatcatattgcttgggttcataacttgactccaccatttactggttgtggaatctaaatgagttatttcactaatctgagtctcaatttcttcatctgacaaaggggataacagaaacatatacctcctagggttgctgtagggatgaatcagacaatacgtgtgaaggacaaagcacagaggtagacatacaacaaggactcaattcatgttagttattataatcaaaataatcatgattattatttggatactttcacaggttttgcacagtacttttcatgtagtagcttctcaataaatatttgctgaatgagtacatgaactaatgaattagtcaaatatcagtgggtgaaatatgtagtttggctgagtaaataatttttcaggtgatactttaaaacattatacttagggactaatataagtgttccacctcttttaaaattattcccatcatgagatttgcatttcaagtaggctttaaaacagaggagcttttcttttttcctccccacagtagccctggatgatccatttgttattctttaaaggtcccagtgaaaagctagcagtggctttctatattggctaggcaacttgcagtgtctgacacagaaaaatatgttaatttttagcataccagattttctttcacaaagtcatcagtaatctcttatccatatacctgacagcaaaaaatattattgcttggggtttttcctccaatctgaaaagaatcaagtgatataatagaaaatatacaagaaagcctgaaattcatagaatagactcagactgctatggaatcaagtccatttggttccttcagagttaagctatgttgaaatgggcaaaatatattgtagatctttgcttgggtagaatttactacccacctctccttctgttttttagcacattgtgtaccctggttgtccagtgtgccacggctatgtgtgccacggctatatatgccacatacaagtgatccttaggtcttgctgcttgctttttaaagggaactaggtagctctggtgcaagaaaacactgcttcagtactccaagtgtgccaccttcataattgtaattgttgccattaccaaaaatattctatcataagtatcattccctatcatatttctctaatttacccccacaaaataatttgaaattcatattttagattatcttctgtttatagttacctttagctttacaaaatgtattaatttttttctgctagctttttttgattatatcaattgtaacatttatatccactaaacatttcaaacttttatctttcctattttaattgttaaaatatttttctcaggcataatttttttaaatctcatccttatcatttcttcttttcttcttttaaaagaaagatgattgttgtctctttggatcttttagttttctgatttttttttttttttttttttgatggagtcttgctctgttgccaggctggagttggagtgtagtggcgcgatcttgactcactgcaacctctgcctcccgggtttaagtgattctcctgcctcagcctcctgagtagctggggactacaggcgtgcgccaccatgcctggctaatttttgtatttttagtaaaagcgaggtttcaccatgttggccaggatggtctcggtctcttgaccttgtgatccacccaccttggtctcccaaagtgctgggattacaggcataagccaccgcacccagcctctgatttttatcttttatcttctttttatatccttagtttgtttataaataggcagaagaaaatctagttatagagacagatccaaaaagttttatttatgaattggtcatagatggagaaggaaaaaaataattagtgttgaaacccactattttaaccagaacaacaaatgagtttaaaagaatgcaacttagtgagataggaaaaactgggggaggagtatgtgtaagagaaaataataatttcttcttctatcactaccatgtaataaaataaagagcatttttaacatcaaaaaagacataaacccagatatttttaaatgaatacttttgattttctgaaaaattcactagatggtctttttttctttttcattttgtggtgaattaatgaaaacttctggcattaaggaacacttgcggtagataatggaaggatttatatttcaggaaaactcactctggtacctgtatagagaatagactggaaaagattgaagacaaaagcccaattaggactagtaataggaagctgtggaggtagattacaatttggatactgtgaggaagaaagatatctaccaaacggttaataaggaggctggaggttgaggaaattgtgcctaatgcactagagtgttctcagtaatcaaaagtagcatttgctgggagtgatgtggttgaatttttttttgaagaaaaaatgataatgtgttgagttaaaaatggaatctagctgttttaatagacatacttaatccttctgagcttcagagagggagtcttgcctagccaacctgttcttagtattatgttttatttagcatggctttggaagccacaaaactctataggtctagttgaaataaaataaaatagtagtaacttgtatcagacatatattaaatattgccttcatcaatgagatcatgagtttcttaaaagcaagagtcccattttcttcttcctacagaggtggcctattgtttagtgaaaagagcccacgccttggagacccacaccgcaggtctacgaccctcaggctcttcagctgcaatggcggtaatgatgcgcacgtcataagattcttcaaggtatttaatgaaataaaggatgtgtaaaggagaagggattttacatgagttagctatacctttctcttctttcttcttcaacgtactcagtcctgggtacgcacagagggcactaatggcgtggggccagaagagcttttaattttggaattctgaagaactgagaactcgtgagtctgtcagcagctctgaagtggaatatcaataaagttttgttaattttttttaaagcaccgactaaactacaaatcccttctctctcctccaggtgggtgggtcacgtggcttgtcaggaatccggaagtctggcccgctcgcccaatcacgcccggaagcctatctagtggcgccaagctggccaatcctggggacgcttgctcttcgccaaaccgggtcccgcctccgcgcgccgcgctgacgggtcgttagcggatacggcggccgcaggggcggagtcaagggcctttgcccgccttggcggccggctctacgttccctgttctcgcctgcagctccgccatggctcctaaaggcagctccaaacagcagtctgaggaggacctgctcctgcaggatttcagccgcaatctctcggccaagtcctccgcgctcttcttcggaaacgcgttcatcgtgtctgccatccccatctgtgagtgctgggagcgaggcgggttaggcaggccgccggctagtcgggctgggcggggacgtggcaggacccggcgagcagggaaggcgtgggtgccggccgggggtcggcaatctctccagctcccctgagctcggggaggcacggagcctcttctttgggcacagtgttgtcgcttgggattgtcctgtgcagcactcggggaggtcacttgttaaaagtacgcacgttcccgagctccaccccaggagaaggtggttaactagttctggggtggcggccccgaatctctatttaaacagacaaactcaagcatactgcctctgcccttttctatacaactgttgcttgccgttacgaaattttaaacttattacttattttgcataaattagttaggtgagaaacccatgaagtgacccactgaattataagtgcatctttacgtgagctacttcacaccattgcataattttcctggtttttgcaaaaagagagaggttgaagtgccaggggttagggatctaccttatttatactttttaataatcctactggaccaattctagaattctcacttggttgggaaactgcagacttggacaaggtcgtttttagtagagctcaagtttccagaactcctgtcttttgctgcactgttgttgggcatttaaaactaaatgtatttttctcttttgtccttatacaacccagcgtgccattaacgtgatgtgaagccatatgatggctcactaattggacatagcactgcttggagttctgataacagccacgtcagcaaggaaactatggtttggggctgcacgtggcattttggaatggcctgtgtttcgcatgctag

SEQ ID NO: 9621 - DNA, 6000 bp, Homo sapiens
tttctaatttcaatagatattgcaaattgtccaccaaacaggtcatgtcagtttcccctctcaccgtctgtactatcttttcatatgattaaaagtcattatagctttatataccattaggtttcttaaacacaaagtaagttctctaaaatgctcatgataacctgagcaatgactaaggaactagggaacatgacatatcaggacacccttgtggggacacatctgcttctgtgcagaggctggggcagaacctgctggctgatactttcctcacctcctatgtggcacagtcttccagcagccctgggccaggggtgggatatgatgacaggtcttttggagaacgtggtggacagttagcaatgtcactcccccacacagtatgtggcaaggaagaagaatctgtgtacacacaaaatctgtctatgaactgagaaaaaacacagggatacccatgacagaccaaggcctgatttccctcgtattgaaagagcttctacaaatcaaccagaaatccaaccaccccacaggtaagtggacaaagaatatggacagttcttgcaaaggaaatactctgtgttccagaaaatccctgtttataaaataaatactataattaaatgtctacatgcattgctgatcagcatcaatttgcccccattgtaactgttatcactatttaaaatagctaacctcggaagagtgccctgagctcacacagcagcacttggtctcctggtcttttctgtcttccctcttgcttatgactttccatgattctcaccatctcatctcataggcaggaactgcacacacgctgcacaggctgcctgttggccactatcagccattcccacccttcccctcctcgcctcagtgacagaggtggctacttccttcccactaggcattatccctgcagggaccccactggggctctgcagattcccagatccctttctctgagtctgccccttccacttggcatgcttttgcttctgacctaaggctcctgcagctcttctgggagggctgttcttgtgctactgcccttttgtgcccacctatagaaagactgaagtacctgggttatcaacgagggtggctcttagccagtggctgacaggcatagaagaatggaagcccagataccctgcctggggcagggacatctcagaggcattgtttacagttgagagctccccttcaggtcaggctgaacctacctgtcatataactgtctgagatccttgcatggctatccttcttctagctccttactgaattctgctcggagcatttcttttaggaacaatctttgtttctgggcctgcttctaggaaacccaacgtaagacacaatcttcttcctcagtaacaaaatcctgagttttattttggcatatggccaccgtgaataaaaactacatttcccagcttcctttgcaaccaagttcttgccaataagatacagggcacaagtgccctgtgagacttctaggaaatccataaagggagtcctgctgatggctagtgtccatcgtggaccctgagggcaaggggtacatcctcaggatgtgggagcagagatctggaaaaggcctggacctctaacaacctcatggatctgccaataccaaccgcagattgtctaccatcccaccattaccccacaacttcttttgagaaataagttcctctcctgtttaagccaatgtcattcgggtgtttattccatgcagttaaatttaatcctagtttacagaccagaccattgactctgaaaaacgacagacactcagtttgccagcctcccttgcagctaggctttgccagtgtaacccagatctggctgaggaggtataaaggaaggtcttggggggaagaaaggtgtaggcaggaggttctggaaaagatatttcttcctgatgcaaaaaacaaacaggtgcacaatgtccagctctctttccactctggcaacctattccctgctacctgcctttggctgcagcatgtgaagatgtgctgtctggagctgtggcagccattctataaccaggaaactacaagtgcatggacaaaaagccaaccagctgaggatggctgtgcagaaggatggagagagcctgggtctttcagaaactcactgagatctcccactccaaaccaataaatggtccacactgttaatcgggttttccattacatacagttgaaagcaatctaacatactcacagggaacaaagcactgaagtaaaatcacctggaagtgatcaattctcaaaaagcctgctactataacctcttggagggtgctatagtttgggtgtttttgtcccctccaaaattcatgttgaaactcaattcccagtgcaagaatgttgggaggtggggcctagagtgaggtgtttaggtcataagagtgggtactctctcactcttccagcatgtgaggacacagcgttcctccccttcataggatgaagcacgcaaagccccattttggaagcagagacagagctaagaccccaccagacaccaagcctgttggtgcctggatcttggacttccaacctccagaactgtgagaaacagatatctgttctttataaattacccagtctcaggtattctattattgcagcacaaaacaaactatggggagatgactgggttctgggaggtgattacctgtgctaggcttgcctctgagggcaagaaacagcaactccagcttcagggaagtgaaataataagaaataaactccaggatccgctgattcctgtgttcaacaatgccatcaggaacccagggccctcccctctctctgctctgccactcttgaaatgggcttcattctcaggcagccagcaagacagaggcatgcttctgggcagcacagccagacctaactggggcctatcgagggcctgcactctcccccttggcttctccctccagctggattttcttgcttttcttcaaacatgccagataggctcctgccctagcctctgcacttgcgttccctctgcctacagtgcttttgcatacatgtccacttggctctgcctccttcaggtcctcacccaaatattacctcccgagagaggcctgccctgaccacaccttttaagattaaccacctcccaactccccatttctttttctggcttaatttttctccctggcatgtaacttcatccaatatagcacacattcccttggcctcactgagtgtccgggccccacttgcctagaaggtgtgctccaggaaggcagagatgtttaagattgttcaccctcattcccccagggcctggcacaggtgtttcacaattatctgcagaaggaaggaaagacagacaagggacagacaacagccagaggaagaagtgcagtaagacaggatctttccagagatggcaccacgcccatcaacccacaggctttgctcaccatgcagaactggcacatgcccactctcaaccacccactggcaaaaagagatttcctttagccccacaatggcactggggtccacgtttggtgcaggggtagacccctgaacaaaatgcaggatggagaaatggatgttgggagtgcctagcagtaccagttctcctctctcagccctggttctccaggactttttctcttgcctacggtttaaaaacaatggctatcttagcccttcactgccacctgtctaaaaagagttgccgccgggtaccgtggctcacgcctgtaatcccagcactttgggaggcccaggcgggcggctcacgaggtcaggagtttgagaccagcctgaccaacatggtgaaaccccgtctttactaaaaatacaaaaattagccgggcatggtggctgtagtcccagctactcgggaggctgaggtagaattgcttgaacctgggaggcggaggttgcagtgagccaagatcgtgccactgcactccagcctgggagacagagcaagacatggtctcaaaaaaaaaaaaaaaaaaaagagttgccaacacttgctgcctccattccctgaagccccatccatgcctcaccccgctggaatccgacttccatccccggcctttaaatctgcctcgcacagtggttatcaatgtatcaatgacctacttgcttctgagacaaatgggactctcaggccttatcttaccctgccttgctgcccactcctccctcctcggcgcctcttctgggcaggaccggcaggtgttcaggcccgtccccagcccctggctccggcgtcccgggctccctgccggcatccaccttcacctcctccccagccccagccctctggcgacttctcccacctccacagtggctgtgccacgaggagccccatcaatgcccgctgcggcctgcccctttctccgccgtcccctttcacctgctgggaaatcacagccctaatgcttggagaatccaagcagtttccctctaaaaccccagggttgcgaaaccgcaggggaaacgccaagtccctgagctgggctagggacgcggtacgaggtagcacgggcgggccgcgattcctcggggaggcgtccccattgtccccccaaccccgaccctctcccgccgcggcctgggccagaagcacccggccctgcgctgcggaggcgatgccgcatcctagcactaagcccgggcagcggggaggggcagagagaacccaggggctgcgggaaacgtggaaaaggagtggccccatggggacccgggctcgctacagaccttcgccctgggggcggaggggaggggcccaccacggccttatttccgcgagcgccggcactgcccgctccgagcccgtgtctgtcgggtgccgagccaactttcctgcgtccatgcagccccgccggcaacggctgcctgctccctggtccgggcccaggggcccgcgccccaccgccccgctgctcgcgctgctgctgttgctcgccccggtggcggcgcccgcggggtccggggaccccgacgaccctgggcagcctcaggatgctggggtcccgcgcaggctcctgcagcaggcggcgcgcgcggcgcttcacttcttcaacttccggtccggctcgcccagcgcgctacgagtgctggccgaggtgcaggagggccgcgcgtgggtgagtgcggagcgacgcgccggggcacgcgcctgcctgtccgcgcacggcgctgggaggtgacacctgggtacgcgcgcctgccggcccaacggatggtccgccagggaaggtgcagtgcgcacgacgcccggggagatcccagctgggcctggcgcccctgaagtatcccagggcgtggaaggggccccttcggtgcacagcgtctgcagaaatctggctcgttccttccagcatttatgaggtcataggtttttcacagggcagcgctcttgactgctcccacacctgggaaagagatgctttgggaaattgaggaacaggctgaaagggcaacatttaattttgtccggaggtacccagagttggttgctatgggggtgcttactgtgcctgcgccctactagtggctgcagccaaagttttgggcgggatttccaaaatctaagccagtagccataccataccgcggacgactgtctcttgttaattgcagtccaccacgctagggcttcggggtaatgtggttggaatttacacgtaggcctgggcagaaacctgctaatgctggcgtctgatttgatctaattagaagtgagtgaatccgagcccagtgttctatatgaaccgaatgaatgagaactttgcaacccgttgtttggttgctgatttcaaggcattgactgtaggaattgtctcgtatgtgtgaagctactttgcgttcttcatcctatagattacaaaagttacagaactacactaagtctgtcccaaaagcaaagttgctccttctacaacctccagatattccacaaagcctgcagacacacggcctcaaagaa

SEQ ID NO: 9622 - DNA, 6000 bp, Homo sapiens
tttttatttgtccagctcaaaatgtcattttttttcttttcttttaattctgtaattctctgtatctacctgtctgtctctccagtttgggaaatgcagtttgccccataacctcacttttccaaaaaatatacaaagagttaagtatttttaagtttgtttagctttttacttgttattaggatggaatggtgacttctaaggtcttacatgctggactgaaaaccagaagtctgaatgagttttgaaggatgaaagggattcctatacatctgcattgttcaacatggtggccacttactcacatgtagctactgaaacttaaactaagtaaaatttaaaattcagttcctcagtctcattagctacatttcgagtattcaatagctacatgtcattagtttctacaatattagaaaacacctaagagcatttttatcattgcagaaagttctattgaacagtgcagctctagactcttgctactcaaattgcagcctaacaaccagcagtatcctattaccaattggtgggttgtctgtttttgtttttgtcttgagacaaggtcttgctctgtcacccaggctggagtgcagtggtgcaatcacagctcactgcagccttgacctcccaagctcaagcaatcctcccagctcagcctcctgagtagctgggactacagatgcacgcccccatgccaggctaatttttgtatttttagtagaggcagggttttgctatgttgcccaggttggtcttgaactcaggagctcaagctatctgcccatctcagcctcccaaagtgctgagattacaggcatgagccaccgtgccctgcacagttggtttgttaataggcagaatctccagccctatccaggacctaatgaatcagaatctgcttttaataagattctccagtgattcctatgcacatttaggtttgagaagcattactatagtggttgtgggacttggatgagtcagatgggtgtggttctgggatggagggactcagagaataaaactgtactctgaggtaacagtgggcacaatgacagtgcatgaaaatgcatgcatggcaggagctggtaggctgaggtagattacaaaaggttctgtagccctttggattgtgccctgtgggaagtcactgaccaatttaaaataggaatgcctgacaagatctgggtttgaggaagacagcctagtggtaatctgaaggacctgatgggcaacttggaagtcaagggagcagacagaaagctctgatacaaacctaaatgaagaatgaggctttcttggctgcaggcatctcagagaggagagggagaaagagagagaatccacagggacttggtgactgactggacatgtggaatagaaagaaggatgaagtgagatttgaacttggatgagtgataaatggagctgctttatacaaatcaggaatccaggagaataagcacattttatgggaaggtactgaggttggcctagacatgttaagtttgaggtatctctgagacatttgttcgccagtttccctacctgccaaatgatagtaatgacagtatccacctccacagtattggtgtattaataatcaactgataaagtgtatgtgaatatactgtattaatgtttaagtgtcacatacgtgttactagcatgactctcgcatgtatttgtaatctgaaggacagaggcagaaggctgaagatattgtctacatttgcacaaaggcagtgtcatatatcaaattcagtaagacaggaagtgctggaggaaaatgctgaagagaatgaaagatgtggatagtcaagtaagaaatataacaaatcatcaattagaaatacaccccagctgcttctaagcataataaattgtcaaagctttccatcaagtggaagaagacagtcacagtcagattttggagaaggcacatattgaaaaattcaactgaacaattagtagaagcatttcctgtagattagaaaccctgcccagaaccacatctgccttgaaacatatatagcacatattacgaaagaactgttgttacatttcaattttcatctgcagacaaatttaaggttaaaatgtaatatagccttaaaggtgactgctagttcaaacttatcattaggcatatggcttcctaactcttgattatatgttcggaaaattgctaggaaggtttccatcttattggtcagatggtatgtgagtgtgacatataactctttgatgtgtgcttttcttctggaatttgtagatagtgcaggatacttaaatttattttgcttttgtgaagtaagcaaataacctgactttaaacctcagtaaggctattcagctaaattccatatatatctattgaagatatattacagcaaggcagtgcggtagggcctgtctcttccctcaggttgctgataatctcatggcagagacatctgtaaacaagttctgaggcaagtgagtgctcacagaattataaacaggtttgggtagtttggggagagaagtgagtaagaacaatagctgccatcagatatcataaatttgaagtttgatgatttactttcaagaataaggttcctgccacttagtttagctagttctggccacattatctgcagctccttccatcaagaggcagagactatttgcctgccccttggatttggagaggcctcacaatttgctttgatttgtagaatttggcatatatgatcttgtgtgactcccaagtctaggccttaagaaattttacagcttctgcctgctctcttctggatgttgcccacagaccaaaaacatagcctactgcaggataagaggccacatggagccaacagcagacacatgagtgaggccaccttggactttcagcttagctgattctccagttcagggatcagcaaactacagcctgtaggccatagcctgcttctgtatggcccttgagctatgaatagctttgggtttttaatagtttataaaaattaaataaaaaagaatatgtgacagagacaaagtctaaaatatttactatctgatcctgttttacagaaaacttggccaacccctgctacagctgaatgtatctatacgagtgagccaaatcaaaaccagagaggaaccacataaccaaccttcagaattatgagaaatattaaattgacatttttgcaagcaactatattttgggagagttcgatctgcagcaatagatgactcaatcacaagctgataaatgctacacaaagaaaaaggagactgcttcaaaggaaataatctcataaaggttttgggcctttttgtctcacttacttcatttaggagaatttcttaccccaatctgttgtccatggctctgctttgcattccagggaagttttggcagctatgagcacatatacctgctggttactcaaaggacattcaaaacattttaaaaatgagtattgaaatacaacttttctaaaattttaagaaacggaatttgtaaaatatagtattaatgccctaaagcattcttccaaataagaggtctattttttcagcatattaatctatctgcagtgaaacctgtctggttttgttattaatggacctccttgacttagtgaggtgaactgtcagcccaggtagggtgaagaatggctgtgataaaggcgtgcagcagggcagcaatcactttaccctctgcaaaggacacagctacctgccaaggctggaaccaggaaaacaatctcaaccataatttagatctgattattataatttagatctgattatttatgcagtgtcaactaagtccttgacttacactgctactatctaaacttacttttgttgtatatccattttgatctctatattcacccctattattttcagagaaccttcaaactatcctaagtaattttgcagaaaaaggctataaggaagaagcagtcaggccaaagagtcagtaaacaaaaagaaatggtgggccacgtttagtcttgatgcaaatgtgtgggttacaatcaggggtggtgctcatggctgagcttggtagtggttaaatacatgatccagacccacttgattttgaggaaaggaccagtacaatcaatactgcacatcttggtaaaaggagtttgaggagatggatctgggagtttaggtcagctatgctcaggtgtacaaaagcaactccctgggactcccatccatacacaggccattgaaacctgacgtgtctctcttacccccattccattccccatcgattccggaagaagaactggcatttcttctgagacagcaaagaactcctcctaagatttcctctttcctaattagttctgtatgaagtttaacaagaaaatccctccagggccgcctcgaggccatgcactcacgcagtttggaaagacgaccagggaaaaaggatctcaaacaaaaattctagctcgacgtctgccactaagttgtctaattttggccagcatcaactaaaggcatacataacacggccgtgctcggaatgcaaggtgaccgcgaggacccagagggcgcgccatgcgagctcacagggctgggggccgcctgggcccgcgcgtgcagccaggggcttccggccgcggccctggcgcgtggtctgcgcgcgcccggccgtgcgtgcggatgcggggaggctgcgtgtgtgcgcagggagagaacgccggccaccttcccgcttccgagctgggtgcgcgccgagcacaggaggtgagtgagaagggcggccctgcagggtctccgaggcggttgagtcctgccactgggtggagggtatagccaccggacccgcctttcccggaacgcgccgtcctcggaaacgcctagaccccggcagctaggccgggaggcaccgcccactcctctagagcggagcgtggcccaggttgagccgccgcaccgtgggtctcgggtctcggtgacgagcagctgcccgcctccggtgagcgcgggagaaggggcccagtggggcagtgggcgacgcggagggcccaggcccaggccgcggccgcgccgcatccgctggttgtccaccttgccttgccccagggtgcaatacctgccttgcgtcgcccgtgccgctccagccaccgtcaaatccgggtagcgacccggggcgtttgcagcggtgccgaggaagaggacgggaacggtgttacggtattggtgggcccctaacaggcctgcggcgaacgctttcccggagcgctagggaagggccccggcgcagggatgtcggagggattgggaaggaatgtgaaactaagtggggaatgtggagaacgggcggagagagaaggaaatcccacggggctagggctacaggattcctacaggcagtgttaaggaacatacagggcgttttaaaaagattcctagaggtgcaacggagtctcacttttccaagcagtaaggaatgatgccatcctcaagtacgggtagtctttgaattcagtatccgttcgccttcttaatgttggatttaggagggagatttgcagggctttcatgattttgtttcctctgcgttttgcacagattgcctgcgtttaggaggtggctgcgttgtgggaaaagctatcaaggaagaaattgccaaaccatgtctttttttctgttttcagaggtaaggaaaatttgggtttgcagtgttcaactgggaacaagttttttagcttctcccaggaggcttaagcaaaagaagggcgctgaatttgtgctcttagtatgcatgtgtcgatgcctgataaaagcacaaattactgaacgcgtatcagtctggagaacagaatcgtttattactaacagataagagactatgacttttttcccctcatagactaaaatgttcgttcaaatgaatggccattggataactccagacctgaaaataaacactgttgtcaaaacagcatccaggccgggcgcggtggctcacgccag

SEQ ID NO: 9623 - DNA, 6000 bp, Homo sapiens
atgttccacaaagttgtcatggaatcttatgagccttctaactttttactccactatctccaaggaaatacatagtcaaagctgacctacagaaatacatatgtgtttggttcatagaatgaagtaaaggatgaatgagagaaagctgtttctttttttaaaaaaaaatgtactatggaagtcacaagcatgaaatcaggtttcatcccattgactagaatttagctacatacacaaaattagcaacatgaagggtttaatagcatagtctggacagccacataccctattaaatttaggtggttctatcactaaaagaaagaaaagagagaaaatgaaaaattagctgttaatggttagattataataaaccatgtttttaacaaggccatattgtagctgcaaaaattgacttttgagtatgttgctgttttattaccaatgatatatccctagcatgattttgttcctccagtgtcctgaacaaagattatgatacctggcaactatgttactgaattgctcttacttctggacattattcaattcaaagctagccttcctttctctagcctctatagccacacagcacaagtctaaatcctataataagcctcttccaacttcctgttactaagagaccctgctcttccttgtttgaccacatttgagttctgtatagactttgactggtgagctttgataagggagaattgatatggatatacaagtggcagtcactgctatattctactgtatataaaacatcctgaaaagcattttgaattaagcaaaggcaaggaaagcattgtcctggctctctctgcatttccagtctcacatgaccaattgaagcaattatggatagctttaatatgagacaagctaagacagcactatactacaagcatgaaacacattgttatgaagggaaaagtaggggagatgaaatggcaaatatgaaaggtatagggttttaaaaataaggttaagaaatttggttctccgcctccaggcattaagtatcattggactactgcactgggcatataatgagttgaattattttgtggtgagaggtgggtggttttactttagagaaaagagaaaagttgaataactggagtttgggagaccagttaggaaacaattacaataatgtaattgttataccagtagcagcaaataaatagaattacgtatgagacactgaggaagagcacttgcagaattaagtgtcaatatagaacgcttaacaaaaaggaattaaaagtcttgagctcacgttgcttggggagatgtaaagatatcaattgagatagagctagataaagaattgtcttgatggagctggtaaagagttctactttagactgttgaagatatctggaaatttgggtatgaagcttctaagaatcgttacatctagagatacatctaaaaagtcatctgtgctatttattagcaaatgtgtgatgttatttatttatctatgcatctgtgtgtaagactggaatactagcacttgtatatgccttattttctggaagctcttcacgtaactctccatcggtctttccaatggttctggtgtcttgcccctgaatttgttttctccttcttcttctaaaatcttttgtatccagtattttttatgacccaggcaggaaccttggcttccctttttatatttgtgttctattgcacctgcttctgtcttctaggagaaagaactcaaacaaattcaacacctcccagagccttcttccattccttcttctcttgccatgtggctgttttctttctagttttttcacaggcctctaaaagaagcagaacattttttattatttaatattttgaaatatctctgcattatcgctgtgaaaattcgatttttgtctttttgttgcatcctggtggcaagtaacatataaaactagtatattaaatcatgtaacttttaacctaaggtgcatatttgaggtccatgatttaactactgtagacgtccatgatttaactaccatatgtttgaaattctgacatgcacatttcagagacaaagtacataatactccctaaagagagtagttgaacattaatctgttctaattacactaggtgtcaatcaccagttatgattcacttttggtgttcacaactcatcctgcctgctgactatccaactcaatttggggatcattttgcttatgaagttttaaagtttttggacaactttatattaataattgaaattttaagaatttatatttgtttttaaataaaatgatatgttttaagttaaaacacctttttaattactgtacataacttccttatgcttataattgaatacatttattttgtgatttttatctgaatttaccttctaagcattttttgaacaccttattcgattgattgaggttcattgttggaaccagagctagggtggcagaagtaattgcttaaaacaaaggccagtttgttgacatgacagggagataacgatacgaaatagaaggtacacaaattcaaaatcacacaaagttttttttttctgtctgtttctttaagactttctttttttaaattatactttaagttctagtacatgtgcacaatgtgcaggtttgttacatatggatacatgtgccatgttgaagtgctgcacccattaactagtcatttacattaggtatatctcccaatgctatccctccccccttcctccacctcatgacaggccccagtgtgcgatgttccccttcctgtgtccaagtgttctcattgttcaatttccacctatgagtgagaacatgcagtgtttggttttttgtccttgcgatagttggctgagaatgatggtttccagcttcatccatgtccctacaaaggacatgaactcatccttttttatggctgcatagtattccatggtgtatatgagccacattttcttaatccagtctatcattgatggacatttgggttggttccaagtctttgctattgtgaatagtgccacaataaacatacatgtgcatgtgtctttttagcagcatgaaaatcacacaaagtttttaactggagagaacaaaagctgttacttgaaatatttctataaataaaggaacatgtaaaggaggactagttaaaacttgacagaggcttatcgtttcaattcaaagatgtggaaagctggaaagaatctttgctctcacttctaaaggaagaaataaaaagacaacttgttaactatttctcttgaatctatcagagaactaaaattaaagggaaaacaattgatctgaaatataagatttatcaatgttgttgcataaatcagtagtttataacttttcattgctgagtagtttgctattgtatggatatgccagagtttacagacacttttgttgtttccagtttggggaaattatcaataaagctgttatacaaattggtatacaaaatttacaatcagcttgtctatatttacttcatggagttttgatttagattatattttatgtgtagatctaatagtggcaaattggcagcttaatactgagttttgcagtctatgaatatggcgtatctctcaatttttaaaatctttaactttttcatcaacattttttggtgctattctaattgataatctagctatctatcaacttatatctctgtctatatctatattgtagtttcagtttccaattcttccttgctattaggtaggatcatgattgacctttgtatgttgaccttatatcctgtgaccttgctttgcttgcctattggttctaggagctttgagttcatttagtgagattttacacatataaaataatgtggcatatgaatagagagtaaatcactcaaaagttttattatatttttcctatttagatcattctggactgattttaaacttattgctatataactgattttatatactgaaatttctcctttatatagctactgagtcttacaacaatccatgcatactttttttaaattttctttttagactcatatttagtttgcttcaaaaactaattgctctactttatgcaaacacattattttaatatatattttgttgaaaagatagtatccagatggtatgcaaggcttagactctgacaatttcagagtcaaattggggtcaataataattaagcaatattagctcatataattcttttagtgattttataggtagtattttgcccacaatttctcaggtaagcatagtacagccagcatttatatccaaatttattatatcaaatccattgcttttaaacattatgctagcttaaaccagtagtgtaattaattttatacattttactacatgaaatgagaaggtttacaatatgattttttataattcaatgagtgctatctgtggtaaataaatagataaaaatgttgattttatctctaaattactgatctgggcacctctattttatgttttatacttaaggatttggtcactttttcaaccttaagatcaaagacaagatacagggaataatttttatttaatcattactttttataaaatattatcttctaattgttatatcctgaaaatttttcacagattctgtctttcaaatatgtttctactctccagtgaggatctaaattgcacacaatggacaaaatagttattataacaaaatccaaatataaaataaatataattttgaaaagagaaaaaatagaaagaactacttttatgttcttaagatattaatagttcacagctttgagaaatcaaagagtatctgacagtacaattactaattaacttagattcccagagagaaacatttatgtaaactactttcagggttaaggcttttaacaattgtatgttgagcagaagattattaaacactgataggctggtaagggtgcaataaaactttatgagtaggtcaatatatacctaagcagctttccttgatcattattttggcagccttatccaagtctggtacaacatagcaaagagaacaggctatgaaataaggtaagtctatggctcatatgttttttgttatttttatgttttcaactaattatattttttcttaatttgtgttagcagtattcccatctatctgcactaggctaaaatagcaatatcatatattttaagttgccatttgaaatatgtagtaccttgtattaaacaggaaaaaatatttctaatttttttttaaatacaggattttttttggcccaactcttcattataacttttgtaagacttaggtggaatcatagcaagttttgtttaatgactctatatgaaagaaaatgagtactgattaagattttgaaaaatagatgaataataaagtatgcttaaatatattttaagaaaatctatataaaatagaatgctacatttataaaacattactgttttctagctgaccttttaaagatcattcatcaagttgttatacaataaagtattattcatcttcataataaatatgcagagaaagggtatcaatatatattttccaagaagagttgcttaaaattactgtaatccaaaattacagggatcatatttttttatcacagtaattttaagcaattgttttaaattttgttttgatttttctagacaaaggagagtttgtttcatgacaaaaatgcattttttaagacttcccttatcaaaaaggaaagcacaattctcattattgacttcttggtagcaaagtaggttatcacttcaaatgagatttacacttatttaaagttgtacactaaatgtaactttgtcatttctcaacataacatcacgcaactgggcttcatttttcgaacagctttgtatgttacctgttgctctgtttactttacattcattttctttgaaaattactgatgcaataaacagcttacatatctggaacagaaaattgtatactaagaataaatgctaatctg

SEQ ID NO: 9624 - DNA, 6000 bp, Homo sapiens
tctttagatgcccaaatatgaaaaaatcaatttcagtactaaaaaggcagagttacagatatggaaatcactaaacatttgttgtttagcaacatagaaatgtgaagggagacttagatagaatatagtagctaaaagcagctatagatgcctaagcctcagcagcaatataagggaaggagccaaattcaaagaaacttcagtttttgttttttgggtttttttttttaattgaactaagctactttgtgaattactgacattaagaaataaattcggtgtttcactacactcttgttatatacttaagatgcaagactgtacataagatttccattatttgtgaattccagcacgtgatcatattgaagacttttatctattcccatacttagtgctgaaagcattttttatcaggttctttatattgaaatcagtctgatttcaaaatattcactttatattcatgttctcaaatagctttcaaaaagtcaaaaaccaggagaaatttggttttacatgtaaacatgtacatatatggtttaggctgtctaatttgtgtagctgataccagtactgttcctctatgatgcagttggtttaaagtcagtagattaaaaggacacatacagaacttcaaatgtgctcccaaagggatatccatgaagactaattaaaatattgtggatgtttcagaagtaactctcaagcactacaatgctttctaacattttgtcacttcattgcttacaacaaattctgtagtttcatggcttcagttgttttttcaagttaaatcactccttctctagctcaaactcatatcttgaaaactagttctgcatttctacctggcaggtgagtttctttgcataaatatatacttaaataactaggaagttcattaccttagacttttaaacaagtcatctaggggtaaaaaaaaaaaaaaaaacaattgatggaaagtagaagttttaatttgcttaactgttttttcaatcagttggatttgtccaaaaataaaatggcctgctctgaaatgcactaagctccattacctatgtaacaaacctgcacaccctgcacatgtaccctggaactaaaaataaaagtttatttaaaaaagtatatacataatcttgataacaacttgccaggggacagtgaagtagattctaatatcacgtaattggtcagattagattaccttccaagtccctcttagtcttgagattttatgattctataaaattattatttccttctctcataatatcatatttaaaaatatgtttctaccactaaagcttatctgatttgcctttttccattacatataacacctacatttatttcctgatacattattcaataatcaatttacttcaacttacatttgatttatttctcttcatcttagtcttttaaaactttttcccctctcagtaattttaatcttaacatctacaatttattaattcaaaataattttgaaaaatatctttaaaagtagacaaataactttgtgcttaatccagcctataaataaacatttgttcatattgaatagtttaaatctgattgtctcaaaatagctcacataacctttaagattaaaacacttgtttacttcaaaaagaagctgaaggttcatttggaagatgcctataaagtgctttaaaatgttttagtgaaacaagatataaaagatcaatgtttaattgaatattttataacttcttcatacttatagcttgttaaatctatgctgattcactaagacttataagatgctattaaaaaaacaaaattatcaattggtgtggaactttttctacgatataaaatgtttcaaaagtgtttctcctatggagatacagaaagatctacagaaataaacatacaacaaaactaaaaatattaattcatgttttatcacatttttatttgcttaacttttatagcctatgttcccatttataaaattgtgtgtaactatattttcaattgtttcaacagtggtatatcaaaagttaagcaaatgacaatgcacttaggttttgatggttatcagacatgcaatttgttgacctaaacagcatttgaaatgaacaaagagaaaaaaaaatgttttttttcacaaattttttacaatgcttcacaaatgtttttacaatgcttaaaaacagacaaacacaatacgtaaatggctacatgctgtacataatcacagattaccacagctacatttcaagtttggaactttcttgagtggctacttcattatacaacaaacagttctctaaccctagtttaattagtagtaaatcttttaaaagatgtatttattttatttaaaccatcagaatgagcaaaatatatgctagaccaaaaaataaagtctatcttagttatttcaatatcattgttcctctctgaaaaatgacagaatcattaaaactatttgaaatattgtaatgtttataatttaaaaaccaatcagcaatgtagacataattaatatttgttgaactaaaaattacatcctatatattacttttatgttttccttttatccattgtgcatcatcaataaagaacatctttttttaaatgagagttctcctttttcacaatgtaaatgatgtttggttaaaataaaactagggacatgtaaatgtctgtatgcaaagcactaaaaagtcacaacataaaatcaaatatccatcataatcacttactctacaatatttttatctggcctgtaatatttgtatgggtagtactcatgtttaacactaacaacctattctagctattcaatcttctgcagctccccagtaccatcaggccacactaacatctgctcagagtaaacaaattaatatattcagaactctctcatcaaaatgaccttgaaaatagttccaaaaagttaaagagattcagtaactttaggagtgatgttgcccaatgtctttcagggttactttaatatcctccagccctgaggctcaaagggcatgtgtgtgatttcacacttgcccacataaaatatggtgtatccaggagtgagtctcctcaaattgggcaaccacctgaaaaggccaaaaatatctctgtgacacatcaaactactgatgcagtttggtttttcctaaatctgactgattcattatggggatgtactcctttggcaaccctgcctagatataccactttgaagcccaatttggcgacccagtgagtgaaacacctatgacaaattttctttgtatatctatgtcttcctgtatgtaaaattcacatggaagaatttattatcctagaaaatactggaaagaggtttggaattcatgccagtgagtctgaaatgctatatttaaaaagaatccattttaatacatggtgctttttattactttctgggtccctgtagatattttactaatcttaataatcttgaagaatgctgagtattttaaagaacaaatgaaaacattgtaagtatgatatatacacacacgtatacacgtatatatatataatctaaattcattttatgcagaaccaacacagttgccatactaaatttagagtgtgtgtatatgtatatatcccaaaaaattccacaggcccctggctgtctctgtgaccaactccatcctttcctatcttttaatgtaggtaatacggacactaacttgtggtattatatgtcaataatatgaactaacgatggtataaattatagtatatacaaaattcactaaataaagatgtaaaacatatatccaggcctgtctatcgaaggattttatgcataaattaaaagagagtactgtttctttgcaaagggtgagttagagttctttgaatgcttttgaaaataggttcaagatcattctacctacaattataatagctaaataactttgccttccttggacaatgtattgcattctcttcaggaagaaatggcaagagatacagagatgattccccaggctaccttctattcactttgggagttagtggaagactgccctctttccaacacagtctctgatgaaagggatctattaaaaagaattgcgttggtttacactgcagattgaatggagcattaaacgaatgactgcattagtatgactgcagtgggggtaatggtcgcctctgtaatgttgtaataatactttcacatacgtgttattacacgtattaattgttccagtgtccgtatctaatttatcgcgaaatggtatccagcatctctcaggcaaatgcccccctcccaactccctgtgccctacagttttatgccccccgcccccggcaaatgtaaacagatgaggaaatatgtgtactttcaaatcgtcacccatgtatcatgaaggtgggggattactgcaaatcacttggaaaccgctccccggaggcgtttagcgataccgcccaccaatacagctcagatgttcttaatttgatcaccctccaccttttgggctgtaattttccaaacaggcatctctctcatttgcaaataaaagttacaaatcaatccacgggtacagaatgctgacttcccgacactcaatttcacagggtgtctcttgaagagctgccaggttgtgaccgataatgggggagagggaaaggcggacagcgaaagcgagagagagagagcgagagcgagagcgagagagagagcgagagagagagagacagagagaggagagagagagagagagagagagagagagacagagagagagagagagagagagatcacttgcttccttgcttcctaagccgggattttgcctgcgatgcgcggcgagaggactgcggcggctgatttacacagttggcgcggaggaggggccgggggtgcgggggggacgcgctggcggagctccggcgatgggctgatctgggggctcccgagcgccgctcccttggtgcgcgatttgggggcggctgatggatttgcattcaggttccagccctgcgtttcctatattgactccttatacacgacctggcgctccagtttaggaggagacgttggtaagtaacgtgtaatccgattttagttatttcctaggccattaaagtggcacttttaaagcaggtcagtcttaaaagatgccgccgccgccgccgccgcgagcgtctccttggcctgaaacgttcagcagtcccctccccctcccacccccctcccccgcaccttctcccgctcgagaagtgagggtgcttgaatggtgagcggtcagaggactcactctctgccaacggtatcgcttcaccttcgtgctttgcctgagatctcccaaatccaagtggaatttggtgtgcacagccatactgtgtatttgtatcttctctccccctctccttctttccccccaccttcgccgtctgaccaatgctgggatctgagatctagtcgcccccttcctgcctcctttccgcctctccccacccttttcttctctcatctacacgccaccaacccccactcccacccacctaaagggcaaagagcaaagacaccctggaaaagcaagggctaattccatcttctcggatggaaggaggcctcgggcagggattgcgctgtgagtgacaacctttgaggaagagagaaagagagaaatccagagactgagctcaggctctcgggaacaacgaagctctccactgatccagagcaccgagattttaaatcaaaggaacctagtcctgggacactcactctgcctgcctgcctaccaaccatcgagggcatagggagctgtggtcgtgagctccctgtcgctggcatcgccgcgctaggtgcgcgccccgctctcccattggtatgcagcgaccatttccctgcaagtctcaaaggtggaaacatttaaacggattacaagcgtgattcggtagcctttcggaaagttggtggccagaagaggagaagctacaaggctacagtatgatggatac

SEQ ID NO: 9625 - DNA, 6000 bp, Homo sapiens
agctggatgagccattggaagatttaggaagttcacttctgaggctcacatatgctccctttccattctttctaacttcctatgaaattaaactgaaaaaaaaatgtggtagttagctcattatatgctagctgtaacaaacattaagcaacatattcataatgatttcgtatactgccttagaatttggaaaagtttagggttggctagatatcctgctttagaatgttgttagaggtttgaaatgatagttcctcttcctttagactagctacacatcctgtggcaaatagggacttctaaatcacgtccattattagtagtctgtattcaaaaggtatttatttatttttattttattttatttattttttttttgagatggagtctcgctctgttgccaggctggagtgcaatggcgcaatctcagctcactgcaacctccgcctcccaggttcaagcgattctcctgcctcagcctcccgagcagctgggactacaggcacacgccaccatgcccagctaatttttgtatttttagtagagacagggtttcaccatgttggccaggatggtctcgatctcatgacctcgtgatccgcctgcctcagcctcccaaagtgctgggattacaggcgtgagccaccgcacccggcctcagaaggtatttcttagtgatattgatggtaaggtttctctcattgaaaagcatttttataaataagaacaaatcatctactttctcctctgccctcctcttcagatatagttgaaaattacaaaggtggcaacgtagtgacagatgtaaacaaggcataaagatacattgagtggggttcagttactcagttatgcattcaaccacagacctactttttagtttgttaatcttctaacaattactactaggtcattatcaaaatcctatgaaaaaggagtctcaaaacatctttcacaaaatgttcaaaaagacataataccttgaatgcagctttctttacctctcaaaacaggtcaggtaaaagtggcaatcagcaaggcaagtgtattcattaggggacagcaaactgatgaaatggcaaaaaggtgaagacatcatagagtgaagattgttttataggataaataacttttgtaattgtcagatgaaaagattaaaattagtttattaatactgaaaagctattttaaattttatttactattcatcaccttttcttaggtgatgatttctcctacaaattacaaaatattgagttccatttgtagtaaagaaatttaaataaaagatttagataatagaaattatttactctaggatcctaaatattattaatttaaaatcttacttttagaaattatacgtcagctgtctctctcaactttttattttttccttcccttattttgaaaatgaacaaatttgattaaaatgacaaattcacttaagttagagagaattaatattcccaaatgttatatttgcccttctcaaatgtaagaccttgagtatctttaagttaatttcttcctgcctcagaaataaaatactaaatcagtaaaattcttcagggtttataatttaaagttaaatatattgttaaatatatggaatatagaaatataattatatatactatttttaaaataacaaagaagcaaaaataaaatagaatgaacaacacaccttccaagaccagtataaacagctgttatgttataattgctacccaaaggcaatgttatgtaaattcattttataggccttggatagcttcctcatgttggccgctcaaaagctctatactgacattttcaggaaactagcagcatactttaccttggaaatgtaatattataaaaataccaccattagtaattttatgtacttctacatacccttcttgaatttgaaataatggataagttcaggtaataatttttgctgtctttcaaattttatgactaaaatattgagttgtgttttatggcctgcatttattatgttctgtagagtcagccagcagctttaggcaaagaatatctttggagtctggaatcagatgcaaaggaatcagaggtttaagatgaatcatacattcaggaaacataagaattttccaaagattctaaaatacatattgtacaatatatgagcaataattttccaaccctctatacaacttctttttcttttgtggctaggataattttctcttcaaatatggggcaagattattgccataaactttatttatttatatatttatttattttgagacagagtctcacctctgtcgcccaggctggagtgcagtggtgtgatcttggctcactgcaacctctacctaccaggctcaagggatcctcccaactcagtttcccgagtagctgggactataggtgcacgccaccatgcccagctaaatttttatatatttttttttttgtagaggaggggttttgctatgttgcccaggctggtctcatactcccaaacttaagcgatctgttcgcattaacctcccagaagtgctgggattacaggagtgagccaccatgcccagcctaaatttggatagtgtttttggaggaagagtttgtttaacaaagtactctgacaacagtaaggaatgtttagttatgaggaattttaaagagattccagtaattatccaatgttaatttctgagagtcaaactaaaaaagaggaatttaaagtggtagatttaataataaggaagattatgtagtatttacacaacaaaactcccaaactcctttagactgttttcttttacaatcagattctcatgttaatggagatataatttcttactgtaacttgtttaatagaatgagaacattgtttctattgaagaaaaagacatagagcagggtttggatctggattctaatcttgctgagtaactaactttatgcaagacctaaaaggtcctagagctgtcatagtcactttgataaactttggcttctttaccaacatgaaagtctaacaccctggctgtgatcagtgagacagtgtatctgcacacgaaagcattttgaataatttaacgcaagttattatttattaaggaaaagcacatgcaagacacactttatttttacagtggtataaatgccacagggtagcatcgttataaattcagtttattttagggctttagcaacctataatttcagagtccacctaaaaaaacttttgcaccaggaactgtctttctgttgcatttagctaaagagatttacccccattttgagcactcaggcccattagcaatggtaacgactaaagtccagttagaatataaaaattatgcagtgtatcataaattacaccacactatacagacagataaaatttacttttcttagaattcaggtcaacagcagaaacaaaaattatcatttgtgcataaccttaattattcccctcaagtacacagaaaaaataaatgcagtatacatttcttcgaagaggtttgtggttactacctttcctgtgctgtactagtttttacatagggaacctttgttgccctttaaaatgtaatttagaaatgtaactgatgtgttttgccaccaataaaacaaatacatatgacaaaatgaatggatactcatttcagtctgtacgatttgtttttaaattattctatttgcagctagaggagaaatgtgagaccatttctttcctctctgccaatggcaagccgatttccccagcccacgtggacaattgaacattaagtctagcgtgcttccagtctcccgactcctgccgggccatctgtgggcacacacacatctaggctagtacactggatggggtaaggcagtcgacatggcatctctggtttgactaccgggattgtgctatgtagctatcccatgtgtctgccgcatcagtttattggacagggaaagaaagtgtactcagcagagtgcacacagttactgccatccattctttcgttcatacacacattttactccgctctccacgtgcgttccgaacgagaactggaacacacacacacacacacacacacacacacacgtgttcaccgaacctcacccagactcaggcccggacaagtcccccgcccacccaaagctccccgcccttcgcccttccgcctgcctcttcccaccctctccgactccacgtgggcgcaccccggcgccaggcggccgcgctgcccacagagcccctagccggccccggcactgggagggaaggtgcggccctggggtcggacggacaaagccggcatccaatcgagcccggcactgcctccccgaagggagggagcgtctgctcggacgggcccaatgagcaaggaggccgagtgggacttcctcccggaatcccgttggccagaatagccgggccgtgggtgacacgtaagttgggcaggaggtggcggggcggcagaggcaccagccgacccgtcagtgacaccgctgtgccgtccccaaaaccagccgagacagctggcccccacccttccacccattgggcaggccgcacgggggcgcggcccggagtcctggtccctttgttgggcgcgcaccccctcccttaggtggcaacaaagtcgtgcagtgggagccgccgcgatagggcggggagtggccagggcgggactccaagaactgcccgggggcagcggggccaaaaagtgggaagaaggaaaaaaggcaggaggcatctggggacaggcgcgagggcagccggctctgaagtatgcggagggcctcctcccggccccgggcattcgcggagaacgagcctcgcagaagtttggctgcagctgcccgggcggcgtcgatggctgcgcgccccgcgccgcgcgggggctgagcgggcgccacttcccctccgggccggcttttgtgtctggcatctcctcctcatgctgcgtctggccacctactgcggcggccgctgctgagacgctcgctcggaccaaggggaggagacggcgggggcggccgcggctttgggtccaggcgggactatgggaaacgggatgtgctcccgaaagcagaagcggattttccagacgctgctgctgctgaccgtcgtgttcggctttctctacggcgcgatgctctactacgagctgcagacgcagctgcggaaagccgaggcggtggcgctcaagtaccagcagcaccaggagtccctctccgcccagttacaaggtacggctaacgggacgcgcgcagccggtggccaactttgccccgcgcctccacccgggcaggaaaagtggctttggtgagctattggcactgtggttgccacctctgaccttcagggacgtcagaggtgagcgtttcaggactgccggcaccagagtgtcaggggagatgacattctcatcctcccgcttcttcctcccagcggttaggtttagaacttcgtagcaccagcccatcgtcccgctgggcgtttggtgggcgggtgcacagatagtcctttacccgagctcttgtcaaaggcccagctgcaatcggggcagggaaactggtagccctccgccgcttctgccagccctgctctgaggagcattgttccgtggattctaggtatttgctttcttgttgactttgtcagttgcttaaaaaatgaagagtttggcagagatttctcaaactgtgctgtttttcaagggaaaattaagccatgacccagcagcttaattaaagtcatggcccagtcgaatggaaggaacctagatctggacctgctagtttcttatttcttattcttttaatttaataggatgtctttagagatgctggatgtgtgggaaaagtccacactacataccattcaccatcctgcagtagtttatttctttaaaaacaggtttacttgtcttcctaagtagcttttacttcatcacagagatgcatgtatgttacagttagcttcgggaagccaaagaggagaaacacaggttt

SEQ ID NO: 9626 - DNA, 6000 bp, Homo sapiens
gtaatagattggtgattgccaagatttaagaatgagtaagggtaagagggattcagtggggctataaatgggcaacatgaggtatcctcgtggtgataggaatgttctgtaacttgactattggggttaatatcctcattgtgatattgtactatagtcttgtaagatgttaccattggagaaaattgggtaaaggatacatgggctgtgttatttcttagaactgcatgtgaatctacaattatctcaaaaactctgattttttttttttttttttgagacagggtctcactctattctctaggctggagtgcagtggcacaatcatagctcactgtaacctcaaaatcctgggcctaagtgatcctctcacctcagcctcccaagtagctgggactacaggcgtgcaccatcatgcccggataatttttttaatatttttagagagacagggtctcactacgtttccttaggctggtcttgaactcttggcctcaagcaatcctctcaccttggcctcccaaactgcctggattataggcatgagccactatgcctggcaaaaagtttaagtttttaaagtaaaacaaaatatatctgttttcattattttatagtggccttctctgaagtctagaagataaacttggattgctactcagatgattaaagaattctacacccatactattaaatagcatcgtcacagtcatcccagtttaacaagtaagaaaactatctatcggctgggagcggtggctcacgcctgtaatcctaacactttgggaggccaaggcaggtggattgcctgagctcagaagttcaagaccagcctgggcaacacagtgaaaccccgtctctactaaaatacaaaaaaattagctgggcatggcaacatgcacctataatcccagctactcgggaggctgaggcaggagaattgctagaacctgggaggcagagtttttttatgagaacataaaaaactctgtgtgtgagcccagattgcaccactgtactccagcctgggtgacaaagcgagactccatctcttaaaaaaaaaaaaagaaaaaaaaaaaactacctatcaacccgagttatctctttccatcctctcccaaaagcaattatcagcaagtcctatctgctttacacaccaaaatatatcttgaatgtacacttctctttctctggtatcactattagccttggtggtcaatagcaagcatgaattgttgcaattgtacctctcctcttccacaaatgctcccatccaatccacccctcactcaatggcatgagtaatcttaagacatatattggatcatatcactcccattcttagttctctctggtgacttcccattgcccttcacctgaatcccaaattattcctatagcctacaaagccttgaggtctcaaccaaaaaggcacccctacacagaacacttttctgagcaccttttctaaaatgggtgccccctgttctcttccccagcacttttagtttctttcatacaatgtaagccccacaagatcagagactctactctgttttgttcactgttataaccggtgcttagcaaaatgttcagcaaatactacatttactgaatgttaaatcaataaatgtccaaatcccagcctgagataccccttcctccaacacaagaaagcatgtgacaacccttttggacttaatttattaaataaatacttgttgagtgcctgctatgtaccaggcagcattttaggcactggggataacaacaaggtctccacattcgtggaatttagctttggcaggaaagtggcaaacaacaatagacaagcaaataataaaatttcaagcataagcattaagaagaaaataaagcagagtaactggcccagggatgagttggagaaagtaggtggtatctatcttaagaagcctggttagggaatcctcactaagccgtcatctgaatgaagagaaggagccagctacatacaaatctagggagaagggctataggcagaagctcattgaggacaaaggtgctgaacatggaacatattagacaagtctgaggccagtgtggctgggcccacggaaggggagaaggtctcagagccacccagggcctatgtcaagtcaacctcttgggctgtggtgagaaacgtgggtttcttgctaagggtgattgggaagcctttggagacttttaagcaggagtgtattatgatctaactttaaaaatatatcttaactactgtgtcaagaaggtactgcagggtaagatgggagcagggaagtcaggtaggaggctgtgaagacatgtggaagagatgcagaccacagagatatctagggagagggtgtggagaggcgagaagaggatgtaaagagtttgccctcttttttggcaagctacaatggggaaaaatttggctcaaaaatcttaaaatacactgactgtccttcagggactgggaccttccgatattctcttgtactcctggcttggccaagtttgacctcatttaatttgttcccaggagatgcctttgcacttaaccacatctgacccaactggagaggaatgcagcatgctgaaatagctggtttatctctccactctcccctcctcatttatggaagaagaaaaaaaaactaattttactgaaggaaaggatgacaatgaaaaaaggggagagggagggcggactcttttcagtcctgtcaccacctagaacttctggcatccaccaagattacattaatcagcgaagtaatccgaatgtgacctagagggcttaaaagtatgaagcctaaagaacaaccacacagaactggtttcgccctgcccagtggaaatctccgggtgattgcaggcactggtgcacgttattgaatagcgcccactccaatggcaaagtgcgaaaagactgacttcaccacagccaggagtgcaacgacctgcagctcctcggtgggcgccaagacacgctctcctgaaaggctggaatcgcttatcagttctccgcgggcaaaagcaatcagagcatcaatgtaaatgaatcgcaccccctccccgcacggagataaagttttagcatatcccagatggtgcagagattactcattcatttctgagaaagagcagaaccacagaggccttggctgaacctgaggaaactgatcagggtgccccgaaggcccgctagtgaatggcgggtcgcgctcccaatgggagaagagaatggtttcctgccgccgtgctccgcgccggcaggccggggctgagcacaagaagttaaaggctcactggccgcccgcgcactcaaggcaaattccgtttctgaaaaggcaggttcaaaagacaaaggttggtaaaccacaccggtatcatttacgacgcggcacagagacgctttcctgcagaatgtcatgtcactggcaaatgccatggaaccgctcctgactgtggaccgctctggcaatggggcgtgctcatcaccagccaaaactgatgcggaaagtcagcgtggctaactgggcgctttaaagtctgacttcaaagctgctccccaaagcttggcactatgacacagagcacctcatgttatgactaaacgagttaatccatgtcaagtgctgagagcagcacctggcacccggcaagacctcagtaaagattaaccatcattactattaatatttgctcacgcttttccactatgaaattattgtattgtgtctgcattacatatgtctcatcttatatgttataaacacctagaaagaggaggctgtgacttatttatctcagtcatctcggagcatggaactgtgctggactcagtaaaagtttgtagtttgattgaattaccttctcaaaccaaacatttcaggtgtgtcaccttgcagaggtgacagaaatgaaaacagggtggcaaaataaaaaggtgaaatctgaatctcctctaatccttcattttctcaccctgtttcttcataacacccctcattgtgttgctgcttgttacatttttgttccgctgggaactggttccatttgagcctcagtgcaatctgtggccccagttgccacacacacttaaagctcaataaatttgatatctcctgaacccccacagggtttggatatcataagggatacttaggcccaagatcaagccatatgagcaggtttatttgagaactctacgttaaagcctccagcaagtgcttcttgacatatatgaagcaataataataacaaccgctatttgctaagtacttattatatgttgagatatgccaaacactttcacatattatctcatttaatccactcaacaaaacaaaatgtgtgttatttctattttatcaggcaaaaataaaaaactaatcagagaaaagtcacagtgagccacttgcttaaggttatactccccagtaaaatgttgagattcaaacccaagtccctaacaatccaaagctcatccaggtaaccattcaagtcaacaatggtctccggccacacagctcagctctaaacagaaacaccacagcactaattatctgtggagcagagtgcagtgtgcctcccatgctccacagcacagcacggcagctcagcatatctcatcttctacaaaagactccaaagatttctcttttcaccagctcccaattactgccacataacacatgccttgaaatgtgattgcctctggtttgtaacttatgcctaagggacctgctcccattttctttcctagtggaacaaaggtattgaagccacaggttgctgaggcaaagcacttattgattagattcccatcaatattcagctgccgctgagaagattagacttggactctcaggtctgggtagcccaactcctccctctccttgctcctcctcctgcaatgcataactaggcctaggcagagctgcgaataaacaggcaggagctagtcaggtgcatgtgccacactcacacaagacctggaattgacaggactcccaactagtacaatgacagaagataaggtaaagcagcattatattcatttcaagtctggttttcaggagatagttaggggaatacagtcaagtcatacagaggatttgggggaggttgggtgtagctaccacagatcaaaattaattctctttactttgccaattgaagaactgtttcttattcagtaattggggttttaaggatttttgctctgttaactgactagtctgcataagttttttcaagtaattgtgcataaccatattactaaagaaatatgtcccctcctaaccaaaaaaaaaaaaaaaaaaaagggggcagattgacctaaatttaatcatgaaaactcatcgggaatcttcaaaaacgtcaatgcaggagagacaaaagaggtagaagggttgttctctagattaaaagggattaagacaaactgacaaccaaatgcaacaaatgatttagattgtggaaggaagaaaaaaatagcaataagggaactatggagacgttgggaaattttaaatatgggctgcatcttaaataatattactgtatcaatttcacactcttggatataataatggtatctaattatgtaggaggatgtctttgttctttgtacatgctaaagtatttaggggtgaaatgacacaaatatctacagcttatttgtaaatggttcagccaaaacaacacacacacacaaacactacagagcgagagatcaacaaattggtgaatgttaaccagtggtgaataaaggcgaaggttatggaatgatcacttcactactgtttcaacttctctctagatatgatactttaaaaaaaaacttaaaaatataaaggatatagtgtccttgctcccttatacgtggtttctaaactcacccacccctgtacacacaatcatataagttgatcaatctgtgccctgtagggtctcacctttaagttctcatctggtgcaacttactctgct

SEQ ID NO: 9627 - DNA, 6000 bp, Homo sapiens
gccctatggacttaacctgtaagttactattatcctttattttattttattttattttatttacaaaatggattaaagactgaaatctaagatttcaaattataaaaccactaaaagaaaacactgaggaaactctccaggacattggagtgagcaaagatttcttgtggagtttatggatttttttttttttttttggaaactgaattcaattgcgcttatagttctttaatataattgcagcaaccaattggcatgtaattgtgttattccaaacaaatattcatttttaaatggctttttgcatgtttgcttatttactaatcatgctagtttgcataaatgtgcaaatccatgaaaacaaataaaattataaaagttatgtaaacattatcccattactggatatatacccaaaggattataaatcatgctactataaagacacaagcacacgtatgtttattgcggcactattcacaatagcaaagacttggaaccaacccaaatgtccatcaatggtaaactggattaagaaaatgtggcacatatacatcatggaatactatgcagccataaaaaaggatgagttcatgtcctttgtagtgacatggatgaagctggaaaccatcattctgagcaaactatcgcaaggatagaaaaccaaacaccgcatgttctcactcataggtgggaactgaacaatgagaacacttggacccagggcagggaatatcacacaccgaagcttgtcgtggggtggggggctgggggagggatagcattaggagaaataccttatgtaaatgatgagttaatgggtgcagcacaccaacacggcacatgtatgcatatgtaacaaaactgcatgttgtgcacatgtaccctagaacttaaagtataaaaaaaaaggttatgtaaacattgaaaatacagaaatatttcaaaaaagtcattagatagggggagtgggatccatttgggcttgttggacatgaaaaagcttcacagggactggctatgggtgactgagaagacttatctttggtattgcagggggagctgtaggcgtcagtgtgggacctttatagtcacatgctaggcagctcacaagtcgaccgttgctggaaaaaatgatgaaacatacaaatgggccacaggaagctgaaatgaggatacagaaacacaatgctctgcacatcttggcaatatctgctgtgttgctgtgttcctcattctctcttgagatttttggtgttaaccactgtcatttttttacaaaaaatttgagcctcactaatgacactgttctgatctttcagtgagtcactgttatggtggttgaagtgatttatgtcatcaggtaactggggatacaacatcttgctctatactccatgtctctagagaaacatgtgcattggttaattaacattagcaattagatgtttgcgaatgaatgaatgaaatgagtagttgctaatccacagactgtcaggtggactgaagggcacagaagtcatacagattatgtcagtgaggattattggggacaaataatgaatgcagacttgctctctgaaggaaaagggcaccggggcctcacagaatcaagacaaagtggaagaacagcaggaactaaggaagcaacaaaaagatttaaaaaaaagacccacaaaacctaggaagtaaaagtttcctaggttttactggtcagggtaaagctgctgatgggccgcttctgtctctgttcaataagctcaacctcaaagatcaccggctccctcatcccctgagattcagtccacctggcctatagggtaaatggaatggtggtgggaatatggaagaaggatctgaccttcacttttgaggttactgcttgaaattgctgtcttgccaggcctatgcctatttggggagaggtaattttctataagaaaatggaactgtcagaaaagatgatagatgttggtatcccaaaatgactagatgatctggatggcagtgcttgtatcaaatgtaccacaagggaaaatctgggggagcaccatttgtatgtcactttgataaaatagttctgtttctgttgaaagcattattgcaaattaacaagaaactaatttaccatagaaaaagaacaggtaatggacatgaatagatcattttcagtaaatggtacaaataataacatgaaaaaatcgtgttcagcattactgattataaaaaagttgattaaaacaagatatgattttgattcgtgacattttcaggttataagcaaggcaatatttaatactggagggtatttttgcagcatcacacagcaccttaaaaatgtttctaaatgctgatccagtatttctacttttaggaatctatcctaaggatgtagagatcttgacaaagatgatgcaacgtagtgttcattctagcatgatttgtaaactgcaataaagtctgaaaatatcctaaaacatttgataaatgattgtaatattcttcaaccacagaaatgatatcttaaagaaagtttaataacagtaaaaaatagtcaatttataaatacttagtgagataaggaagattctaaactctgtaaagcatggtgttaattttataacaaacctctgggcatagaaaaaataaggaaatatactaaatgctaatagagagtgtgtgtgtgggagttataggtgattttaattaaaaatgtttttctgtggtctctaaaacatagatgtaaaattttttttctaaaatatagatgttaaaattataaaaatgaacatatatgtttttattctcagaagaaaatagaacaattaaaaggatttcaaataccactttgacaaaaatgtcaagtgcatattgagatgaatgtatagcatgattacttagtcactgtttcttgacatctttgaagatatgaaagagttggaaagaaaaatcacaaaatctctcaggaaaataaaataattacatacaaaatcatactacttctaaaattcatgtttgggagtccataagcttcagttcatctctaaacaacatatggcatttcctattttattcctctatcccagggaggcagaaattcagttattgtaagggcacttagataattttctttctttctttctttcttttttttttttgagacagagtcttgctgtgtcaccaggctggaatgcagtggtgcaatctcaactcacagcaacctcctcctcccaggttcaaataatcctcctgcctcagcctcccgaatagcttcgattacaggaacctgcctccacctccggctaatttttgtatttttagtagagccggggtttcgccatgtggcccagactggtcttgagctcctgacctcaggtaatcaacgcgcttcggcctcccaaagtgttgggattacaggtgtgagccactgcgcttggccttgataattttatttctaattagatttagtagaaagacctattgttggaggcaagtgccaaatgttttcatagtgacacttaagaatttgggatgcaattttatagactgctgcttctcaaccaaaagcattataatttctaaagacaagcttgtaagaatgcagttacgtgtgtgcacaagacttatcagaccatctgtgactaataaagcttgagaaagaggggaggagagagggtattctgccttccagtaacatgcttgtctgaaacttactaaactcctcttaggcaatactctgctcagagagtcatgtgtttaattgtaaaaatctgtcagtatcataggattcaaaagacatcaatcatttatgtcaacaaggaaagagtgagggctgtgtgactcttctatcattaggaaaagatgtgctcaagagacaaaaatgtggtctaaggagggctgagcaactgtaggttacaggaaaactgagttccagactataatttggcccccctcccctaatttggactggtatattatatttttcatttcatgcaatgccatgtgtgcagtaagacattatgtaacttggtcagtcgcagttgtgtaatatccactaaatgctttaaagtggctgacgttattagcagtttggtgcatggggaggccattgcttcccctggctttggcgggatgcaatatcgtgtaatgaggttggaactggcctatattcaaaattacattcccaaagggctgctattcaagccacatgacaactggttctctttttcttaagactttattctaagtggactgaaaacagcaaaattgccgtgtttgaacggttccataggtggaatgggtcttttccctgttttgctcccaatttattattttatgctaagatttctgaattataaccagttttagagacatcgggacacaaattcccgtccccctccatctaagctgtgtgacctcgggctggttctgagccttcatttccttacctgtaaattggcgataacacttccctaaggaggtgcaagaaggcttataaagactccagcaaagctccagtctcttaattatgtcacctcaggcaagttatttagccgtttgatttgctgattccttacttataagttggaccagttgtggctactatccgcagtagtcgaagaatagatatcataggcaaagctccgggaaaggtggctggtccttggcggctcgagaggacctgataatggtcctaatagcgagcattccctagggtgatgcggtcgagttatgaaactttgggaaaagagaacaaggaacgcgggcgatcagaggcccagtcgcgagacctgccccgctggggcctccagccggcaccgcgacgccccgggacctggcaccgcctcgctccacccctgcgaatccggggcgaatccgggcggagagttcctgccggccgcgcagcgcagagccccctccggcccgccctctctccctccctcccgctgagctccagctgtgccagaggcacccgagccctgagagtccgccgccaacgcgcaggtgctagcggccccttcgccctgcaggtaggagccgcgccgagacccggatcaccgggcgcccgtgggagccgggtttccactgccctcgccctccgtccctcctccgcccaacctgggcagctggccgctccccgcccaacttggacgggatttcagcgagtgagtcggcggcggactccctagcgatccccaagggcctccctcgcacgccttcgggtggaattcctgcagggtgaaagctgacaactctggcacgcacttttgccgcgcgggcggctgcctggagcgcagagccgcgcaggctcaggctgaagcccaggcgtcctctgcaggatgcaccgcctcgccgccacagggcttcgggtgcagtgtgtgtggtgtccccaggtcatccgggcgcccttggttcgggtgcgcggtggcatgactgggctggtgggggcgatgggaccggcatcccgtaccaaccaggaagtgccgcgtcccaaggcttcgagcccagcccgcagagcacggtcctgggggtgtgatcacagctgctgaccgcggctcccgccgtgtgatgtgaccactcggaggtggggcgagggggccgggggccagcagcagggagtgtgtaaaaggtcttcttcctcacaatacgattgaaggtgtttgggacgtagggctcagatccaggagtgccgtcctccaagccttccataggattttgtgacgcccttgagaaccgcccttgtagactcagtcctgaactaccgccacgcctgtatttgctcctcctcatctcggattattgctttctttacttcctctgtgaagcactaaatactagtagctttttaagaacagaccacaacagtttcttcgtttgaccattactaagtctgcctccaaaatggggagttccgttaactttatcagccagccctgccaattttagttaagataagccttcgtgggcctccaaaggcctctgagagactaggtacccaga

SEQ ID NO: 9628 - DNA, 6000 bp, Homo sapiens
atctgaggcccagtttcctcatttataaaataaagcttctgggggaaatatggtctctacattttcttctcattcttaaattacataattcaatgaatttttccaaattttctcctctataagatcattcctattcctatagtagctaaaaatgcttttctttctcttttttttttttttgagacagagtctccctctgttgcaaggctggagtgcagtggtacaatctcggctcactgcaacctccgcctccctggttcaagcgattctcctgcctcagcctcctgagtagctgggactacaggcacatgccaccacgcccagataatttttgtatttttagtagggttggggtttcaccgtgttagccaggacggtctcaatctcctgacctcgtgatccgcccgcctcggcctcccaaagtgctgggattacaggtgtgagccactgtgcccggccaaaagagatttcttataatccatatctccactctctatcctcccatcctcttttgaactcactccaatcagactttcattcccatcacaccacagaaattctcatgaatatgatctccgatagtcaattctcaattctttattatttgactactagcaacatttgtttgtttgcttgttttgctttttggtttccaaaggctctccctcagaagaatattagcagcatttgacacagttaatcactccttcctccattgaacactttcttcacttggctaccaagacaccacacttacctggtttatgcctaccctttttcagtctattaaataattttctctttttttcctcatgtccccagattccaaacacaggtgtatcccaaaacacagttcttattcctcttctttctgtctccactcatgcaaagatgactttacctgttccatgggctgatgactcccaaacctctcttttgacaccagagttgtatgtccaactgcctattggacagcactacttggatatctcattggcatttcaaacttaacatggcaaaagccttccacttcctgcttgctcttcctgaagtttttctagttccattcagcggcaaatccatccttccagctgctaaagcctcaagctttggagtcactcttgacttttctttctctcacacactatacctcatccatcagcaaattttttcagctataccttaaatatataagcaggagtccagccacttcactctaccaccactgctactatcatttttcatttgaattattgcaacggcctcttattaaagtcatcatcaaactgggctcagtggctcatgcctgtagtcccagtaacttgggaagctaagaagggaggatcacttgatgccaggagttagaggctgcagtgagccatgatcatgccactgcacttcagcctggggaacagagcaagactttgactcaaaaaaaaaaaatagcataaaaataatagtcactattcatgttggaaacagatggtacactgccttagtctgggccgctataacaaaataccataaactggcagcttataaaaacagaaatttgtttctcagcgttctggaaagctgggaagtttgagtgaggtcctaactgatttggtgtctgatgagggcccatttcttcatagacagccatcttttcacccttaagtccaagacaaaggcagcatgtgtgtctggtaagggccctttctgtttcacagacagttccttctcactgtgttctcacagggtggaaggggtgagggtctctctcgtgcctctttatgaaggcgctaatctgattcacaagggctctaccattatgatctaatcacttcccaaaggccccatctccttataccatcgcattggttattagctttgaacatattaatttgggggaagacaaacattcacaccacggccaaatggagagtttaataagaggactgtttacaaagatgtggacaggattaagggaaactggcacaaaatgttccagtgccctgtgcctagcaagcaggggccagtagcaaaggcatgactatacttaaatgtgaaggagcaacaggaaggagtaatgaccagaacacttgcacacaacaggagctgtattcttcagcagaccaattcagtcagcttacaacaatcaccagaaagtgagaggtagaaataaaaaccatgaattcactttcctcctgccttctgatctcctgatcacagacctaaatgaaccctaagccagaaaacgagagagctgctcatggatacagttcattaaggtcaccctcctaacctttctgttcctctggagcacagagcaggaaaaaaaggtagagagaggatctggggaaaagcaaaatacatccagcaatatagcaaagcaatatagcaatatagtgaagtaaatgttactttcacagggtgaaatgaaacaatctatgtaaagcatttagtacaatgtctggcgtatggcttttagttggtgggggaaccccttatttgcctggcattatagttccaagtgtggatttttgcagtgataatttccaaactttaggtgatgatcaattagtgggctgtgagtttagtaggttttctagcacttatttttttaagaaacagaaaagaccagcatgcatttcatgaagtaaggataagtattatctcataaataaatctactatgtatatctgtgcgtgcaagtatgtatttgctccttgggtcacagtgtaaaatatatttcttactaaggatgacagtcaaaaaatgtttgaaagccacagtgcaagaacactcttagctaccgctctcaactctcacttatttcttcccaaggagaagtgacttacctgatttaaaaatttgggatgagaaactaagaagatgtgcttgagtcctttctcattcttttgtccctaccccctcttttgtcttttattactttctatagtaaactaaataatgtgttccaaagatttcaggtcctaatacttggaacctgtgaatgttaccttatatggcaaagtgttggaaactatgattaagttaaggatcttaagaaggggagattatcctggattatctgggtagctggtaaatgcaattacatatatcctttaagaggaaaccagaaggagattttacaaacagaagagaaggacaatgtgaagatggaaaagttggagcagagtgagatttcaagatgctggcttacaagactgcagtgattcagtcacaagtcaaggaatgctggcagtcaccagaagctagaagaaatgaggaatgattatccattcatcagtcagtggacatttaaaaagattacttttcaaggctgtttctaggatcttggcaggtaggtaagaggcaaccagacttaagattcatgagtgaggtatcatgagaatgaggaaggcttctacactccaatttgcactctggcttccctcataataatagccccacactgagtgatgaccataagcagaacacaatatgtgcataatctctacgttcacaaaaactcggcaaggtagttatcattaccttcattttacaaatgaggaagaaactcaatcagaaataacttttccaagtcacagtattagtaagtgacagagccaggttacctccagtttgatctgccaccaaaaaaagagctatctccagctcaacaaaatgtcttgctgtgttgctactcccaatttcctgagtctgggttttgtaaagtctcaaagctaattagagtctactgtaaatctattcctccagaaactgcattacacagtttgtacataccaaaaatatgcataataaatttttccagatagcattctagcttgttgatgccaatttggtcccaaggtcttatgcctcacttgattatttattttgtaattgttgggtaaaaaccagataaaagagaggcaaaagaggaagttataaacttaatgctagtgtcttagtgctggatgtcaccttaaatcatgtgttgacaataaattacatcacaaaaaccttagcgctagaagagctcttggattatcaaatgcaaactgcttttacagatgaggaaaacaaacccaaaaattttgcatatttgtttaataactaacaaactcatcaaagcagaattgcattgcaatgtaaacggatatttaacactgtaaattctgagtgggaagtaactccaaacttattttgatcatgcaaacgttgcattgtaaaattccattattgtctccattatttttttcttctcaagcatttatgtagggatgtatgaaactgatgtccacgtaagggcaaaatccagccctactttttattttgggtgaggaggaaaacttttaaatagcccttttcagttgtaggatcttgacattccatgttcagaatatgaactgtctttaatcccattctacaaaacgaaaacccaaatattcacaaagtcttgtcaagtcacatccttaaatgaagttcttttacattaaaaaatgctaccgagcaatccctgaaacacagtgtggttggtttcatttgtttttctgggcatctcgtttcctacactgggttacaacatatttgtttgggttcgtggtggaaatgtcacagcatgtttaactacattcattacccttgacaattattaacataaaataaaggcaaaacgaggtgctaagatgtagggggaaaaaatcggtctgagtaaggctgcccatgcccttccctgcaagaatttccaaatacccaccgcccaggagcaaaggacagaaaacacagagaagccccacccctacacccagaaataaagagatccgcccacccttcaaccaacccgaagtcgctttctccgctctgtccactgcttgagcgactttccttctcctccgcgtccccttttacgacagttttccggcctagtttgcggctgctcctgccgtgttgcgtagggcgcctgtgcttgaggttgggggttgcgtcgctctctggtaaaggcgtgcaggtgttggccgcggcctctgagctgggatgagccgtgctcccggtggaagcaagggagcccagccggagccatggtgagtgcggccttccggtcttcttggcgacctccggcccaggcctcaacctcagctccccgcctcggaggtgtggagttgaagttgtgctccttagtgcgactgcgggcgggaggtttcggttattggggagtcacactcaccaggacacaaccctgttggctcgctctcttgggggtttgtgtttttacatcgtctttctgcacggttctccagcttcttgtccgcacgggctctgcaggtgttgcttgcctggaactcctgtaaggtcagaggctgtcatggactcggagattagtggaaacgtatttgattataagtgcccttgccctaacacatcttcacagcactagctccactttgctatgtccttctctttggcttttgctgacagatgtcttctccatgcttcctgaacatatttgggcctgtcttgttaggaaacaacagggcagtgccaaaggtattagtctcctagtttagcccacgtttagcctcgaaaatgcgttgttagaattttacaggagccgtctgtaaacagtttttccttctgtagcagaaaccttatttccacatttttttttttttttttgagacagagtcttgctcggtcgcctaggctggagtgcagtggcacaatcttggctcactacaagctccgcctcccgggttcgccattctcctgcctcagcctcccaagtagctgggattacaggcgcccaccaccacgcccagctaattttttttttttttgtatttttagtagagacggggtttcaccatggtagccaggatggtctcgatctcccgacctagtgatacgcccgcctcgcctcccaaaatgctggaattacaggcgtgagccaccgcgcctggcctatttccactacttttgattgaactttaatgtgacttaatttgtctggtg

SEQ ID NO: 9629 - DNA, 6000 bp, Homo sapiens
tatctcagaatgtgactatattcggagatagggtctttaagaggtaaaacgagttcaaagagtaggcactaatcctacctgactaatgtccttataagaagaggagattaggacagacaaaggcatgcacagagggatgaccatgtgaaacaaaggtgtctactagccaaggagagaggccttagaaagaactaacccgggccgggtgcagtggctcacgcctgtaatctcagtactttgggaggccgaggcgggtgtattacctgagatcaggagtttgagatcaacctggccaacatggtgaaaccccgtctctactaaaaatacaaaaattagccaggtgcagtgagaggcacctgtaatcccagctactcgggaggctgaggcaggagaatcgcttgagcctgggaggcagaatttgcagtaagccgagatcacaccactgcatcccagcctgggtgacagaaagagactctgtctcaaaaaaaaaaaaaaaaaaggaaaaagaaaaaaccaacccggctgacactttgatctcacatgtctggtttccagaattataagaaagcaaatgtctgtggtttaattacccagtctgtggcactttgttatgtcagtcctgaaaactaatgtaaccaaccatagtcttggtcaaaaaacaaatatcaataaatttgtaagatttaagtccataattatgttttcaaccacagtggaattaaaaatcaataaaagaaagatatctgaaaaactatatgtttggaaatgaaataatgctattttaaataaccatgagtcgaggagatagcaaaaggaaattaggaagtctttctaattatatgaaaatgaaaacatattaaacttgtgggatccaactaaagtagtaattagagggacgttcataacagtaaacctgtttattagagatgaagaaagattttataccactggcctcaacttccatctttttttttttctttttttttttttgagacagagtctagctcctgtcacccaggctggagtgcagtggcgtgatctcagctcactgtaacctccacctcccgggttcaagcgattctcctgcctcagcctcccgagtagctgggatcacaggtgcccaccaccacacccagctaatttttgtatttttagtagagacggagtttcaccatgttggccaggctggtcttgaactcctgacctcaggtgatcctcccacctcagcctcctaaagtgctgggatatcccaggcaagttccatctttgaaaactattgaaagaggagcaaataaaacacaagttaagtagaagaaagaaaataataaagatcaggtagaaatgaataaaacagaaaacataagaacaatgaaggaactcgatgaaatgaaatttttttttttttcttgaaaacatgaatagaattgatcaacctccagccaaacttatcagggaaaaaagagagaaaatacaaattattaatattagcagggaaataagagagaaaatacaaattattaatattagtaataaaagaagtgacatcactacctatactacagatattgtaagacaagggattgttatgaaaagctttatgctaataaatccaacaacttagttgaaataaaaacctttttttttcctcttcttttcttttttttagacacagggtctggctttgtcacccaggctagagtgcagtcgcttgatcgcagctcactacagtcttgacctctcaggctcaagcaatcctcctgcttcagcctcccaagtagctgggactacaggcatgtgccaccatgcccagctaatttaaaaaatttttaatagtggcagggtctccctgtgttgcccaggctggacttgaacttctggcctcaagtgaccctcccaccttggcctcccaaagtgcttggattataggcatgaaccactgtaccagccagaaaacgttttttgaaaataataaactatgatactgcgatataataatatatctttggtctctgtcccagtttctaagacagagctcctaaaatccttatatgccagagttctaggagaatcttttgttttaatacttggtctttgaccctggttcctgaaacagagctcctaaatcccttggaatttccagggtaagaggagcagctttattttatttatttttttttttttgagacggagtctccttctgtcgcccgggctggagtgcagtggcgcgatctccgctcactgcaagctccacctcctgggttcacaccattctcctgcctcagcctcccgagtagctgggactacatgcacctgccaccacgcctggctaatttttttatatttttaatagaactgggtttcactgtgttagccaggatggtctccatctcctgacctcgtgatccgcccgcctcggcctcctaaagtgctgggattacaggcgtgagccactgcgcccggctatgtgcttaaaatcctagactctcaaggcagacaagatttatggtcaggtttcggtatttattatctaagtgactctgggcaactcccttctttgtgcttagtttctccatctgcgaaatggggcagcgataataacaacagtgtccatatagagtggctatggcgcttaaatggaataagaagagtgcctggcacacagtctatacccacttaattatcgtcttttgaataaactgtctcaaagatcagaaagcaggtagttgctgaaactaggttgactggcacaagttaaccctcacttttcaccataaaaattccattctgaaacacactgcaagctttggttaagtttacttgattagtgtttggagcaacatagtaagacaaaatagttgtagccaaagttatttttcagaaaataatttgaggctaggctgaaagccctcaatctagtgataaggagggtctcctaatatactgcttaaatgtgtattccccactgggactcaagccctgtcaaaacatcgttgttttgacagacaatccaattaatagaggaaggagataagacattaaaaggttgcctgtcagcgttgttgagccgtgggccgtggcttacgcctgtaatcccaatggttggctaacgcaggaggatcatttgaggccaggaactcgagaccagcctgggcaacacagcgagacctcctctctacataaaataaaataaaatagctgggcgtggtggcacgcgcctttggtcccagctactcaggaggctaaggtgggagactcacttgaggccaggaggtcgaagttgcagtgagccgagatcacgccactgcactccagcctgggtgatagagcgagaccctgactccaaaaaaaaaaaaaaaacgatattgtgtgttttttgttccaggattttctggtctgtaaaaccacctggggccaggcacagtggctcacgcttgtaatcccagatctttggaaggccgaggcgggcggatcacctggggtcaggagtttgagaccagcttggccaacacggtgaaacctggtctctactaaaaatacaaaaaattagccggacgtggtggcgcacatctgtaatcccagctactgtggaggctgaggcaggagaatcgcctgaacccaagtttgcagtgagccgagatcacgccattgccctccagcctgggcgacagagtgagaccctgtctcaaaaacaaaaacaaaaacaaacaaacaaaaacaaagaaagaaaaagaaaaaagaaaataaaaaaacacactgggagtgggcattattatgtccgttttacagctgaagaatccaaggctcctagaggttccccgacgccgcacgccggggagtcggcagcgcgagctcccagccagacctagcgcctctgggctgtgctcctgttgcttcccgcaaaccgcggtcctggcgaggcctgggcgtggagcgcggctgccgcagactccctgggaagacatggagtcagggtgcttaggggtttttaggctcctgctcgcctagtggctggctttctcccggctgagaagcgtctctgggttcccagaaaggtacccgagctgttagaaaagaggagaccctgggccgggcgcagtggctcacgcctgtaatcccaacactttgggaggccgaggcgggcggatcacaaggtcaggagatcgagaccagcctggccaacagggtgaaaccccgtctctactaaaatacaaaaattagctgggcgtggtggcgggcgcctgtaaccccagctactcgggaggctgcggcaggagaatcgcttgaaccagggcagtgagccgagatcccgccactgcactccagcctggcgacagagcgagactttgtctcaaaaaacaaaacaaaacaaaacaaaacaaaagaaataaaaagaaaagaaataaaagaggagaccctggccgggctcggtggctcacgtctataatcccagcactttgggaggtcgaggcgggcgaatcacgaggtcaggagctcgagaccagcctggccaatatggtgacaccccgtctctactaaaaatacaaaaattagccgggtgtggtggtgcatgcctgtaatcccagctactcgggaggctgaggcagaagaatcgcttgaacccgggaggcagaggttgtagtgagccgagatcgcgccactgcactccaccctgggcgacagagcgagacttcgtctcaaaaagaaaagaaaaagaaaggaggagacccagggtatgagcggaggaggccggcgctgccgggaccacgcgcgtgcggtaaacggtcccagaggcccgggccccggcggctgcgccgagtccccgcccctccctgctccgtaggggtaggagggggccggcggagtttccctccccgcccagcggccctgggcgggcttttcggctgcttctcataagcaggtggtttcgtttctccggcacaggtaggtttctctggcaccgattcggggcctgcccggacttcgccgcacgctgcagaacctcgcccagcgcccaccatgccccggcagctcagcgcggcggccgcgctcttcgcgtccctggccggtgagtggccctcagcgcttcccgcggtggccctgacgtgtcggtcccctttcatctaaacgcactctggagtcccgggcgccacaggacgggctgcgggtagggaggtgtggcgcgtccaagggcttcccagctggaacttgttttccgtgagttactcagagcaggtgtcaaccccaaagacagtgacactgtccctcgcttccaaaagggttctggacaccttctcagggagagtttgtagaggtcactcggatttaagagatggagacctgagctagggtttaggaatgggagtcttggctttgttatccgggaaaagcgctcctgtcttgcttttccttgcatcagatgtggtctgacagattgtgccatttcagaaaggtgtaggaagagtgtcaaagacttttttttttttaaatgatcattgtacttcccatcccagatgccgtctgggacgctgagtttatgattattttatgatccgaccctccgctttctccagagcttttccccctagacattgagtcctcgggtgctgtggtgttgtccctgtgatgaagtttcctggttactcgaacgtcatgagagaactgtctccgtccctaccgcccggctaacatgctcaagcagggggcgcggtggcccttgcttgtaacatgaatgctaggaatgttagggaagaggtgagaagggtcgtgccagctgcccttgcctaggcagttctcccctgcgccacactttcacacttacagtttcaggttcttttaggggacagaagaggaagtcatcatcacgctccacagggcaagctattaaaaaagcaaaacaatctcagcctagcggtaacccacagtgacctgtatgtgagcgctccttgaatggatggataggctcagaaacacaatggtattgacaggccaggcgtggtggct

SEQ ID NO: 9630 - DNA, 6000 bp, Homo sapiens
tgaaatggtaaattcacagatccctatagagaatcgtgaagggtctaatatttcaccctacttgaaaactaacaagttagcctggtatagttttatgggtgctggcagaaaatacaagactcctgggtcagaaatgaaggacaatttattacccacagcaatagcattagccagactattagaatttttgtgctggttccttgagtcccaattctcatggagcaatgtgaagagggctggactgtacctgcagactcagtgggttgcattaaggagaggaattctgaactgaggaagtagaatcttttatttatttattttgagacagagtcttgctttgttgcccaggctggagtgcaacggcatgatctcagctcactgcagcctctgcctccatggttccagtgattctcctgcctcaacctcctgggtagctgggattacaggcgtgtaccatcacacctggctaatttttgtatttttagtagagacggggtttcaccatgttggccaggctggtctcgaactcctgacctcaggtgatccacccacctaggactcccaaagtgctagagccaccgtgcctggctgaatcagaatcttttatttatttaatgattattattttttttgagacaaagtctcgctttgtcccccaggctggagtgcagtggcacagtcttggctcactgcaacttctgcctcctgggttcacctgattctcttgcctcagcctcctgagtagctggaactacagacgtgtgccaccaagcctggctaatttttctaattttagtagagatggggttttaccatgttggccaggctggcgttgaactccttgcctcaagtgatccacccacctcggcctcccaaaatactgggattacaggcatgagcccctatgccccgtcatggcattagaatcttttatgataggcagcacacaagcctgtgctctctagggtgatattatctttcttccaaggttataagccaactgccctttgctcttgaggaaaacatctctacctttcaagattgttcgcttgtttactataaaaactcactattaaacagtagattccccaggctcagtattctttggttgagatgcaaatccactgcatgttcttcatccatttggctcatggcattgccaccatgggacttggagaacatgccgtggtaatataaagtgttttgtctctgacccaggagtctcctgtcttttgccaacatccaatcttttagcttgcaaatagggtaaaatcaaatcccagacttgacacctctgatataaccaaagtgaatttattttttagaaactgatgtgtattttccatcaacgttatttccatgttgcttaagagcctgtgcaagaacagcttaagaccattcagtggttgtttctacccattcagtggcctgagcagtgggagctgcagaccagtcttctgtggcaggctgagcactccagtcttcagtagggacctgatgaataggcacagagggcacctgtacaccatcagaccagtctccaacctcaggctgaatagcggtgaactcaggagctggagcagtccatttgccctgaaattcctccttggtcacagtcttttcagcagcaacctgctcctcttttccaatctcttcaggatctctgtagaagtagagatcaggcatgacctcccatgggtgttcgagggaaatggtgccacacacgcgcagaacttccagggccagcatccaccagctcggacccactgagggagctcccttgttgttgcatgtgatggcaatgtccacatagcgcagaggaaaatctgtgtgacatagagcaatggtaggtaggttaacataagatgtctctgtgagaggctggtggtcagccctgggatcagtaaccactagaagccgtggctccctgaaggctgcctgggtctggctagtgaaggttccaggagtgaagcggccaacaatttgagtggctccagtggcagcagcaaacttcagcacagccctctggccagtattgctagaggacatgacactgacatcaacagggtttttaaaggcagcgatggcacgagctgccagcagaaacttcttgcttctcccaggtcctcttcagatgtaggatgtagacgccatcacttttcttcttacagatgtgctactccatttggaagtcaaggttggtaccacctaagtgggttcctgctgcaaggaacttaaggacatcctcctccttcatttgcaggacatcaagggctctagacattgtgaaagtttccctttaagttacaatgagaattgtagggaccagccccacagggtcggtgggtctctccccacatgcagagacgagagagcgtagaaataaagacacaagacaaagagataaaagaaaagacagctgtgcccgggggaccactaccaccaagacacggagaccggtagtggccccaaatgccaggctgcactgatatttattggatacaagacaaaggggcaggataaggagagtgagccatctccaatgataggtaaggccacgtgggtcacgtgtccactggacgggggcccttccctgcctggcagccgaggcagagagagagaggagacaaagagagaaacaacttacaccattatgagagacttttagtactttcactaatttgctactgctatctagaaggcagagccaggtgtacaggatggaacacgaaggcagactaggagcgtgaccactgaagcacagcatcacagggagacggttaggcctccggataactgcgggaaagcctgactaatgtcaggccctccacaagaggtggaggagtagagtcttctctaaactcccccagggactactaagtagcaggtgtttttccttgacatgctaccgctagaccacagtctgcttggcaacgggcatcttcccagacgctggcattacccctagaccaaggagccctctggtggccctgtctgggcataatagaaggctcgcactcttgtcttttggtcactcctcactatgtcccctcagctcctgcctctgtatggcccggtttttcctaggttatgattatagagcgaggattattataatattggaataaagaataattgctacaaactgatgattaatgatattcatatataatcacgtctatgatctagatctagtataactcttgttgttttatatattttattatactggaacagctcgtgcccttggtctcttgcctcggcacctggatggcttgccgcccacagagaatctagaacaatgccgtatgggcccctctctgggttgtgtggaaaaggcgtgaatttattttagtttttcaaacaagtcgtgcgctgggagacatcacaaatgctattctttctgaggaacacttcaatcctcttctcttggtgacctctatcagtttctctgggaagccttctccctgagcctcccatgccccttccttcaattgggctatatcccccctctctagactcctacagagccttctcccccaatacaatagaatctttgtgaggtcagatatagtgtcttctcaattgtatccccaggtttaacatatcacctgacacactgtaggtgcttaataagagcttatggaatgaatgaagtgctattgcagagataagcataaagcggtatgtgagtacaaaggaagggaatctaaattggagtggaggtctgggaaaggcctcctggaagaggtgacacttgaggctgacctgaaggacaagtcggttagatgtttcaagtggtgagaacggtagcatgaatgctcagcagtgggaacgcggatggtgcctttgagtaatggccaatgactgtatggctgcagctagggtcggggggaatggaatggcagggaatcaagctaactgacaggtagttgagggatggattatgaaaaagtgaaagcccgcttttcatttcaggcttggattttgtgtttatttacttatttatttatgagaaagggtctcactctgttgcccaggctggcacgatatcggctcactgcaacctcccgagttcaagtgattctcccacctcagcctctcgagtagctgggattacaggtttgcgccaccacgcccagctaatttttgtatttgtatttgtaatttttttgagacggatctcgctctgtcacctaggctggagtgcagtggtccaatctcggctcactgcaacctccgcctcccaggttcaagcaatactcctgcctcagccaactgagtagctgggattacaggcccctgccaccatgcccggctaatttttgtatttttagtagagacggggtttcaccatgttggccgggctggtatcgaactcctgacctcaggtgatccgccggcctcggcctcccaaagtgctgggattaaaggggtgagccaccccgcccgataggcttggactttgttaaaggcatacagaataacacgaagtggtgagatgcagaaaaaagtagtaatttaagaaaacttggcttgccacgttggttcctctagggaccagccctgcaactccgggcaagtcctatcccctctgaccagaggcaaagtgaaacagtgatgacatctacctctagcagtgctgtgacgattaaatgcgatcttaggcaaagcgcctggtatgtgccgttactcgaaaaaatgacagttgtccctcttcgctctggccccatcctcctcatctgcaaatgccgggaggccgggccactctcgcaggtcgctcccggagccagctgagcagtgggaggggaagcggtgggacagaagggcgccagccagtcgtccgggcaccgtggctggttcggctgccgctcagccgcgcgggggcgctctagactgctcctcgtgctctatggtgttgccttcgccccggaagtagttgcgcagctggggttggtaaggtcgggccatggtggggcagaggttgggaagatggcgtggcgaggctgggcgcagagaggctggggctgcggccaggcgtggggtgcgtcggtgggcggccgcagctgcgaggagctcactgcggtcctaaccccgccgcagctcctcggacgcaggtaatagccgccgcgctctggtcttctcgcctcttggtccctgagctctggccgtgtatcctcgggggcggaggccgtctgggcctcttgtgctggccccagctcacccccttcaccttacctgccccttctctctcctctctcgcctccgtccagtcctcgcttctcgctccccttgcccagcccagccccccgcgagcctgcgctttctcctttcccattgggaaggacgtgactggaaggggaactaagctgagggttcattgcgtgccacacttcataatcgcgagtggaaactgttgagccagtttctgaagtgaagaagttagtacagctggcagaatggcggtttttattctttttccatctaattataaaggttgtgttccattacaaccagtcgccttctttagcttgtgatctaagggaggacgaagtctgatggaaggtatcactttgtgtctggcaaagtcgtaggagaggctttattgttgaattgagacagtggaagatttcgtttccggttgatttggaaagaaaactgccgaaccttccgagtagaagtgtgaagcgtatggttgatcagtattgctgatttttgcatcacagtaattcatttctaatttgagagagaagagagaaattcctcacctgtttaagaatctgatgtgcatttggctttgaaaattttcctcctcttttgttcaaaacttcattccttccaatttctgacttggttagatgggtgcctcgaatccacctgattgctgataagaaacattgtttatcaacacgtgggatagtcagtggtaaataatcgaggctctaatgtggcggagccattgcctaatctcaaggatcacctgaagagtttgtatggatt

SEQ ID NO: 9631 - DNA, 6000 bp, Homo sapiens
gggcagatcacttgaggtcaggaattggagaccagcctggccaacatggtgaaaccccgtctctactaaaaatacaaaaattagccaggtgtggtggtgggcgcctgtaatcccagctactcggaaggctgaggcaggagaatcgcttgaacccaggaggtggagtttgcagtgagctgagattgcaccactgcactccagcctggacaacagaacgagattccatgtaaaaaaaaaaaaaaaaaagacactattattactattcccattttctacatgggaaaattgaggaaagtggtaagaaactttctcaaggtcacatagtcagtggaagagccagaatttggacccaggcctctatcgctccagagccagagctcttaaaccactgtgttcaactgcctcccagttttcaagaggcccactcaccttcagtcgtgacattccattgttagctatatccatatgaccattaggctataattcacaatgtagtcattttaccagttttaagagttccagatgcctccctactcccatctgtgtggtgtcacaaagcacccttactttaccacttccttgctgcatgacagtagtggacactgtcagtgttctgaccagatgccctgggagtctttttaccgatttttatttttatatccctgggttttggtgtgtgtttgcttctaatggtgtacatctgtgactcttcaggctgaaactaccttcagggaaactttgcttcttccctttctctgttccctctagctcttaccaattctcctgggagcacattcttgacaagtaacttggacatgaatcctcatctcaggatttgcttctggggaactcaatctaagacaatgagtgcaggggttgccaaatgcagcttgccacctattttgttagataaagttatattgaaacatggctattctcattcactttttttttttttttttttttttttgagatggagtttcaccctgtcacccaggctggagtgcagtggtgaaatcttggctcactgcaacctccgcctccctggttcaagcaattaattctcttgcctcagcctctggagtagctgggattacaggtgcctgccaccacacctggctgatttttatgtttttagtagagacggggtttcaccatgctggccaggctgctctcgaactcctgacctcaggtgacccgcccgcctcggcctcccaaagtggtgggattacaggcgtgagccaccctgcccggccatcattcacttttgtattgtctgtagctgcttttccactacaatagcggaaccaagtcattgtaaaagagactgtgtagcctgcaaagcctaaaaaatttacttgtttggccattttcaaacaaagtttacagacccctaacctggagtaagtctcttagtacttttgacttgtcttcaggggttgtcataaggattaagtaagttagaaagggcccagcacattctctggctcttatcaggcactcaacttaagtctgttgaggtggaatgtaacgtagagtatttcccaagttgtgggtcctgttcttacatcttggggattctagaaattccccttttgatttttagacttcttgcccctcctatccagaaaaggatagttcccagttaagcagattttttttaaagcatcagtttggtgaaaaaccagtcaagcagattttaaggcagtgttactctgccaatcaccagcataagaatctgctgtgaagcttgttgaacatacagattcctgagacccacattagaccatccctggaattagaatctcacagtgcagtctagttccccaggtaattttgatacacactaaagcttgagaaaacagatctaaggtaaatctataaataagtgcaatggtttaaaatcacagattcaagaaagtgtttacttgtggggagaaggggttttaggaggaccacacagagaaccttgaatatacttttcattttgccaggcattgttctaggtatccttcatgctcatttaatcaacttaaagcccaattaataaatatgcttatgtttttaaggttgagaaaatggaagcacagaaattcaagtattttgtccaggattacacagccagtataagccgagccaagattccaacataattcactgcctctggagtccaaggtggttttttgtttgtttgttttttgttttgctttgttttgagacagggtctcattctgtcgcctaggctggagcccattggagccatcacagctcactgcagcctggatctcctggctcaaacgatcctcctgcctcagcctcttgagtaactcggactatgggcacaggccaccatgcccagctaagttttaattttttttttttttgagacagggtcttactctgtcacccaggctggagtggagtggtgcaatctcagctcactgcaacctccacctcctgggctcaagtgattctcctgcctcagcctcccaagtacctgggattacaggcacgtgccaccacacctggctgatttttgtatttttagtagagacggggtttcaccatgttggccaggcttgtcttgaactcctgacctcaaatgatccacccgccttggtctcccaaagtgttgtgattacaagcataagccactgctctggcctaaattttttgtagagatgggatctcactatgttgcccaggctggtcttgagctcctgcgatcaagtgatccttccaccttggcctcccaaagtgctgggattatgagcatgaatcatgaggccagcccagagtccaagttcttttctttttttttttttttttttgagacagagttttgctcttcttgcacaggctggagtgcaatggcatgatcttggctcaccacaacctccgcctccctggttcaagcgattttcctgcctcagcctcccaagtagttgggattataggcatgcgccaccacacccgactaattttttgtatttttagtagagatggggtttctccatgttggtcaggctgatctcgaactcccgacctcaggtgatccgcccgccttggcctcccaaagtgctgggattaatggcgtgagccaccgcgcccagccaagttattaaccactaaattatacttttttttctatccctagtaatgttctatttctcaaactgagtggaatagacacacacattagatttgttatttataccttacatatatattacatataccttttttatttattaaagacttcacttaaacatacaaaggcttttacaaagagcaaagtaaaaacgacaattggaagaaaatctgttgctcattcaaactttactagcgcctccaaggctgacactaggagagaacctcaagaggtcagccgaacaccccagagccctacctttcctccagcacgtctccctttggggaatcgtatcaccctgggcggcaatctcccctccacccctagagggtgctgttctcactctctaaggcataggaccaagtttcagacaggactctctctaggtgactctggctcccagtgcccaggggcaaaaagaaaagcgctgggcattattctcgaggtgcctgcgcgtgccgcctccgatgtgaactcgcagtaccatttctagaactgaatctaaagctcagaacgggttcatgacttgtcctaagttttacaagtcaattagcgctaggacttgatctcggtcctctgagcaatccggtccccaaggctgcctgcctcccgagggtccggacagggtcttgggtacccccaacgctcaaactctgagggactgtctttctccagagggccccgggaccaacaatctcttactcctgttagccttgactaaatacagccgggactctgaaggagctggatctcgcgtcccaacgcaggcgtcctccaagagggatagacaggcgggaggaaagcggaccaggccaagcccatgcggcgccggtcctgccagctctacctggcggggccgcgccgggattacccacctagcacaaggatacggtcctcgggccgcagctccggctctaggagggcacggaaggaggagaagtccccgaaccaatcgtagggggcagaatcggctgcgccttggtagcgctgatcccagtactcgacttcgcggtacccgcagttccgctccggtaactccggaggcgccctacctgcccctggagaggccatgctctcaaccgccgggcagccagagccgccggcccttcagccaatacggaaggcaggatgcagaaggcggggcgctggtgtctccgcccaccacctgcagttgctcaacacaaacacgtggaacttccgtcctttactaagcgctcttcgaagaatcctccggctgggaaaactatcgtccagaccctgaatcctccggctgtactgccaagtcatttcctagggccgcactcaaggtgtcagactcacgtgggctcatcactgcgtcctctcatattttcaatatgaatgacttttatcaggaaatctgaaaattagtgaaaggttcatttttctcagcatccggaaggctcgaagggcaggcaggaggggcgcgaacaggggctttgccctcctggagagacagcatgaacacagatgttcccagcgcaggcgaaggagaatgctggcttcagcggttgtgggggaggtaggcaggaatgttgcttttctggacattcgttctaaattagcgcctgtgtacccagggctgggtataaactgaggagtaagacattgtccctgctcctatggagcgtggagtgcatcagaggagacaaatgcagaaaaattacattttagtggagtaaatgaagactggctactcggatcggcgcttagcctggtgggacgccaggcacgggaagcggaacctaagtgtcgaaggttcgggtttccgggggtggtgggcccacacaagcggcgcaccgttaagatggcggctgggctgcggaaacgcggccggtccggttccgcggcccaggcagagggactctgcaagcaatggctgcagcgcgcctggcaagagcggcgcctgctgctgcgggagccgcgctacacgctgctggtggccgcctgcctctgcctggcggaggtgggcatcaccttctgggtcattcacagggtggcatgtgagtgcgccgagggggaggggaggggagggagggagacctgaacccgcgacccaaactggatctcagacctggaactccaaaccagactctgtatccactcactcgtcaattgcgaacccatccatatcccttacctgagcgccaagcctgctctacagaaaaccggatcttaatctgcccgcatggcagaggtggataccctagagattggccttctgcactgaacttacagcctgcaaaccagcttagaagtcagatttgagccaaaattgttgtactgctgctgctgctgcttttctctgtggctttggacacctcaggtctcctcctggatctcagctttttccatgtgttcagttctgtgatctttgaacgtcccttctcaatgatggcatcttgtgaccacttgagtccattaggcattattggctactcctttccaggctgaaactatactctaggcttaaggcacttggctttcttgctaaagactcttaattcaacaaatatttatttagtgcttattatatgcctagcattatgctggttaccagagagaggtacagtggtgaataagagatgcatttctgccgggcgcggtggctcacgcctgtaatcccagcactttgggaggccgaggcgggcggatcacgaggtcaggagatcgaggccatcctggctaacacggtgaaaccccgtctctactgaaaaaaaaaaaaaaaaaagaatttagccgggcatggtggcgggcgcctgtagtcccagctactcgggaggctgaggcaggagaatggcgtgaacccgggaggcagagctttcagtgag

SEQ ID NO: 9632 - DNA, 6000 bp, Homo sapiens
tgtagtcccagctactcaggaggctgaggtaggagaatggcgtgaacccgggaggcggagcttgcagtgaactgagatcgcgccactgcactccagcctgggccacagagcaagactccgtctcaaaaaaaaaaaaaaaaatggttactggtaactaaatgccagcattataacaacaggcacattacaaacatgatgtcatttagtcctcatggcaaccccatgagctaggcatgaccatctctattttattgatgaggaaacaggctgaaggagattaaggttactcaacaaataagtggtagagctgagaaatgaactcaagtggggtgccaaagtctttccatcacaccaagctccctcccaagacacaagacccacatggcctaggtcactcagcagttacctcctcagccttcaaaaggctgcaactcacaagcatgtaatcactgttatagataaatacctggttgtttgaatttttttctttttttttttttttttgagacggagtctcgctctgtcgcccaggctggagtgcagtggcgggatctcggctcactgcaagctccgcctcccgggttcacgccattctcctgcctcagcctcccaagtagctgggactacaggcgcccgccactacgcccggctaatttttttttgtatttttagtagagacggggtttcaccgttttagccaggatggtctcgatctcctgacctcgtgatccgcccgcctcggcctcccaaagtgctgggattacaggcgtgagccaccgcgcccggcccgaatttttttctttttttttgagacacggtcttgctctgtcacccaggctggagtgcagtggtgcaatcatggctcactgcagcctcaacctccctggctcaggcaatcctcccacctcagcctcccaggcagctgggactacaggcacatgacaccatgcccagccttttttttttttctctcttcttttttgtagcagtgaggtttcgctatgttgctcaggctggtcttgaactcctggactcaagcaatcctcctgcctcggcctcccaaagtgcttgggttacaggtgtgagccacggtgcctggcctgtttgaattcttaagtgcagaaatttccttaaggttactcagattctgctgatcatcatttattccaggaattttagaagagtctttctatatcacttatctacttagtcctcaaggcatatttcaagtattaccttctccactccctcacctggaaggcctatcatcagtggggttgtattcaccatcatccagggtaccatcttcatacaaggtactagctatgaccaaccgaaacttgtcacctgaaaataacagcaatatcagagagtaaagaatagcagaagcagcaaaaagtctcttattattgtctgtattcaatacttacccaagtctacagggtaaatttgaatgtttacatctaagattagatccatcttgaaagattcactctcacaatgcagtcgagacactggggagaagcaggaaaagagtgacagaggtattgccaaggcagatcctacagtgtgggattgtatgcaacaggatactcaatctaacccagtctacatccagtggtctctcatctgctctcatagaaattcaggctcaatcagaaccagatatgcaagaaggaaaaggggagaaaaactgtggcaagcgaacgtaatccccagaaaacaaccaaagatactccagcagcaaagcctgcctggatgactgagaacctgactctgggcaagttattcaatcatccaaaggttttctctttctatgctaggcactgtgctgaggggagtgaccaagatgtataagaactggtatccgtcttgaaaaacatcttagtctccaggcaaagaaagagacatcaaagagaaaattattgatagatgacaaaataaagaggtgtaggccggtgcagtggctcatgcctgtaatcccgacattttgggaggccgaggcaggtggatcatttgagatcaggagtttgagaccagcctggccaacacggtgaaaccctgtctctactaaaaatacaaaattagccaggcgtggtggcgcatgcctgtaatcccagctacttgggaggttgaggcagagaatcgcttgaacccgggagacggaggttgtggtgagctaaaatcgtgccactacactccagcctgggcaacagagaaaggctgcgtctcaaaaaaaaaaaggtatataccaagcagctaactctaactcaaagaagacttcacaaagcgctaaagattctgagggcaatacaagaatataggctctgaagtcagattactcgctgtgaagccttgggtggtttactcaacctctcagagaaaaatgggaaaggcaccacccacctcatgaggactgtcatttttttgagacggagtctcgctctgccgcccaggctggcgtgcagtggcgcgatcttggctcactgcaacctccgcctcccaggttcaggcaattctcctgccttagcctcccaagtagctgggattacaggcgcccgccaccacgccaggctaatttttgtatttttggtagagacggggtttcaccatgttggccaggctggtctcacaagacagtgtctagcacagagcaggtagcgattataaatatgcctaggagtttgccagcaccatgacaaaaggccacccaggcaccgggcacggcatgcgtgaagccagagagagctcgggagtctccgttttctcatccataaaatgtttactgagggaggtccctacaccaggacctgctggtaggggcaggccacaagagctgggtggacacggggcccaggggcatgtccgcgaggttagcctcttcctccaaaccgcccctacataccttacttacctcggtcaaacttcttgccctccgggtcaatatccttcacatcgaaaatatcctcaaacaggatgcccgccatcgcgagggggccacgagagcagcagaaggggtgagagcgcgaccacagttgggagtacgtgcaccccctagcgtggacaagaccggagagaaccaaaagcacctcctgaaagcgcggcggccagacgagagtggcgcatgcgcacaaacaagcggtaacgcgaccacttccgccacagcctcccgctcggggctacttaacttccgtcccgaaagattgcttccgagaggcttcggcattgagggcgggtctcatgtccaggtggctctgcccagggcggggaagcaataggctgtagagcgggttctcgcgctccgctggggccctactgcgccctcttcagaggccgggttccgaagactggaatgcgtgggggcctaacccaggcagggaccttgatccttggcccagagaagccgggccctagccctaccccgccggtccgcgtgcccgccgagggcacagtccgcgccgagggcaggtggagcagaaccccgccccagaggtgcccagcccctccagccggcaccgaggaccccggggccggcctgggccggctcggccctgctggacgtaacccgagccggatccgtccagtttgggaatttgccatgacgtcgctatggagaagaggaaagcctgcattgtcccctcctctcgtactgcaccctcccaccactgccctccctcttccccccaggccctgctctcttcccctacaccgccccttcagccgggctcccgccacccccctcccccgggcattacccctccagcttagtgctgcgcgttccccctccactgccttctcctggacacggatcccctccgtgccccttcagcctggcactgccctgtcccttggataccagctcttccctcacactggcccttcctcctgagtgctggcttctatcacaaggcccccccttcccgggcactgctcccgccccctgagccccgcctctgcctcccaaatgccccttactcctggtgctggctctcccgcacacttgtgcgtttcctgggcgctgccctcgctcctctcacactatctctacgctgcccatccaccctgcgcgcgctccgccctctgttctatccttccccagcccctgatagagaacccagaacaccagcaggcagttcccccaaagcggagggatggaagcagcgacttgggttcctccttgggcccagccagggagaagcgacccacgcccgcgtcccaggagtagacttcccggcacctggagctcccttccctccggcctaccccttccggtgccctccccaacctccacccccgcacaccccgcaggcccggttgctccaagtgcacctacccacgggagccccgagaaaaggaaggatgaggaagacggccccaaccctctccgaatccttccagctttgcttttcacccctgacggggcagaggggccttcccaggcctgtctgggccgctcgtctcttcggaggggcagaggggaggcggctcctaacgggctgacccggaggagtccgatgtagacagctccgcagcccccagccccaacccctacggagctcaggcgtctgcagcccctcctgcctgggcacggggaaccgcgaacccgggccggcccctccacgtgccagtagacccgcccctcccgggcgcccctctccgacccgggcatccgcagggagccggcgcgggcttgcgccttcccagcgccccttgccgcctctcgggaggccccgcgcggaccccagcctggctgggccgtcccctccggatgggccggcgggcggagcagcgcagagggcaccgccctcggcccgcccgccggggaggggacgcgagcgggaggctgcgccagcggcgcccgccgggggcccgccgcactctgctctcggcctcccgggctgcggggacgggacggctgccggcgcggactttgcgggccgggagccgagtccaggacagagccggaaccgccgagggaggcgagagggcagtgcgcggagatggcggccgcggcggcggaggaagggatggagccacgggcgctgcagtacgagcagaccctggtaagtgaagctgagctgagccccaggagtgcgctccgggacccctgctccaggttaccctgggaagcgcgaggaccaggggcctaccctaatcctgtcctagcattttgagctggggaaactgaggcttggaagtctgaggctgcagggccgaagggatggaaaactgcatgctggtttctggctgaggctgagggcctgcagaggacaaggacaccaggtacttgtctcaggtgtccttcccctcaccccacaacatgcacgttttctttgcacctccccttcaccacctgggcccaagtctcagcaccccactgccccttccgcggcaccattcacaccattgaactttctctacgccactatctccaccacccaagacattctctgtgtccctgccatgtgcatggcaccatgctaagcatagaatcgagtgtgtagaaagatggtcagccccagaccctacctctggaggctccacacccagcgttggctccaggagcccctcagttgactctggaaaaaggtggcttgccactctgggggacaggagctttagggagggtgggtgaagcaggaatgggtgtgggaattgggacctttgtctatgctgatgcggggtatccagcccccacccaccccagggtgtgtcccctgacctcattagaagcaggggtcctgggctctgagctgacttatcgcccccattgttacttggtgtttgagaagccacgtgaccctcctcatgtcactggggtggaagacccaagccctagggaaaggaaggggcccgtggttcctttttaccagcttgggctggaatttgcccaggaaggtggcagggagggaacgtcttggagaggagaggctataagtctgggaggtgcccagttaggagaaagtagctggatgaatcaggatgtcagggagaggtggg

SEQ ID NO: 9633 - DNA, 6000 bp, Homo sapiens
tcaagaatgattctatgtcatttcattttctaagtctttgcccatgctttcccctccttagggaaaagcacccctttaacattttttttatttaactgccaattggtcatcctgtaagggtttattcacataccactccttctgtggaagccttattgacttccctacctgctgtgacaatgcatgttttccaaagacgatcacattggtatctcccgacttgcatcttcttacaacatagctttgactttcctcctatccaaatgtggggtctatgctcctttaccttgaatctgggcaatggtgaaagtgttgccttgtgacttttgagggtagctcataaaaggaagcacagcttctgcctgattctcttgtgacaccagcccttggaactcagccagcatcctgtgaggaagcccaggctccatagaaaggccatgtgtagatgttttggcccatagacctagctgtggtcccatctcacaggcagcatcaacctccagacataggaatgaatgagccttcatataatttttccaagaagacctagtttgttgttgttattttaactggagaatggtattaggaacccagatgtgtgtggtaggtgtgctcattgctactggggtgggtcatgtttaaagaaatgttcactctggccaggcacagtggctcatgcctgtaatcccagcacttggggaggccgacgtgggtggatcacgacgtcaggagttcgagaccagcctggccaacatggtgaaaccccatctctactaaaaatacaaaaatcagccaggtgtgctggtgcacgtctgtgatcccagctactcaggaggctgaggcaggagaatcgcttgaactcaggaggcagaggctgcagtgagccgagatcacgccattgcactccaacttgcttgacgtagtgagactgtcccaagaaaaaaaaagaaaagaaatattcactctgcgtgagatgaagtgaggcatgcattggttcttcatgtgctcccactctatatccaaatttaactataattgttctggcttgtagttgtggccattttcttgtttcactaatcaagggatctttctgttttaaaattctttttattctggtcagtgggttttcttgtagaattctctcttcccaagctttacttatatttaccttgggactttgcaagaaatgtagctttttaactatagtgtctataagcatatatcaagaaagctcaaatttactgagaaatataaagatctgcatctcatatgctttgttttacatctcatgtaaaacatcttcgtttaacatatttgttttacatctcatgtaagatctgcgtctcatatgctttgttttactataaaacctacctgccttatccttgggagtaagaaagcatttttatagtgtgtagttatgctctttccaattgtttgacaactggggaaataaattgaagtgtttctagcatatttaacttaactctaagcaaagcctgatcattttgggcctgtgactcctattgactgtgtatcttctggttccaatgtcagagctaagtggtctgtttaaatctttactgggggcttttaactgcctgtttatgcaatatctatgtaatgtttgtccaattttatgcacttgaacaattttatcttgatttttggataagaaaaagggtaaagtcagtatccagccttaagggtaaatacaatactaatgagtgtattagtcctttcccttctcactcccatgtaaattgaagtacatagtcaattctgggaatgtaaagtctccaaggaagttaactgagctaagtgttggggccaaacagcctttctgactgctcatcaaggaatccccatcagtctttggaaggtgacctgtttcctaaagatagatactcaaggtaaaattcgttctatttatcgtgagagacttgcctcaggaatggactcagctttaatgggtcctttccttatgtgaattggtgtctcctggaaagccctggaactacaaatgttctactgggtaaatgtgtgtttaaaaggaaagatatatatttttaaaagtctgcccaggatattgaccccagccttgtcatttttagaatggatgctttaaaagccagcacaatctatcccatgctcccttttcaccctgccttgatggctaggagtgtcccagagatgagtcatggctatttttgtgtgtgttgagcctcagctcaacagaaactagcaggttctctgagtatagctaaggaactctgatgaaggccctcagcctcttggacagaagcagcataggctgtacctgctgaaagtgtccccagaccctctatattcttccttcctaactcaacccctatcttttttttttctcccttgcatggagcacaccctatttctatctgtctttttatgtatttacatcccataatagattcgtcaccaaatctctatctaggataataagacccggaaaaaaggataagtagatatagtcactcttaatacagattccagagcctttggggtgctgggaagcatggtgcacagaatttgggcccttggacaccagcagaaacagaatgtcacttgcctgcagttgctctggttgctgccaattaataaaagggcagcgtaaaatcttcctgggaagattccactatgtgccactattagagagccatggactgctctgtgtggcctcccctgagattcagaggtcagctcccacccaaagagtgggagcttggaccatgctgtcgctaagtgctacatcctggggatggagaggccttcctaatatctcttgaaaatactccccaggggatcttggattcgccctatagcatcgtctacggttctttgaattgcggagacacaggagaagataggacacaccttgcatttgtcctggatctatttcctggtaaagaaatattataaaccactagctcattttactcaatcttctttttttgtttttcatttttggcctccagtagcctgtgggacaacatatcccatcagtaacaatggctggcaatagaagggattcttcccaggactggagtaggtggagagcaaatttgtctcctcaagaacatgtattgaaatctctgaagcagaggtgtatacagttttcagaactctccaggtgattttgatgtacacaccttttcaactcttcattactttgtcattttaagctccacactggcatttcttacattactctaataagtaaaattgaataataaatattttacaaagctcttcattaacttgcattccaaattgaaggggaaaagtgattcttttatccatcccctcccccttgctgatttgtttgcagaatacaggtgctcagtattttattttataaagaaataacaatttctttatttgaaaaagtattgcctagacaaaatatgtataatgaagctgccagagtgtgatgtggccacagctgtacacaatatacatttgtgagctcttaaatcgtgggttctggaataagatagtgtcattcgcggaaaattgaagtagtaattgtgctcactgattgtatgaaaagtgaaaacagtgctgttacacagaaagatgaattctattggtctctgcttagaagctgctatgctaaattaaacctgatactaggcctaaggggattgcattatttgaggaaaaaagaaaatacaggtaaaccctgacaattctcatcctctttctgtttttcctttattgccatttgttctgggaacaagggtatactatttctcagaggttctttcctggcacgagggtctaggccaggccataagctcatctcagcttcgttcagttcctggccattcatggatccctctgtctcacctggtctggtaactggcttctaagggaatccccagtgaggtttgagctacccagtcctgagagcctgggccagtaattttccatttccaggcctcagttgttttaattcaatgtcaataaattttggttaagaaatgaagagttcaagaaataaaccagatttttaaaaataaaagagctcttctagagctgtcagtcaatggttcaaagacaattgtgtcctttctgaggtctttagcacaaagccgctagagtaacacttttcatttcaagagagaatccagtgacattgtccctgacttcacacttcctgaaaaccacttggcaactcaacaccaagagcttccggttcttagcaacctgtttcacttcttgaagctctttactgttggaactctgcgtgtctagggatccagacttccgggttaaagaatcgtaagatgattacagttggaagttggaccaaagctagggtaagcagccatatgcctggtcttttccatgctcaaggcagcctcccttcaggtaaccgtgtcttcacttggattaccaaatttgaagtcagattcccctctggtttctaaagaatttgaattgggcatcacagagctacggatgctctcttgctccagctcagcagtaatggaggcagcaggagcctgcagcacagaacaaactcattaccccagcagccaccttagcctggcttgggaccaggaactgaatatgggctctaacagttctatgacgctatgaatctgaaatgttattactgtgctttgcatggcatatgaaattacattctagctcaccaactggtctaagattgccctgggcaaagagatgttacttctcactcaattccctgttaggagcacaatagtactaaaataaataaacaaatgagctcggtttcagaaggcctagatctgaatcttggatgagccacttaggggttgcataaacttcagtttcctgatctgatctgctttggccagcacacaggtcaagcggtttgtgctaggcacatggtaagtgatggtcacagcatatcagggggtgtggaagcagcaggctctgcctttccctgtccctcatttctccttgacttcctagggtgtcgtacttaccatagcacatgatgtggagaatgctagaagagcagttgggtgaagcagggccaccaaatagtccttgcctcctggagacctctggaaatccagatgagtgtggtctgaggttgggcctcccactgtgcttgctcctctcaggcctacccagcgctgcctctgaagcctaactcagggccctgaaactcccccttggggcttcccttctccccagccctcactcttggtgccctgcctggctaccatggtaacaggttccagggtaacagaggagggagctgggtcctgtttactcccagtcctgccgatgaggattctgaccgtagacactgaattgtcccgtacctatccgtgctctttctgtgttctcaccagggctgagctcgaactgccacctctgccagcaggaccatgtgtaccagcttgaccacttgtgagtggaagaaagtcttctatgagaagatggaggtggcaaagccagcggacagctgggagctcatcatagaccccaacctcaagcccagtgagctggcccctggctggaagcagtacctggagcagcacgcctcaggcaggtgagaggttcagtggggagggaccttgcagacagcccctgggtcacagctgtggggtactttccaaggagagacagagcccagtcgcgggcttattctggtgtcagctcagatggggaaaaagacaaagacagccggctgggtcagagagttcttgcttttaatcctagcaataccactaactccctgggtgaccctgagaaagttatgttccatctttgggtcttagttgtccacattaaatgaagagctgtaatatcatctatgtccctgcaatctctgacatttagagtgagttggaactgaaggaaggaggccatgaggtccattggggaaagttttaatctaggagttgggggaatgcagggggtacagctatgctctgttcctagatatgtttagtgaat

SEQ ID NO: 9634 - DNA, 6000 bp, Homo sapiens
agtagactgtgaataaagtgcattaccctccgtaatttgatgggcttaattcaatcaaggaaatacggaggtttcccagaagagcaggaattctgaaacctaaaaaatttcagactctagactgtgaagtcaactcttattcaagtcttccgcctgctggaacactttacgaatgttgaatttggcagctcccacaactgaatgagccaatttcttataataaatctctgtctctcccttcctctctctctctctcctctctctccacagacacacaaatacacacatgtagtctattctttggagaactcccactaataaagctagtgtcatattaaagagattacaagtaaaatattagcaatttgaccttgattcttgttcaaatcagttgaatgtttctagtatctctaagataaaaaggatcttccccaaatgacacaagtgaaaggataaaaggaacagtcattcagcaccttgtttcaaggtaaccttttatgactgaaacagaaggttttatggctaaaatttcatcccctcccaaattctctgaagagatggacctgctaggctaggagttaagggggcaatctatgggggaagttttatgtccctgaaaacaagggaggcacttgataataaaaatatcaaactgaggttttgtttgtttttctctcattaccctctacagattcttgcagatctgtgggagtcatctgatatcacatcgccattctccctcttggccaacccctcctcagaagaagccctcaggcattagtcctaaccagggaaactatccagagctaggagggaaaacatcgcaaggcttggagaggggacctagaaatctcactgaaagctcatacccctgccattgctgccttctctttttctgaacacaacattgtgtcttctttctagagaaactgcgtatcttttcactacgatttaactatgacattcagtgggactgtaacagaatcgaagcatgaaagagtcctcctgaacaaacatgaggatcatttgcaaatggcaggatcagaaatggaacgtatctgatctgcttgaaataataagtactgtttcatgtatgcttgctctataccagctactattttaaataatgtgcatgtctgaacttgtttaatgttcataacagcactagggtttgagccattcaaaagaagaaaaaatgtgagtcacaaggatgttatgcaaatttctcaaggttactttaagtggcagtaatgggattcaaaaggtttgtgcttttaaccactacccctcactaccctctcaaagactccaaggagcttcaaagggccattttaaaaggttgtgtcagtcacacagcaatgcagttttagtaacctgaatgttttaatactaaaattcatgttaaatttatacaatatttgtactctgatccttttctcaagccctaaataattacacagcagattgcttacttagtaatgtgttcattcgttctgcttttaccacttaagaagctctgaaaagtcaacattaacatatattaacactaagcaaaaaaattaacatcccaatggctttcatactgtcatcattaaccatttctgagaatctgccatgctgcctcttagaggcttggttctttgtctacactctcttctgacactcacagtcttacctttgcttctgtcttttatgtgtatatctcttctacttattattggttctcaagatcatggctaagcccaagcatcagtcgcacaagcacatggaataaaccagtacgctatttgctgtttttacacatctcttcctcctcaacagcaacaactttttgccacatgattctaaatccccagggtataaaacctcagtgggctgcaacagatattaagaagagacagtcacagagtaaaatatcttgccactgcctggagcaagaaacacatgataagtatgtctaagctcttccaaagaagaaaaaaaaaattgtcctcgattgatttgggtcacacagagaaatactgcaggagagcagtcaaaggcatggacacgagcgtcaaattatatagtttggaattccagcgctgccatattcaatatgaacttggataagcagcctgacctctctgtgtctgttacctgcacgtagagatagcatataaaactctgacctcaacacttgatgaaaatatacagcaacaagtgccagctgtcattacttagagtcataaagctttagacttgggtgactttcagaaattaaccccatcccttttattggtagggaaactgaggaagaaaagaagtaatttgtctgagggtacatagcagattttactactcaacaggctaggacacttaccataccattgccagcctttctagagccttcttggtctcagtgctgcctttactgtttatgtttcagatatgaaaggccagtatttggaagctgtttttcctcttaagttgatagatttatgctgagccattatctcacctgtcctctgcacttaagctaggagcagaaaactagacaggattaaggatgcctagagatgggcctgaatcacagtgaagcaaacagcattcacctcagcctcacaaacatggttgtgggtagtgaagtaatcagcctcgcacagacctgaaatacaaaacaaaaacacgggaccctgctgaccacagaactcatccctccgattccccgctaattgtaggttgatagaaaccagttgtaatgcagagtaaaagggcctgtgcacaaatatatttactgaacgcagaaaatgtcatttatttgtttatttatttatttatttatttgttgagatggggtcttggtctgttgcccaggctggagtgcagtggcacgatctgggctcactgccacctccgcctcccgggttcaagcaattctcctacctcagcctcccaagtagctggaattacaggcgcccaccaccatgcccggctaattttcatattgttagtagagacggggtttcaccatgttggccaggctgatctcgaactcctgatctcaagtgatccgcctgcctcagcctcccaaagtgttgggattacaggcgtgagccactgcgcctggcctgagccaccgtgcccgggtgtttaataatacttttaattcttaaatgtttggaacaaaaaaaagaagaaaatgagattatatgattcacatggtactgctctagtcctgcagcaaattccagtgccttctctgatcagggaatttttacaaaatcaaatgtgattgatacatcttcatccacactgacaggcacccacagaacatccactgagacctagacagtagtactgactgcaggccctaaccctgggatacaacacgaacatggtcttgtcctaaacagctgataggagaaagacagtattcactgtgttaatctcagtccaaattaattgtcttcatctagctcctgtcttacattcttcattgcttgtccctaaatcctagcacggccaagtcctttagttttaagcctacatgaaaggcatccagggagagccaggtggaaatgaaggtggtggggcttggcctttcttcccattcccaccttgagaatttgcacctttccttctctgtcaccaactagcagttgccatggtatataagggtatatcttattttatccttaatatgtttatttctgcttccaagatgcttctgtttttactaaaaccatagaagcttcccctcccaccacactcgcaccacacacaaaaagcagttggaaaaacatttcaatgattcctaaccacaacagcacttctgactaactacaaagaaggaagctttggagaaacatagagggaaactacagtcccagcgagaccgaaaccggaggggtgagatagccagtcacagtaaaagctggaaccagagcccagacttcctcaactccagcccagtccttttgccactggggaaacgctgtttacatgtcctcacctgcgacgaacaacatttgataactcacaaaattaacacctttcagggagagcggggcactggccaggtccctctgataatgaattgctgctctaagacataactgctgtggggaggaggttggtgtttggcggggaagggctgctagcctgcagtttcataaggacaataatacatcaaaaaggacaatcatagatcaaaggggatattttgggtcaacttgatatgtagtggaaagcagattgggaggggagccaagtactggatatgctccgtgcgtgagtgtgtctgtgtgtgtgtgtgtgtgtgtgtgtaaatcatgttgctctctgggtctgtttcccaatctgtagagtgtaaaagtctctgaggctccttgcagagacaagtgatggaacgaccttgacagaagagagcagagagaggaaagaagggggaggaagccaagcaaaggagagagaaatggtgtgatgggggaggagacgcggagttgggtagaaatgccttttaataagatattgggaaaaaagtattaaacctaaaactgcagctcttgaaggatcattttttcatctttgtgttaggatttacaagtacagtgcatagtaatttttggataattggagtgaatgaatgaaaagcgtgaaacgccttacaggagcgagaagatccacgagagaaagcgagcagggacgcagctctggtgcctggtcctgccgggtggtccccacgccgccagccgcgcgttccccaaccgggcgctcccggcgccctctcggtgagccgccctgaaaccgccagggggcgctccccggctgccggggctgaggcgggcggagctgctttaaatcgcggcgcccagcggttctgcgtctcagttcccgagcctgggagcaaccgcagcttctagtatccagactccagcgccgccccgggcgcggaccccaaccccgacccagagcttctccagcggcggcgcagcgagcagggctccccgccttaacttcctccgcggggcccagccaccttcgggagtccgggttgcccacctgcaaactctccgccttctgcacctgccacccctgagccagcgcgggcgcccgagcgagtcatggccaacgcggggctgcagctgttgggcttcattctcgccttcctgggatggatcggcgccatcgtcagcactgccctgccccagtggaggatttactcctatgccggcgacaacatcgtgaccgcccaggccatgtacgaggggctgtggatgtcctgcgtgtcgcagagcaccgggcagatccagtgcaaagtctttgactccttgctgaatctgagcagtgagtgcacccccacctcacagcggccgtccagaggccccagtccccctgcagctcccttatgggctcattctgttgtgtgattccatggttatcagtcttcagttgatcaagtcttctgatcatgtgctctgtcataaggaaatgaagagaatcctggtttgaggaaagcgacgcccaggcataagctctagttttgcctctaactccctgggtgacacttctgccactctaggtgtggcttcatcctaaattcctatgctggtggttcgagttgagggagtgaaggccaaacttgaacttgagctcttagacctctcctaggcattccgagatttggggtaaattgaggattggtagagttcagacaagaaaatgggatgactgaaaaagtttgaagcctggtaacttctcaagtgtgcacgcttaaataaataatcctcaagtattagatataactttttaacctttaatatgattttttcatagtaaaagttacattcctactggaaatgtcctatctaagtgtcttctgcttatgcttgaggttgattcttttaatttataagatccagttagtgcagggaggccccttgcaagactctttggagaagctgcttgagattcccccgaagttttaattttcagacccaaggtcttctgtagaggctg

SEQ ID NO: 9635 - DNA, 6000 bp, Homo sapiens
ggggaggggggaacctgcacatttcctcagattctcaaagttctctgtgaccccaagcaggtaaataagctgctaggctagacacacttgttagtcctttgagcagctagactccatgcctctctctctcttctagccttttctctggccaccctctctggcccattccattattcctcctatagtggagtcgtgttcttttattctttgtttaccagcctatcaactcattaacggcaggattgtcatctgattcatttctgcccacccccgcttcagtcttaacactagtctgataagcttagaagctgtttgttaaatgaattaacaggacaagtagaggttaaggaataatacaggaagcctccatttacagtttggggtttttgtatgtgtgtacccagacaagatataattttttttctactcatctaaggcttgctacatatcaccaaattctcaatttgctgatctccaaaatagaaatttgaggtagggattgggaaaggttacaatcatactttcaccttgaacagcccatatttgtgtttctaaagggagctccttctattttgttcaaatctgtagagaatgtgtgagttattttgattcagtggtggttaggggtgaaagaagcaagggttggttggctctgcttatgaatagactgagtgcaattcaagagagggcatgtgattccatatttcagatagaggacaagtcgtgtatcaaaattcaagtattttcttaacctttgtggttcttgcaaagagcttctggcattgtcactcagtcaggtatcacaggccactccataccctgttaccagatgtagaacctctcagatttccacagatgctctttatttctgcagtcatgcaggccttcatcacttctgccatgtgtggcagtcacctctgcttgattttgttctctcaccagactcaccagggtcccttgagatctaggctgatctatcttcacccgtctctcagatgatcattggggctgtgtggctaggtaaccccaaacccactttctattcttcctgccacactggtggaccacactcctagtcaactttgcaagtagatgtggtcacctaactgagttctaatcaatcttctagcgtaagttcagagtaactcttccaggatgagtccatggaaacttttatttactatcctccatgaagtcccccttttatataatcaaggcagccttggaagccacgtgttgaaaatcgtggagccacagatggaaggagcctggatctccaagatagaatgttccagtaggactccatttaatgggtggagaaaaatatcaagagagcttgaaaatctagagaagacatccaactctggataagtttcccccttacttcatgggaaaataggggatgagaatcttgtctctgccaaataggagggtgaggtatggttctaaccaacctcaccacgtccattgtgtcttcgtcgaataagcctcgtggactagaggtggtgacacgccctctctccctaatccatgtcatccccatgtccctcacctctctagcattcagagcagagttctagagaaaatacagcagcagagcaggtagcctttcttggtggaaatacgctggactgtgaggcagggaaccgggcttgagccctggatctgctgttatctcactgtgcctctttaagcaaaatttgcccatctttttgttttctggaaattgtgttccaggtcagggattgtggaagaagatgaaacactctctcagtcatttacttcctctggcttcactctgataggaaagctgttcagcagtctatgactttgcttcttgagggatgatcagttcttcaggcccctgtgtgaagtggacattttactctttgttcctttctgagtctttcattggtctcttccctcccttcttgtctctgaaggcccctgctcttatgctgtatggtgctgacagcttccttcttattaggacagagtttgcctttgtggttcatcaggatgcagttttgcttctagtcataggcaacagggaatctgacctcttcagatggaaaagatctaaagaattccagcttaagttatgacctcctgaactctatggctagaaatactagtgtgatccggaagaggccactgccaccattcctgaggctgcttctcccagaagagatgccctcaaccctccagcacgtgtataaacataaaaggtgactcttccacccatgtgcctacaagggactggctaagccattgaggcatgactggatcttcacgttgcttatgggggtctggcattaggtcctataagctataatgtctgttgcagaccttccaggaggcagggtttaatgccatgtgattactttcttcacagagcttgtcctctggtggctaaagcaatgctcagtacttaaagaccctcgagattatctaatacaaactttgccctgatgaatccatcatatggtaaatgggcccaatgtcagcattcacatctctgggacctggaagctcagtgcctccaagacatttatgagcattgggattattcaaagactttaatttgaagtgggtattttgtacttgtacagggcaaagagtgttggttcctcagtgggaaggagctgaggccttgggtcttggccggtggacagacaagagtccagctcgccatggttgacaagctcttcttgagcacacctttgtttgcatctccatcataattattactcatcacttcccatctttctagtctcaagtcttacttttattccccttaatgccccgaataggtgctcctttcccacctcgcttgaccctttccacaccttctgctcccagcctagactgtgctcaccagatgccactatcccccattctttctatctgttaacttctgcttatctttgagatgtcagaataaatgtcacttcctttgggaacctgtttgtattccattaaatctgagtttagtatatttcccaattaagaggctgcttagttatctgtcattcccaagtaactataaactctctcaggataggggctctttcctttacaccattgtattcgagggcctagcacaatgtctggaacatctgttttccagtacataattgttgagtaaaagtggaatggagtcaagaccagtgctatgtatatctttggactatatgtaacagaaaacccaagcaagagtggctttatgagaatgtttaattgtgtatttaatgtggtgtttaggggtaggtaggtccatgaatcagtggtgttataggcatataacttcttttgtccttttctcaccgtaattttcatggtgatttgcatcctcctcaccacctaaagatggctaccatgctccaagcattgcattttcatggatcactttcaaagaaaggcagaaaggggaagacagaaaaaaatgttcttctctctgtttcatcaacaagataacctttcccacaagaccatgtctttctcttctatttcattgtttagaactgggccacacgccgacccatagacaaatcattgactcatcttggtgcttttagctgaagtcatgctgcacaaagttggggttctttcagcaagaaatacaagtaaatagcggatgggtaagaagtgaatgatagccaccactcgtgtctttaatgaagttttactaaaatccagaactcctttcttcaaatatgcattttaccttagattggtactacttacaaggcaacattcacaccggcacattatacttcagtatgggtacctcgggagcctctggcatgaagagctctagttgtcttcctgtttattctcatcagccactttctcctggccagagagcacgttgatctctcctgaacaccaagttggacacttatgcctgctcaaggcaatcagtgtctatttcagtcagcagaaacagccaagtatcatccctaatagttttcattcccagcaaattttcttccatagtcaaagtgcaaggatacaataagagccaataaaatgacaaaagttttcatcacaaacaaattaactgactctggaatggatcacagtatacctattttctaatcaaaatatcaaattcagtggtgttgaaatttgggctatatccttaatcctcggactttctagcatctcttccctccacatactttgctcatttgaaaacttttgtaaactctaaagagaaaatgaaaagaatcaagttattaatatagtttactttttaaagcctctttcttcttggttagtgtaatgattatgatgatgattatttctctcttagtgactgtggtgggtgctatcgttggctttttatgactatcatcttaaatctttatattactgtatagttattattgacattttatgtactagaaactgaaattccagattttaagtgatttgtccagggtcttcagtgaagcacggattagaactcagatttttctaattccaaaatgattcctacattctctatcatgagcctacctcccttccttcaattctcattgtcacccccaatatgttcattactttttcaaagtctgcagggtttttatacatctctcactggctaatccttttatcttaggtttttagcaaagtgactattctcattccttggctgagacatttatggatcgcatacaaaatgatttctccttctagtttgccaacttcttcccccgtcattcctcaggtcttgaggcactcatatctagctcaataaacaaacactaggaaaaaaacccacaataaccagattaacagaccaatcctgttcctgagaagattttctctctttcctttgttagtctaataggcaaggtgtgtactaagagattttaaaagcgcctgggaagagcaatcacaagttgtgacgattccaagttcacagaagcccaagggattttgacatttctccaaggagttagccagaagagatcctcgccggttgagttcagatggaagagaacagtaagaaggaccatcgggctttgctcaaccagggagaggaggatgaactggtgagtcttccctttattttattagtcttctcaaagagcccaaggcggtgagtatgggctacagctgaattagaaaatagagtgtagcatttatgcttcaggctttaggaccttgaaaggtttcagtctggtaaggttccttaagggctgcaaagcaccattttattgtggggaaacctgcaggggctgagaaacttgtgacctctggatgatagaattcttgccatcttcatatgaacctgtgatgtttcctcgcacatttacagtatttgcagagccccgcatggtgctcagtggggtgtctcccccttattatctggattgctatgtgatggaacaaactctattgaaaacaagaactcttttttattctcgtgctttgggtatgtatgcataacctaggcttagggggctctgggctgaagtcatgctttttataagcgcagagagaagttttaagcatcaattactaaagaaggagtagaatgtggcctgggatttttaacacatattttaaacatttctcatgtctccaattttttccccactcttgttttcatcaaacacacacacacacacacacacacatttaaaaataataattaaaaagttgaaaactatagtgtttatttggtgctgaggtgtttatatttatgattttatataatcctcagacctcagtgatgaaagaactaatcctatttaattgaaaagaaatctgagaccagggaggttaaataacttgcccaaggtcattagcctgcaagggacaggctgggaatccagccgactccttctccacatcctgtgctgttcaccatacaacagtggctccagctagacaatgaagaaaggagacagagacagacaggggaagggtcagagtgagggcacatttgggggccccaaagaacttggagaacatggtttgtagatt

SEQ ID NO: 9636 - DNA, 6000 bp, Homo sapiens
cagaaagcaaagaggactcttctgaaagggaaacaacaggccaccccaaggcactgggagaacagacctggtgctgaacggggatatttgagagcaagtcctctgagaagcagagacagcatcagcctgctcttttcttctgtaattaatggggagtccctggatctttgtattagaccctttaatctaagggttgctaaatgttttacaaacattaattaattcaattagactttgcaccaccaccttgaggcaggtaattcctctttgggatatggcatctttgcttgctaccacagactattttagagcagattaggataattaatactaaaggtaaagccttgagtttagataaagttctataactaaaggtctcaagtactttacaaatagcagatttgtgtaatgagggctgaggaggaagactgagtcagcttattgccagtgatgacaaggcagagatattgcacttgtttcaggttcctctccatggtaaagacacatgaccttgaacagctctttgtgacctctttatgactcagttcctacagctttcaaatgggagcaatgatactactcacctccctacttcacagagatgttgcaaaaaacaatatttgtaatatgctgtgagttctcagatgaaagatggaaattaacatataatgaaacattattaccatttatcatcacaaaacctaaatgggccagacaagtgaagcatcagcatccccacggccctggcagagaaaccggtcctgccattatttccattggacatctattctagacaatcacagaggttgagaactgctcagaacaacaggcatgctcctaagataatcaaaagcaaaccgagatgccagatcagcagaggtagctaagtatttgtcctttttattttccgttcccattcttatttgggagagagtatttgagaaaaaatgagttcagggagagaatcagagaatgaacgaaggtacttttccttttggacattcctctcaattctgagatatcaatatatgtgtataatttgtagcccccagaatgggctgtgtgcgagccctcatctgtgcttttgctctctgtctcctttgttaataatgctttcctttcccacctgtatttatctagacaagcataaaactcctatccttgtgagggtttcctggcctaactccctacttgaagttcctctgtcactcttgtgtaattagcatattatgtggaatttatattttggtgttggtcttgtttcttaatggacttaacttttctggggcataatttattaaatctctattcttcatctattacagatctgggcatactgaagttaatcaaactagtgctaagtgaatgagtgaatggaatccttcaggaaaatgtcaagattagaattcagaccacaccaaatcctcatctgccattcttactacgccacatcacaacccgtgaggcacgtagagtatagaatagaaatattgaacaggcacaattaaggaaagggagggtgaattcaagaataacttttcaaacaatgttcctaagagaaatagaagacttaacttagaaggttcaagaaaactgtctacataaatacagtattgcatagaaggactgagtcgctttggacctgattcctataatatgagagcacaggctgatcaggaacagtagggatatttatggagttcagtttgccttccatgttattgtcactctgtgcactaagctcagactcagacctggcattcaggacctccatgcatggcgttggtccatatttccctgccacatgtcactcccctcttcttccttcatgcagcccatgctgcagtgaggctgatgggcttgctctgaacatgaccatgtgtttcttcctctgatgattcccttgcttcaaatgctctttcctgcggccttactctttgtccgagcctcagcatctccacctgttgaagcatttttggctctttccaaggcctttctcaaaatgcttccttcacaaagaggcttttctggtcatataaatgcaaacctctttgcagagcactttggatgtgccaaataaatgtgtagaagaggtattagtccagtaactaggatcacggattgggagagctgcattgcctaggtccgaatactcattctgtcacttactaatggtttgaatgtaggcaaattacttaatgtctgcacctgtgtttccttgtctgtcaaataagaatgaccagaatagtatcaaccacagaggcttttgtcaggattgtgtgcaacagtgagtgtaaactgtttagaattgtgcctcatatgtggaagtgttctgtaaatgttctctttgctttcccacacaacctagccctgtttctggttatggttatgtttgtagaccaaaatcactaaatgagggtgagtgctgtccataagcagtgttgccatcgataaaatctagatgttttaccaatagaactcccaaggaacctgaggaaactctctcactactggagtcctcagctctattgaaccaggtttgtggaaaataattttccatggacatctgatttttataaaagcttttaatgttcttaaggacttacatattttcctgttcaagtttagcttaaatattgtagcagcatgacctgatttatttgatggggtaagtttgtgtacagtttctcctctagctgttaatcagttacacactcatctcaatcccacaacggtgcaagagttgccaagtgcattcaggaacccagccaaaaggaaactgcaaatattgccagtgataaacaggagaatgaattacttctttctcacctgcccaggagcactgatatagtttcaccacgtcacatactaacactcctcaacctccatcagttgagatgaaatttggaatatgcttgttttatatttttttctgtactaaatatataattactgcctagtaaggctgttaaatgttcagttaggtttttttgaggtataattttttattgaggtatgatttttaaatttgttatatctcttcattgagatataattcacatttcataaaattcacccttttaaagtatagagttcagtgaggtttagtatgttcacaaatttttgaagccatcagtagttctagaacatttttattaccccccccataaaccctttactccttatattttgaccttgtgataaaatgttaattttattttcatttatttggttaaattgtgctagcaaatttttgaaaccaagagaactacatatatatatacacacacacacacacatacacacacacgtacatatatattttgtaattactattacaatgggtttacttagcttactttttatgtttatcctatacttcactatttgctcaaggttttacacatacaacatatacacacacacacatgcacacattgatcttggtcacattagggttatttgggtcaggttggagatatcattgccaatgtagcttgagggacagacagtggacatggtgaaggtaaaaataactatcttttgtggaacacctattatttcccaggcactctttcttaaaagtctgttttaggacgtaggttctattatcatcatctttatgttacatgtgaggaaatagaggagaatggagtttgtataacttgttatatcccaaggtagcacaacgaccacctagtacagtccaaatttgaactcaggccttccaaatttagtgtatatgcccttagccactatgtcctaacacctactgttcaaatgcacatttagtttaataatcctaacagcacttgatcagtgctgtacaatgtactttcacaatgatctcattccattctctcaaaagtcctgtcgggcggtaccagatgagaagagccggttcctatagttaaatgatcacacagcaaggccagtgcagacaagcagctggaatacaggtattttgccagagctagggtaggggtgtgtttctctacaccacattgggacttctgacagttttcttagacttctgttccatctcttataataacaatccactttctatcatatttgtttggatgtttgaatccttacatcaacacgagggtagcaaatatgacttaacttttttaggtagtccctgtgctcaggcactgtttattgaataaatgtgtaaacaaattaaaaaagagtctggccatatagtcatttgaatattttatttctagacttccttaagtgttgaaccatcaatattttagtgaaaggagactacatagactagtttgatgatacctttgttctttttctacatgtgtttcaaaaaagtaaacttaatttcacatacactttaaatagaattttttttgcatatacaaggaaatgtgattacaaataccttttgaagaggattagtgataatctgtaccttttgtaagcaaaatgaatgagagtactattagaaacctgtggattgaagctttcattcatcaaagaaaatctgcagctctgtgcgcttccgctcaacccaattccttaggtcctctgaataaagcagtgacctgggagttcttgcacccgctcctcactcctgagaagggtcctgccaactctgtattgtcctgttggatttgcagtcagaagtctgaggctggcaggcactgggcaggcaatgagttctttccctgtaagttgggcacaaaaagatcggcatgggagcagcctcctttgagacagctgctctgagagaatgcaataagcagggagcagccagcaattcctcctagcagagggcgactcgtgggaggagttcagtttgccaagtattgtcatttgttgagagaaggtgtgtgctcaaggaggagttttaacctggaggatcattaactcttttagtcagctgaggagctgcggtggctcggcgagttggagttcatcctggaagcgtctgcacgacaaggtcagggaggaggtgtggaataactttttcatgggacactttgagaagggccagcacgctctgctcaatgaaggagaagagaatgagatggtaagattctagccacattcccttcttcccatcccacttctcagcctgcgagacacacacacacacacacacacacacacacacacgcacgcatcacacacacacagacttttctaaaatttcactctggtattacacgagaaaaggtcatgtttgagaaatctctctatcctgtaaatataacctctgacagcagaaatttgctagaatgaaaatattgtattcatcttgtcaagaatgttttctttttaaagaaaacagagagggagagaagcaccatgcactttatgattcttgtttgagcctcattggtatagccagttctgttcaaaacacctaacaattttaggaaatccctaatgtgaggagcagtgtattccctgataggaagaagcagaagttcagcagtgaagcagaagtgcagctgggtctttgaccttctcttctcaaatgtcttgttcaccgagtctgttggacagggaagacatgcaatattaacaattatcagcctacacacatttctgttttcttctagaattttacttttgtggcttcctcattatagagattggttacagaaaactttcggtagttcagtatctctttgattttagatgtgcttctatcttgagaactataggaaaatcaaagatgactttcatgctcaggatgaatttaaaactgtatttctcaattacaatataatcaagagagagttagaaatatgtacttctgtttaataagatctttctgctaattgtgtaagcatagtcttttatgccagtaatgatgtaattaaaatgttaaaatgtgacgctctcattccataatagcatttaatcttcctggaattaatatgtaaataacaaacctgaaagatatttacttaaaatgttttcttggttaattgctttagccctgactattacattctttgttcctaaact

SEQ ID NO: 9637 - DNA, 6000 bp, Homo sapiens
agaacaagagtccatctcaaaaaaaaaaaaaaaaaaaagaaccttatttttatatttcaaaatagttgttctaattacctaccggatgtaattcaggaatgcatgtttgtttaaatgaaacattaaacaacacatagttataaacagccttgtttatcactgctccctgcctccactgctgtggcaattttgtatgtgtctctctagatctttctctatgcatttatatatagatacaaagacacccgtgtgtgtgtgtatatatgtgtgatacaaacacacacggacagacacacaccatatagctgggtgaaatttctcacacctgcattgctctttcttgttcctcttaagccgtgtcagggaaagttttctataaaactgaatacatccacagagactcaggtggccgaatgctccaacacagtcctgttatgagaggctgtcctcgtgagcaaaagggatgcctgtgtgtccttgagatatgctgctctgaggaacaacctaaaattcctccttcagagaacagccaggacctgggaatgagctggggaccactggctgccccttgggaccttgcggctctcatggccttttctgcctcctgaagggagagcagatggaggggcacccgggcaggagagaggtgggagggaaccaggcggagacgagagccctggatggccatcccaggctgactctgtagacaccgagggccattcagtgggatgactgatgttacgtaccgtcttctggctttctgtgtgatcatgattgacaaatagaaagattgttttcctgactctttcccatgtgttgaggtataactgaggagttgtacatttacgtctttttttcttaagccagtaagcgcaattatattatatatattaatctgtgactcgcttttatgcttaatacatctgatatgtttttcttctgcaaataaagatgtatctgtctcatcttttaaaactggctgtttggtatggattttcatgatgtgcgcagccactgtcttgcagacagacatctgagtggttcacagtgatctgctgttgccagtcttgctgcctggagcatgcttgaacgtatcgctgtatgcacacccaccgtcatgtctgtgtatgtgggggtttacacactttgagtttctttttttgttgggtgggggagagttggggtctcactatgctgtccaagctggtctcaaactcctggcctcaagcgattctcttgcctcagcctccccagtcactgggattacaggcgtgagccaccatgcctgggtttttggattttgatagctattggtctaccagtttatattcccatcaacagtgtgagaccaccgtcatccttaccagcccgaggcattctccatcttttttattctgccgctccagcaggggacacaatggtgtggtcacagcgtccccaccccgaggtgaactgagcagggatgctaacgccagctatggagggtgctgtggaggggtttgccccaccgaggggaggctgggtcccacggcctccagtgcccgattctgtgcttgttaactagaatagagacacatgcgagggcgggagatagcagagttccctgaagccctggggcgaccccagctcttccggttctcccaggggggctggaaagtgagccctgaggttacagggcctgcgggtggtaaatcaggctttcccttccaataataatagatgtcccgtcccttcattagtggaacggagcggctgttctgggggctgcctgggggctgccttgcttcctccgtaggagaaggtgcttctctggggaagagagggcctccatgtgtggaaacccggagtcctgcagcccgatgtccacggcacctccaacctggggaactgctccttcctgcacggcctggttacggtgtggaaacccatgcgctgtcatgaaggccagagagagttctctgtgaaggctggaacccccccacccccatagcacacttcctacagcatggctccacctgggcctgtccctcctccaaaactcctggtggctccctactgcctccagaggactccactcttcgggatcatcccagtcctcagtgaggccctgccacacagcctgggctctagccacattctctctcctgctcactctgactggatggctttcctttaccctctcccctcaccttccagggtcttgctttgtcaccgaggctggagtacagtggcgggatctgggctcactgcaacctccgcctcctgggttcaagtgattctcctgccccagcctcccaagtagctgggactacaggcgcccgccaccacgcccggcgaattttttgtatttttagtagagacagggtttcaccgtgttagccaggatgatctcgatctcctgaccttgtgatctgcccgcctcggcctcccaaagtgctgggattacaggcgtgagccaccgtgcccggctgagcctgctcatcttttaaggtcaccctctgcatgacaccccaggtccatcccttgaaatgctcccacattctcaagcttgccccgaggaaggatctgtcagtgacctcactccttccatcttctcccagccccgctctgcgtcagtccgaacttccgtccatgggggttgtgtgcccaagcacaggatccagtggtgtgcagatggcatggagcccacgggctaggcttggactctggctctgtcacttagcatatggctgcagggaaattagttaacaggcctgggcctcagtttttttgtctgtgaaatgggggtaattactgccactcataggactatttggcagatcagtagttctcaaccatgaatgtgtgtgtgtgtgtgtgtgtgtatgtgtttgtgtaaactcccccttcctggggacatttggcaatgtctagagacattttgttacttttggatcggggggtactgctggcatctagagggcagaggccagggatgccatggtgcctcccgcgacacgtagaacagctcctgcaatgaagaattatctgcctccaaatgtcacgtggtgaggccgagaaagctggtggaggtgaaatgatggagagctgcagtgaggtacccaaggggtctctggttcacagcaggtgcttcccaaatagccatctttaaatgcagccgattcatccctgtgttgtccaccactcccagcacagtgcccgacacagagcgcttgggtgctaggattagggaggatggaagaggaaaaagagggatattcttattcttgtaggttctatggaaagaaagttaaagtggccaggcgcggtggctcacgtctgtaatcccagcactttgggaggctgaggcgggtggatcacgagaatcatgagaccaggagatcaagaccatcctggctaacacggtgaaaccccatctctacaaaaaatacaaaaattagctgagcctggtggtgcgtgcctgtaatcccagctactcaggaggctgaggcaggagaatcgcttgaacccaggaggcggaggctgcggtgagccgagatcgcgccattgcactccagcctgggtgacagagtgagactccgtctcaaaaaaaaaaaaaaaagagaaaagttaaagtacctgatttgggaacgtggaggaatcagggccgtaagagggaaggtgttctgcacgtgggaacaaggctggtgggggaagggatggggcttcaagctgtgtggagccactccaagcagtgcctgcccctcctgggctcctgttatttagtggacaagacactttttgtttccggctctgaatcacggtgccacagtgaggaggaatgtggcgtgattcaggctgtaggtcttgaccatgacaagccacccaagcaactatttcagtaataacactacgcacttttatatcttcctttcatcgcagatctcaaaacacagcgcaaatattaattaagcctcttggcactccatgaggcactgtgtgtaaatatcactctccccacttagctgagagggtaaaccgagccaggcaaaggcagggtggcttcagcctggggcagctcaggccttgttgaggctccatctcggaggagaagccggggtttggaagccttcccgcccctccaactatgattcctgtatcctcttccccaggcctttttggggataccacaaatagaaacagttttgtccccactggggacgggggtagagagggcagcagtgtgtgggctgtaatgcagaggtgaggggcatagggaagctcctcacgcccaaatatgccccttgattgcccgtccccaagccagagatgtgtgtgcctgcacctctcagagcagcagtaatggcaaagaccccagcatcacaaggaaatcggaaatgctgtttttagaggggacacagtggtcgtaattatatttttccttggaatctaaagtaaatgcttcttccaaaatgttaacaacagatgaaacacattaattgtctgtaaatttaaagccaaataaaaagtttaaaataagaaagaaagaaagaaagaaagagaagaatgaataagttttctagaaccacagggagaagcacttgccaatacttctaggagcaaagaaacgcccctgaatcctgctccatccctttctcggggtccttgtctccttggccagggcagggcagcagggggtccacagtcacttagggaggggtttaccgggtcgttgtaaactcccctctcacggtggccaatgcagtgaaggaatccaaaagatacactgggggaaagaaggaaagaggaaaatgtgtcctgagtttttaaatacggttgaagcaaaccccttacatttagggatgccagctatgtgtaccctgtagtgtcagcccgggacatgcaggcactgcactgtggcccacagtcccccctcccagggccaacactgccctctgcagtgactcacgcccgggatagtttaaataccgggacagcttaggcgagccacactcatgctgcagccttgagccgtccctcgtcctcctctcaggctccctcttgtccacggcgggcgggcgccgagctgctggtaagtaggcaagccacccccatccctcctctctgcttagagggcccggccagccccttcccatttctgctggacctgctcccctcggagaccccagaaggggcagagctgacatgtgcctggggatgctctcgggacagggacagaagcagcctgtgctggaggggtgcaagcctgtctccctcactgcctggacaccaggaccaccagcccctctgctgatgcctcaacagcctcttatgccccttgccctgagcggctcatgatgtcaacctggggtgctgagatgtctgagaccagcaagttgggctgaaagtggactaaattatcaccccccttgtcactggattgaccgttctggaatctagatccactgggggaagaacttctctttttaaggttcagattatttgcgcctgtgccatctttcctggcacttgccctggtggctcccagtggtctgccccgcatttggttctgcccaagaccttccttcatgggggtttcccaggcaagagagctgtctgctttgcatagatggataactcctgcaagtgtaacttcagcagatgtgctggtccctggtttgcagttccaatttggaattcggacatgggctcagcattgttcaggctctaacagtgtggcttaggggacactatgctggcagtttcccctctctcctgctggaagcgtcggcctctgtggagcctggaggctttgagcagggagtcagggcaggagatggatttgtgatgaggtggtatgtggatttgaaattgtgacggctgcaccttgacccgtgtctctgctcaaacgtagaggcaggacctggggccaagaaaccaactgtggaaaaccagagctttcaggactctcccacccctgccaaagtgcaagagccattccacctcccgggcccagggcat

SEQ ID NO: 9638 - DNA, 6000 bp, Homo sapiens
tgttcttccagagccagtaacatgcttgctcgtgctttctacttctagctgatcattcttttcccaacatatatttacaaatttaccaaattttacctagaattttaggaccaaatggttctcactctttatgctgcaaagacctggatgatgtttggtaactatagaaaaatagaaattacactcaggatcactgttactgctattgccactgatgattcctgcaaaaatataatcgaagttttccatcaaatgtataatatgctattaatacacattagatgataacagttgttccatgaatgattctatgaagctatgcatcttagacctcttgagctgtgaattagcactattttctatagttacttattctctggatcattttataatttccatattaatttcaaatatgctcgtgttattcttcagtgatttccacaattgtgcattttattctttggtttaagtactgaagcatataatgaaagtaattgctaagtagcagcttaaaaattcaattatccgattgtatttaacatctttaagagcatgatcataaagagctatttttgacaccccccccccacttttttaacatttagagttagtaagggttttatatctcttctgtccatattgttttcaaaggaatgaggtgtttaggtggctggaaaagcatttgtaggaagttagatttgaatatagacaaggtgggttattcacgttgagaatgttatttgaagaatgcctgtgaagccaggtgtgggttctactcagtgccatagatagactgagtcttctctcgtaggttaccattacatagtaattttgattctgaatttcacattaaattatttgagtttatacagacctaaattttaaaatctgtacatatattattttgatgtattaagatgaatattgctgatttaaattttatttatgcacatacttaaaggacagaaatgtctgggaaagtaattgttaaataatgatatgtaactttttaactttttaaataaataacaagatttttaatgtgtgtctccctcagggttgtttaaagttttttttctccctcaagtataaatagtggtaactatatgttttgtatcttctagcaccaactgctgtaaagcaatgctgcaaataatgcttgaatacaagtggctaagccaacaacagaataaatacttttatagtagttttataatcctgaaattcgaaagctttcccaattgcacttgcatctaaacaaaactgttgcagtttttactctatttattttgttccccatgtttatgaaagtcctgcacagtttcaaaggcatggtaaataatatatcaatgtttatgtagtctgttacagaaacagctatagataacattatccagtgaagagcaaaattcaagctttagaaaatattcatgcatgcaattttgacatatctaaaaataggtttttgtatatttatggtgggaggtggttgggaacttttaacaaaatggggtgttaatttttgtacagtctgtgggcatttacacatttttaatgtattaaaatttggtaattatgtgtacattaaattaataaaagttacttctagttatgatttgtgaattccctaagaccttggatttttttaagtaactttatatcagaaatgatactgcatctttatatttttaaaattgtattgctgctcaagaatggtaccctcttgtcaaaaaggcatacattcataattgtacattcagcattgtaaataatcttatgaaaccttttttgattgaagctattcaaaataaaaattttaatgaatgaaataacactttttttctgtgtctttattcatttgtttgctttttagtgacatgaatactgccctttgtggatttattttcctgcctaataatacttccccatttccttcttttttttttttaaaaaaaactggattttgaaggaaataagaacaacattctgcatatcatgccatgtgtgtgagcatcctggggaaaccccacagtcggatgcagtgtagagccaaatgttaaatgcgaggaggtctgagggcaatggtgaaatgaaatagaagagtagggacttataatctattaatagttgggagaatcaaaccaaaagctaataccatggagagagaaaatggttgtaaaaatcccagagaagacaggacctttgtgtgtgggtgggagttgtttccatggagctcagctccgggagacacggagcccctgctagggaatatgtggctggctgtggtgtgatgaattcggggggtgagggcctgcctgcctttagctcaagttcttaacagtcgctatggtttgtgcggcatgtgtgatcctgtccccacagcctgctggtgtgggcacagttctgcatgtctctccttccgctgtatcactgccaagggacagggagtcctaggggcttgagtgagactgtccgtggtccaagttggggtgtggttgctccctgctgtgcccggcccactgagtctccctcagaggaaaaaggcttatctcacccaggcacagacctgcttttgaatagccaagccccttaagccaggtaactgttttacagcagacttctgacctggtaatggatacagaatcttaagacttggaagcactggagctgtcaacttccttgctccaaatacttctcattacctcatcaacttgctcagtggatggactaagagtgttcccccactctgcaactgccatacctacttttcccttcctggacaatcaaagtgtcttcctaagggacaaaatgtagaggccattctgactggaggttttcctggggaaataggctaaagaagggccacaggaatttgagccatcggcatcttactctgtttcacagctcgccttcccagtctgtcatgttggctccctggcaatttcatgggcaagggggcggggaggctttcactcgatgtgcctatgcatgacggacttaccaggtcaccagtgtagcagttcagggctctggagttgcattccttgatcggaactgaaagacctcccgcgatacctggcagaggcagtggctcttccctgtggtccagggctgcgtgactttgaaggtaatttcagtcaacccagcctttactgggctctgactgcattaggctgcatcaaaggggattggatcccatgattctttatatcttctgacattaagcctttgtcagctataggtgttacaaatatctttagtttgtggtttatcttttccccttttttatggtgtcttgaaggatagaagtcttttttttttttttttttttttttattgatcattcttgggtgtttctcgcagagggggatttggcagggtcataggacaacagtggagggaaggtcagcagataaacaagtgaacaaaggtctctggttttcctaggcagaggaccctgcggccttccgcagtgtttgtgtccctgggtacttgagattagggagtggtgatgactcttaacgagcatgctgccttcaagcatctgtttaacaaagcacatcttgcaccgcccttaatccatttaaccctgagtggacacagcacatgtttcagagagcacagggttggggataaggtcacagatcaacaggatcccaaggcagaagaatttttcttagtacagaacaaaatgaaaagtctcccatgtctacttctatccacacagacccggcaaccatccgatttctcaattttttccccacccttcccgcctttctattccacaaaactgccattgtcatcatggcccatccccaatgagccgctaggcacacctcccagacggggtcgtggccgggcagaggggctcctcacttcccagtaggggcggccgggcagaagcgccccccacctcccggatggggcggctggccgggcagaggggtcctcacttcccagtaggggcggccgggcagaggcgcccctcacctcccggatggggcggccggccgggcggggggctgacccccccacctccctcccggacagggcggctggccggaagtcttaatgcagacagcattatcagtgtgttcaaaagacacgtagacacgttttgcctatagacaaatgggcaaaaggaaacccagctttctcaaatgaagcacaagtgggccttaattatgtgaaaaggtgttcaagttcatcattaaacagggaaaggaaaagttaaaatcatgctgagatatctttcatagaaatggcaaaaagcaggaagtgccacgtgtgggcagagaggaagcacaggaactctcacaaatggcaggtgtcatcgtagaccaacacaaccactttggagagcagtttgactttccccagttaaactgaacatgtgagcggccgggcgtggtggctcatgcctgtaatcccagcagtttgggaggccgaggcgggcggattgcctgagctcaggagttcaagaccagccagggcaacacggtaaaaccccgtctctactaaaatacaaaaaattagctgggcgtgatggtgtgtgcctgtaatcccagctacttgtgaggccgaggcaggagaattgcttgaaccagggagcaggaggttgcagtgagccgagatcgcaccactgcaccccagcctgggcgacagagtccccctcccccaccaaaaaaacaacaagtgagcatcctgcaacctagcaatgccattgttgaacaagttcaaagatgttcttagccttattagtcccaaaaggaagaaaaaaatggaggatttgagaatgttcttagctttattgctaagcggagaaagaaaaacaacacataccaaaaaaaaaaaaaaaaaaaaaaaaaaaaaaaaaaaaaacctgggtgggaaattagggccatgtggcatgaaaaggaagacccaggggaagtgtggcccatctaggggtgtggctactgcagtgatccagctgtatcactgaacttccctggcatcatagagttatattgtgccatttatggaaaaactctccccactgctcttggctttgacagtaggaatcaggttatatatggtctctcggtttgaagatatttgtcattaaaaaccagaacaagggctctgagatagggtcctttcctgacctactctggtaaagtctttatcctcaggatgcaaggataccaccctcttcctgtggaaagtgtcgaatcacatgcagagctctaagtctttcagttactttggagtgcagaaccatttcaggtaaggccaaatattttaaacattagtataggaaattagagggctctttagtctgtgtgtgcatgagaagtaaaattgcacgagaagcaatttatgtaaaatttcgcttaggaaacattgttttggcaggttagtagtatggtgtgcatttcccagaaaattcagtgccgtgagtattacctttagttaagcatcttagaaatagtagctctttatggctaagtcagaaatactaccctcaaattctatgtgaccctagttatactgttgagcctttctgtgcctctgtgccttcatccttgaatcggggataatatacttacctcctaaggttattgtaaggattaaatgcatgtagtataaataaagagctgagaacaatgcatggcgtaaagtgataggtattattatatgcttttgttggctgttgattgaaggtgttcgctgttttgggggtgtcctttaatagagtaacttggtactgtggaaatagcatgattgtgagcaaaagaatcagatggtggtggctgcagactttgctgttcccttcttgactgttggttatagccaatgcagggtaagttataaagtcaagagcagagccgttttcacaatggacattgctttgtgatgtctgtgagcttgaatgtgagaatgattattttaattctctatgtaaggactttaaagtattggctattcggtagcttgaaaactctgtaatctcaatgc

SEQ ID NO: 9639 - DNA, 6000 bp, Homo sapiens
ttggtttagaaactcttacagcaatttgacaaagtaatcttctgtgcagtgaatctaagaaaaaaattggggctgtatttgtatgttcctttttttcatttcatgttctgagttacctatttttattgcattttacaaaagcatccttccatgaaggaccggaagttaaaaacaaagcaggtcctttatcacagcactgtcgtagaacacagttcagagttatccacccaaggagccagggagctgggctaaaccaaagaattttgcttttggttaatcatcaggtacttgagttggaattgttttaatcccatcattaccaggctggaggtgaggttagtggtgcaggagttgctgaggcaggtggaaatcttgtaataaatgcctaaaaatgttttaagcaatttgactgggctctggaaagcattttgtgattctgaactaaaagatggacaagtaaattttatcaattaagaacaaacacccagagactatttctcttatccagaatttatgacaaggtcctgttgttcttattatcagtgatacttataatatggtttcttgggatgagtaatggagtttactccaagaaactcaaagcatttcatacattatttctgtgataaatcaggaaatatgtgaataattattttatgaatatgtattacctaaagttcattagttcacattttatttttgcattcagaaaatctaattctttacccatcctaaccttttagcaagcaattttgtagtcaccctcaggcaagcaatagtgtagctatactctggaaacccttcacttcttgaagaaggaaaaagtcttcctgattgaaaattggtggctgggtgaggtggctcacgcctatgatcccagcacttttggagaccaacatgggtggattgcttgatcccaggagttcaagaacagcctgggcaacatagtgagacctcatctttacaaaaaataaacaaaattagcctggtatggtggcaggcacctgtggtcctagctactctggaggctgaggtagaaggattgcctgagtgtaggaggtcgaggctgcagtgagctgagatcacaccactgcactccagcctgggtgatagagtgacaccctgtctcaaaaaagaaaaaaaaaattggaaagatctgagatggtgttagtttcagttgcctgtgctgctctcattccctctttagtactaacattctggatgtgtgtgtgtgttgtatttattttttaggacagtttattctgcgttgtagcagcatttggctgtttctactactgaatgaatctttgaaaagctggtaaaagacatgaccatgaagaaatctgaactttttaatattgttaaatatcttgacaaaataaagatgttagtagtttgacaactgaatctgttgtgttttaggccttatatttttaatgttttgattttgttacactatgttctgtttctttctttccttccttctttctttccttccttcctctctctctctctgtctctctctctctctccctctctctctctttctctctttctttctttttttttttgagacagagtctctctctgtcgcccaggctggagtgcagtggcacaatctcggcccactgcaacctccgcctcttgggttcaagtgattcttctgcctcagcctcccaagtagctgggactacaggcaagtgccaccacgcttggctaatttttgtatttttactagagacggggtttcaccatattggccagactggtctcaaactcctgacctcatgatccatccatttcagcctcccaaagtgttgggattacaggtgtgaactactgcgcccggccctactatattcttgttacactggaacacagagaaaaaagtaggggaaaagccatttcaattgttcaaacataaccaatggtaaaaattttggtatattttctaccaatgttttttatttccaaggtttaaaaaacatataattttgtaccctcatttttcatttctcatgatgttatgaacagtttttatgtcattttatttgcattatgattttaagatgcatgacttaatagcggcatttatttcaataggttataccatattgttatttttgccagttccttattgagggtctgcttatttctgatttttcactattataaaaaataaagacatggctttatttgtgcataaagctttttcctacatctttaaaataacttttgaatttatttatttttattttcagagaatgggccttgttctgttgcccaggctggggcacagtagcgggactgtaacttgctgcagccttgaactcttaggctcaagtgatcctgccacctcagcctcctgagtagctgggactacaggcatgccaacacacatggctatttttaaaaaatgtttatttttatttttttatttattgagacagagtgttgctctgttgcccaggctggagtgcagtggtacgatctcggctcactaacctctgccttctgggttcaagagattctcctgcctcccgagtagctgggattacaagcaggcaccaccatgcccacctaatttttgtatttttttttgtacagatggggttttgccacattggccaggctggtctcaaacttgtggcttcaagtgatctgcctgccttggcctcccaaagtgctggaattacaggtgtgagccaccacacctggccagtaattttattttatttatttagtttttgagacagagtcttgctttgtcacccaggctggagtgcagtggcgccatcttggctcactgaaacctcagcctcccaggttcaagagattctcctgcctcagcctcccaagtagctgggattacaggcatgcgcccccacgcctggctaattttgtatttttagtagaggcagggtttcaccatgttggccaggctggtctcgaactcctgaccttgtgatccgcccatgttgccctcccaacagtaattttattttttatagagatgaggccttgctatgttgcccaggctagtgttgaactcctggcctcaagtgatcctcctgctttagcctcccaatatgctgggagtacaggcatgaaacaccatgcctggctgctttttcctacattttgaattgttgccttcatctttctcacacagtgtttttgctcagctcttgccatcctatgtcttacatagcttattagcctaaacacccatccattttctttgtccacagtgtcagggtcttatgaaattcatcctcccttaagactgagattctgatgttggttactatctcaactctatttttgtagtgatgttccccttagaggccgcggtgtcttctccagctaactgtccttatttggggtaccttagtctaaccgccatgttcaaagacatatttgaaattcaggtttaaatcctttttccccctggaaactcctcagcagatgcagttatacccatcctctttcttctcagccactttcaagttaagcatgtagaccaagcttgtccaagccgcggcccagaacagctttgcatgcggcccaacacacatttgtaaacttctaaaacacatgaggttttttttttttttgcgatttttttttttaagtcatcagctattgttactgttagtgtactttatgtgtggcccaagacaattcctcttctaccaatgtgccccagggaagccaaaagattggatacccttgatgtagacaaaaaaagcaaaataaaataaaaaaagcaaagcaacaacaatagcaacaaaaagttgactgggcgcggtggcctgtgatcccaacacttcgggaggctgaggcgggcagatcacttgaggtcacgagttcgagaccagcctgaccatcatggtgaaaccccgactctactaaaaatacaaaaattagccgggcgtggtggcgcatgcctgtaatcccagctactcgggatgaggcacgagaatcccttgaaccctggaggcggaggctgcagtgagctgagatcgcgccactgcactccagcccgggcgacagagcgaggctccgtcttttaaaaaaataaaagaataagtaaataagtttaaaaggtcttttacttcagtccagttggtaactaaaaaataataatacattttttttacatccttcttccataatattgtgtagcctcttacatctacggaatcaaaagggatccttcccaaggttcattctagcaaaggaaaacgtttctttccaccatacaccctgcgacacgtgtcttaatccactcctgctcaactggctcccagtggatccctagggatttttttttttggagccaacgtgggtcagaaaaaggaagagggtgggtcagccacaggttttcagcggactgggctggcggtcgcaaattccccttacttccccacgtaggtaaaagctaacgctgcggcgaggcagccgcggtcggggcgtctccgctgaaggcgcccgggcctcctgcacgttggctgcccgggtgcgggggtgcgggctgcggtaggcgcggaggtgcagcggtaggacctccgcgcacaggcccgcctgggcggacacagcccgagttggacacgggagcagccgggcagcgcgtcttgacggaccggcgagcacttgggccggttcacatccgtatcccacttcaaggagacgtcttcgctgcatcctccggttccgggtggaggctgaccctgggccattccgtctccggtctctggtatttctgctgggtcacttcatcccgggggcctctgaggaggcggaactactgtgtcaggagtcgtggttttcaaggagaagtcgtggtcggattgacagaggtaggggaagtaggcggaacttccggctggctcttccatcagctgccttccccgggcgtctccccgcaacctcctcaacttccctagtcagtgacgcggcgccggccagaaatccgaccggaccgggctcgggggagcgtgagttgcaggtgtgtgcctatctttgcgtctctgtttgagaggacaaactgtggggctgggaccgcgaggtgactgtgactgaggaagagtggtaagtgacagcgagggcagtgggagccaggggctgggaggctactgtgaccgagggccagtgacagcgaggggactgtgacccaggagcagtgaatgcgaaacacggtgacctcggagagcgcgaggccggggctgcgacggcacttggaccgaggaagtatgaggcagtgactgcaagggactatgatcaaggggcaaggactccaaggagactctgatcgattggtagtgactgtgggggatccggacctaagggaacacgagcagcggccgcgaggggactccgacccagagcagtgacttcgaggggctgacttggagaagaggatggcatccgtgatgggcgatggcgctgtagggttgtgtttgggcacggggtgtgattggccgtgactgggcagagaaggtctttagtggaaagaacactggtctggaacttaacaggcctgagtttaatttttacggacaaacttcaccactgagttacagtttcttcatcagtgaatgggaagtttggactagtttaatgcctcccacactatgggtttcttcctagtattgagctgtgaaaccaatttagtggatggaacctgtactttttttctttttctttttttgagacagtttcgctcttgttgcccaggctggagcgcagtggcgcgatctcagctcaccgcaacctccgcctccctggttcaagcgattctcttgtctcagcctccctagtagctgggattacaggcatgcgccaccacgcccggctaatttttgtatttttagtagagatggggattctccatgttggccaggctggtcttgaactgctgacctcaggtgatccacccgcctaggcctcccaaaatgctgggattacagtgtgagccaccgcgcctggcctgaacct

SEQ ID NO: 9640 - DNA, 6000 bp, Homo sapiens
ttgaactcctgacctcaagtgatcctcccaccttggtctcccaaagcgctggattacaggcatgagtcactgtgcctggccccaacccccatcttctaaattcaacttctccagttattgtggactaaatagtgtttcctccaaatctgtaggttgaagccctaacccccaatatgacagtctttggtggtggcactttttttttttttttttgagacagtctcgctctgtcacccaggctggagtgcagtggcgtgatctcggctcactgcaacctccacctcccaggttcaagtgattctcctgcctcagcctcctgagtagctgggattacaggcatgtgccaccacacccagctaatttttgtatttttagtagagacgggggtttcaccatgttggccaggctggtctcgaactcctggctgcaagtgatccgcccaccttggcctccaaaagtgctgggattacaggtgtgagccaccgcgcctggccatgatggcacctttaaattagtaattaaggttaaatgagactgggcgcaatggctcacacctgtaatctgagcactttgggaggccaatgtgggaagatcacttgtgaccaggggtttgagactaacctgggcaacacagtgagacctcgtctcaaaaaaaaaaaacacaacaacaaatgattaaatgaggccatagggtgggaccctaattaaataggactggtgtgcttataaaaagaggaagaaagaacagagctctctacactggctcaaagaaaaaggccctgtaaggacccagtgagaaggcggctgtctgcaagcgcaggggcgaggcctcaggagataccaaacctgctggcacctggatcttggacttctagcctccagcactgtgagaaaatctatttcagttgcttaagtgcccagttcatggtattctgcaacagcagcctggcagactaatacaccagcattctcttcactagtgttcaagagttcaacaagtagaggagcatcacctctgtccacacagtttggatatctgtcctcacccaaatctcatgttgaattgtgatccccagtgctagaggtggggcctggcagaaggtgtgtggatcatgaggcggatccctcacggctcagagctgtctttgtgatagtgggttcccgcgagatctggtcatttagaagcgtgtggcacctctggcctctctctcgcctgctcctgctctcactatgtgactcgcctgctccctcttcacctgctgccatgagtaaaagctctctgaggcctccccagaagctgagtgatgtgggtgctatgcttcctgtaacccctgcagaactgtgagccaattaaatctctttttcttttttatggagtctcgctctgttgcccaggctggagtgcagtggcatgatctcggctcactgcaccctctgcctcccaagttcaagcgattctcctgcttcagcctcctgagtggctgggattacaggcacccgccaccacacctggctattttttttgtacttttagtagagatgggttttcaccatattggccaggctggtcttgaactcctgaccttgtgacccgcccacctcggcctcccaaagtgctgggattacaggcgtgagccacccaacccgacctcacagctgcttctcacacggcacctagaagcaggggcctcctgctctcccactgcggggttttcagtcaggtcgggctgggtggtgaggagagtcagagcggaatgaggaagatgctggtgggagagtgtggtgtgacaggcaggaagaggacaaggcaggcagaagcagcctgggaggaacctggaagatgggcactggcaagaaaagtggtgggcggtccccagaaacgagtttgagaaccccaggctctggccgggcacggtggctcacacctgcaatcccagcactttgggaggccacggtgggtggatcaccagaagtcaggagtttgagaccagcctggccaacatagtgaaacttcagctctacaaaaaatacaaaaattatatgggcgtggtggtgcatgtcggtaatcccagctattcagaggctgaagcaggagaattgcttgaaaccaggagacagaggttgcagtgagccgagattgcaccactgaactccagcctgggggacagagactctgtctcacaaaaaaaaaaaaaaaaaaaaaaaaagaggccgggtgcagtggctcacacctgtaatcccagcactttaggagtctgaggcaggcagatcatgaggtcagaagttcacgaccagcctagccaacatggtgaaaccccgtctctataaaaaatacaaaaattagccaggtgtggtggtgtgcacctgtaatcccagctactcgggaggctgaggcaggagaattgcttgaacccgagaggcggaggttgcagtgagccgagatcatgccactgcactccaggctgggggtcagagcgagattctgtctcgggaaaacaaaaaacaaaaaaaaccctcccggaaacacagcaccccaggctctgttggaagggaatgtggggcccaggtgctgctctatcccctcctcagtcccctggatcccagcttgattcctccactattctgcctcagtgaggagttgctgaagcactgggggcttccagaacacaggggtgcctccctctcccaggctcagaggcacggttctgtcatccgacagtccaaccagcagagctcgtaggaggcaggtcccttcaaacaccacctcaccctttcctctccagggctgctggcctagcaggcctgccagggtggggaaggtggacacagaggcctgtgggagacacaaggaggcacagcctcttgagcaggcaggaagtctccaagtccagagagcacatcctattcctgcatacaacatccaggaagcttgcctgggcttgtctcacatttccctcttggctggttagtttcagggtcatggctaggatatgcctgatatggagaagcttctcttgctggggaaaggtactgacacctccacacaactcacgcagaatttttttttttttttttttttttgatacagagtctcatgctggagtgcagtggtgtgatctcggctcactgcaagctccgactccctggttcaagcaattctcctgcctcagcctcccaagtagctgggattacaggcacatgccaccacacccagctaatttttgtatttttagtagagaccgggtttcacaatgttagccaggatggtcttgatctcctaacctcatgatccgcccgcctcggcctcccaaagtgctgggatcacaggtgcgagtcaccgtgcctggccaactaatgaaaagtttaaagaatttatatctagttttggatgttaggcatgcacacacaagtgcatgcacactcatacacatcatctccacaagccccatcctggctcagccctattctgatgggtcagcaggaccccaaggagagaagggtgggtccttggcactaagacagttcacagtggttagctgactccttcttgcctccattctttcaggaactgcatatagtacagaacatgacagcgattcgaaaaacaatatcccagctggctgtgatggctcatgcctgtagtcccagcacttcggaaggctgaggtgggataatcacttgagcccaagagttcaatagtagcctgggcagcatagccagatcctatctctacaaaaattaaaaagattagccacgcgcggtggcattcgcctgtagttccaggtactccagaggctgaggtgggaggactgcttgagtccaagaggtcgaggctgaagtgagcggtgagtgtgccactgcactccagcctgagaaacagagcaagaccctgtctcaagtgggaaaaaaaaaaaaaggaatccctgccctttcagcctctcctgtaaacagggattacaggcacgagctacctcatcgggccttagtttttgaagctagcagaggccaagatacaacagccttctaaaacaggaccagggactggtgcttataagcagggaatgcggcagagtacgatggctcacgcctgtcatcccagcacttcgggagaccgaggtgggcgatcacctgaggtcaggagttggagaccagcctggccaatatggtgaaaccccgtctctaataaaaatacaaaaaaaattagccggtcgtggtggggcgcgcctgtaatccctgctgcttgggaggctgaggcagaattgcttgaacctgggaggtggaggttgcagtgagccgagatcgcgcctctgcactccagcctgagtgacagagcgagacttcgtttaaaaaaataaaaataaatatatatttttaaaagcggggaatgcagcctaagtctctttccttccttcctttttttttttttttctttttttgagacgcagtctcgctctgtcgccaggctggagtgcagtggcgcgatctcggctcactgcaacctcggcctcctgggttcaatagattattctgcctcagcctccagagcagctggggttacaggcacgcgccaccacgcccggctaatttttgtattttcagtagagatggggtttcaccatgtcggccaggatggtcttgaactcttcctgactcaggtgatccgcccgcctcggcctcccaaagtgctgggattgcaggcctgagcccccgcacccggccgccgcaattacttctgcaccagcctaatacctcaagtccaggagcctcaggccccgcgtctatttcctccgactgcggcgcggctgatactgcctgaggcgggtggaagctgtcgcgcgtccggacgcgaccagttcccgcccagcagccggtgcgcaggcgcgggcagggagggcggctgtgcggggcgctcgcgggcttcagcgaggcgggagggcggccctgttgccctggagacgctttccctgctgccggccgcgaccgcaacccgctaggccttcatcgcgagctacgcccggaccgagaagccccggcatggccacgtccatcggagtgtccttctcggtgggcgacggggtgcctgaggctgagaagaacgcaggggagcccgagaacacctatattctgcggcctgttttccagcagaggcgggtagaggacgggctgtggcggggcgacctcgagcgcgctggtctgaggggcggagctcgcctgggacctgggccacggaaggagcgcgggggacgcgcggggtccgcggggcgggaggcgggaggccgcgaggcgggcgggcggccctgctgtgacgtccgggcgcccctcccgctgcaggggccgcaggggaccccacccgcttcctcagtgtttgggcgccgggcgcgtcttagggtggcgcggcgggaatggttggccctgggaaacccgcgatggcgtcctgagtaaggagatgggtagaatagaggcaggaagccactcgcgtcggatgccgttcagccgtgattcgagggtgactgtgcacacgggtgccaggatgggctcactcccggcgcgggagctgcatctgtgcgaagtcctacccgggtgggatctggaggcccttagaccaccgcagcgagccctcgctaggattaaggctcacgggccagagcagagggtactcagctaggtttgtgagatcactaactttacacacacacacacacacacacacacacactgaaaaaaatatcaggctcacgggccagagcagagggtactcagctaggtttgtgagatcactaactttacacacacacacacacacacacacacacacactgaaaaaaatatcaggctcacgggccagagcagagggtactcagctaggtttgtaagatcactaactttacacacacacacacacacaacacacacacacactgaaaaaaaatgtcaggctcacgggccagagcagagggtactcagctaggtttgtaagatcactaactttacacacacaca

SEQ ID NO: 9641 - DNA, 6000 bp, Homo sapiens
acatgtttctgttacattgagtggaaaacatactttcaaaaacaactggaaaaaaaaagaaaaggagaaacttcattttggctatgtgtctctgtaaaaagatcagcctttatgctcctggtattactcgctatcccactattcgacatttgtcttgtttgctgcaacagaataataataaataaaattatcttcaaagatggcagtgacttttcatcctgtaaaatgatacaagattaaaaacttggagatttttttcaatatattctcggccattaaccagttgtacaactctgataaaatttctgaaccttactcttttcagatataaaaagaagctatggaagattatgttttctgaggtcccttccagactgaaaagatttcgtaccatgttggaaatagagaggtttagaagaaattctcatcctccagacatatgaggactttctccaacaaataggaattcatcctataactcagttcacaggcctttgagataagacttgggggcataggactttggagcaaaccatcaataggagagaaaactagtcattgtaggcattgctgattggagggtgggaaatccttctgacctgcacaagtaatcaatggatgccttaaagcatgagatttgaaaacacttaacattatcttggctacataattataatgttattaatggccacaaagtttcttagcctttttaaaaaatccagtgaaagtatttgatttcatgacctcccagggctgaattatacatattaatgatccatggcatgcaatacaagattttacctttttagttgttccagaattattgccctttgatttttaatacatatccttttgttcttgtattaaaggacaagttaaaggagtagtgactctgtcaggataactctgcagaattaatatggtctttttagctttattaatatcaaagctgaagtggctgctttgtactttcaaggttgcttttgaaggatctattcctcagtggaacatcctgcttcctgctttttattttttatttttattttttattacagcagttggccggaaagcccctgttgatctgtgactatttggaactgctagactgaaatgccattttcaaaactccagctcttctgctaaacaatttttctaggaatgatgccacatcactagctacttgtatttgccaaaaggcaatactacttcaatggccctagctctgggaatgataccaaatgatggttcaggagggagggagggaggcagtaaatcagcaggaaaagctgaaaaatgccccagcttttaatagcttttatctttttccagatgactggcctctctctcaccttctgcttctattcatgatagggcccttttctcccctatttttgtggcttgatattagtattttcattcgaaacggccgtcctcaattatcagagagaaaattcacacctttcaaagctacggcaatcacatttccatgtgactcataagtatatcttctttctctagcacctaggtgcaactgtgggatgcctgatagattaggattgtatgttgaatgggaaatgggtctgaaccaagtgtcagacagtagaatgggagccaggggagggttccaaagcagcagcagaaggtatctctagcaagcatccgctctggctggggactgtcttctggttccagccttactggaagctcaggctgtagagttgtgaattcctggggccaggcaagcctagatgtgttgcctgcttttgataatgtatcaaaaatatgaactcatccttggaagcgacagctatgaggtgtttcttggatgtagaaatttaggtcatctgtcttccttttgcattgccttaaaaagtacgatttcctttcttggtttatcatttgctggccttctttctttccatccttcctcccttccttccttccttcctcccttttttccttccctagactttccctatctccctcttttctttcgtaaaatttggttgcctgggataacgtgtattgcatacaagctgacttccttactgtccctagtaagctatgtgtggctattatttcttcatttatatgcaatgccagaagcttagaagaatgttatctccctttcagttaaaaactcatagttaagaactggccatcttcttgttttgggtattgtggcttggtactgtctaatatatttggagggtatttgattttttaaaaagctactggccatgcctattgagtttcctactgagcccagcacccagaccagtgattgattaaatagtagctgctcaataaatatttgttttgtaaataatgattctattgtcaagaaacaaatcaccaagaaagaaggagctatatatttaagagtactctgttcatctggccaaaatggagttccgagtcccttgctcagctgatgtttgttcacccagaagatggtaaactcctgagaccaacttcgctttgttgttctcttgtggttccttgaccttggaaatgtttttctacaggcagagtatttccccctgttggaattttatttaatattctatctttgtttctactttagaaaacatgccacgtgaataatgatgcctcaggcaaaagaaatcactccagcagtacaatttaaacttaggacaaatcctgccctcacttgcattcacaatttgccaaggcagttggtaagaactgtgcccacacacaaattgacagaatcgaggccccaaggttagcgatgattaaaatttaaaagtccattcattcattttcaaaatattttattcgattgcttctgaggcagaatcatgagttgccttcgcttttgctgctcccggtggtggcatccaactctgaggatagctcatccaactctgagggtagctctgaggggagctaaatatcctcattgttcaatgagctagatgaaaacaaaacgaggctgtaaggtcaatctcacagccttagtggagtaaaaattagaagtcaataattctcttaccaacaaagaggacttgcattcaacaggattttcaaaagtggtatcctgtaaaaattttggaaaataccaccataatggaaaaaaaataaagtggcatataaatcaaatgtagtgctaaaaattataatttttccatatgaattttggaatcctaaaatatttttatgtgtttgtggattcataaggcatcagaactggctttttgcactgaatatgagtacagaaggctttcctctccaatagtgaattaataaaggataagtaggaaaaacgttacgaaacgatgtggtaacattatagactctgtattagggcaaaaattgtgagatagtagaagatctgtaaatttaagcatgcacaatttgacagcggatggtcgtagcatattttgtaaattcaatagcaagccccaccacgcccttaaatgaaggaaagcaagaagacaatttttaatacgtacatggcaccacacccctctaagacgcagcaatgggagaaaagcagattggcgacctgtgtgtgcaacatgaaccgagtgaaaccatcggggagggggtggggggcgtttcttttaaatgtcgcttttgcagataaacgagcagggatcctacctcttttgaccggagatgttgaaaagcacgaccaaagtttttggcttggtctcttgctttccacaacgagataaagtctgaagcctgtaactctccctgtcccgcgggagcgtgcaaagggagggaagataagcggcgtgggtgaggggtggcggcgcagaacccaggaagggagcagaggcgagagccagcctccggcaggagggcgtagaccccggtgccagccagaacggctccagccttcccgcggccagagagccagcggcgggaggggacgggcgggacctccgcggacagccccgggtgcggaccagcgggcagcggccggcgagaccctccctggatccgcccagagcttaccggaccctgcgcgcccccgtcccggctcccggccggctcgggggagaaggcgcccgaggggaggcgccggacagatcgcgtttcggaggcggcgcaggtgtgtcaggggtgggggtccgctggcatctctcgtgccggcgctgggggggtctcccgtggaggaagggctgaaggtgctccgggaggggtccactcgttatggaaaggaagcggggcgcggtcagggtccctcgtccgcagtgggggtggtccgggcccctcagcctgcacccgggaggagacgcccccttttcacgccccgcccccggtggccgaggccggattcggacagctcggggtcagtcgacggagcacaccgggcgcccgaatccgccgggtcccactcacgcccgccggccgccggtaggttggccctcccgcttccagcctccgccaccccatccctcgctgctctctgaggaggattccagacccccccgtagatctccgccctctctcgggtggggctccgaggtctagctggtctgggggtcagtcccggcctctgtctcccaccgcgcccctcgctcccctggacaccgcctggtgtgtggggctcagacccccccagtccactgcccctgtgtggctcctcctctcaggagaggattctagatcccagcccggggggggttccgaaaatgccgccagcctggagcggggaatccatggaccgtggggttgtggggttggggagcacgaaaacccagagaggggctagagctccacctccccagaccgccgaggggcgagagggcgcgccgggggccgtggttgccatggctcctggtagcggagcccggggggctggagatgccggtcgcggatggtcccttcttcctctttgtgcctctctctttctctcgctttttttttttttttggagtgtgagtgtgcgtggggaggcagcacggagaaagtgattaatttggggagcagggattggagccgggaggctggggaaagccagcccctccgttcccactctccgggctcgctgcgagccacagtgtctcagccaggggcagggccggggaactcctgcgaaaaaccacgggccggaggagcagcagccgcgcgggcccaggtacccccgccccagacggccagcagggtggagcgcagggtgggcgtttgggctgctgggcgggaaggcgggcggggaaggggtgggaggccggcggcggagggcaggtgtgcgtcggcagggctgggtggcccggcagagagggcgccccaggttcagcccctcctcgaagggcgccggcgtccagtcccgctcgtgggagccgcggagcagccccagggccggcgagcggctgccctgccaggcgcgtgcgcgagggcgcgctcccgcgggaacgcgccgtgcgcggggagatttgcgcgtgcgcgtggcgatggtaactggtgggccccccgggctcgctctaggcggaggctcccgggacgcccacgtggcttcgaattccagctccaccatcactgtgatgcgtcactctggactaggcatttaactacgtgcctcagtttccctttctcaataatacggagattatcgataccctctatactgggttgttgcaagactggaatgagatgatacaagtaatttaacaccatagatttttaaatttaacaccatatgcatatttgatgcataataagcactcaaaagttattgtcgttgatgccattactgttagttaatcctcagtttaattacatatggtgcattttcatttctctgcattttcattgaagtaaaaattctgcgttttctaattttggagaataatcttaattaaaatatgaatatttgtactgcacagtccaactcctacgaagctctgccttgcagcagattggaagagagaaactgatcaactgccgatgaagttggcttttcagtatattgatggagagagaagcttaggaagctctttggggaaacttttggtgacaagaaaa

SEQ ID NO: 9642 - DNA, 6000 bp, Homo sapiens
atttatcaatgagttatttatcatagcagaacacaaacaacttgaatgctcaacaatagagaactgattatctgtagtatattctgaaatggaatattaagcagcttttaaaagtgaggggatatataactattgaatgatagagaaaagttcaggacacattgaatatgaagaaactgatattaaaaacatgaacaaaatgaaaatatttaagaaaatatgtaattacagttatgtgaatacaatgtaaattgtttaggataagatgaaaagataaatgatttgatgaattctgtataaattgaatgtctctaaattgaatcgcataccatatgggcggatgtggccgtttaaaggagacatttggtacagttgaccctcattattcacagataacatatttgtgaatttgcccacttactgaaatttacttataactccaaagtcaatacttaaggcacttgagtagacacttgtagacgcacagaggtatttgtagatgcacagagaataaaaattgtagttgcccaatgcacacattcccagcttagatcaaacaaagtgatgctctgtgttcttgtttcagctctcatattctaaaaaagtctcctttttgcagtatatttagtgcatgtttctcaaattttgggtttttctgttggtgattttgctgcttaaaatggcctcgagcacagtgctggagtgctgtctagcattcctaagcaaaagaaagctgtgatgtgcctcacagagaaaatacatgtgttagataagttttgttcaggcaagaattacagtgctgcaggccatgagttctatgttaatgaatcaacagtatatattaaagaaggtatctttatcagttgatgaaaatcttgttaccagaggctgtcaggaacataaccctttattgtctccagtgtttgcagtgactttatagaacataattactgaggacatcagaaatcaactataaatacttttgcaactaatagacctttggaacaattatttttggattttgtataaagaatccaaaaaaatctggaaaacgtgtggctaagaaaacagttgattggtccctaattccaccttattatgtttaaattcagtgggtgtctcacagccacgtttataaaggaatcttggctggggtgtcaggtttctagtttactttgactctatctgtcagtctgtgtccaaccttcatggcaattaactgtgcttttgtgtgctaattatcattatcccagtatgggcccattattagtccaatgtccttagtttaaagcttaagtgtcaatcagtcacctaaaacaattgcatagaaggaagctttgcaaggctggtttgaaagtccttagctgagttctactttattatactccagttcgaaactgaacacaaagctcttcttgatacaattgtttatttaaatactgatttatctacttaattaaagcaaacttgagtttatattttaaaatcagggatgggataattgctactttatgcttgaagatctattcaggtagctatacattaaacaagtaaaaccgtaattataaaacctgcacatttttatctgattgagtcgctcctgccattgaacgaccttattcaagtcatttagaacaaagaaaggtggcatatatgagttttttaaaatcccactggatgccaggagtaaggagaaaatagcatcaaatcagatgtggtcagaaaagaggtatttcttttcctgtgatgcttttcctctttcctcctcttacagtaaatccccacttatcaaatcttcagatgtgtagagaaggaataaggcaggggtaatgggggagtgggacagagagatgccctttctggagtttgcacaacggttgcatgctgagtaaaacctgatgatgtattccattcatgtctccaaaaagtcaaaagcggtttcagcgttgatttcccttaagagttatcagtcctcattcaattggtttaatgagtgtaagaggtgaccttgtgtctatgtagatactcccatattaaaagacctggatgtaaaacttcacatatgtgtaaatagttattttggagggtgttgtgagggttattgcagctctctgctcagctgctactcaggctaaacgggcaggagaaattttccactgtgttagaatgatgattatttgcaaattacatgagcaccagtaattcattcatgcaatgatacagagctgggtctcagtgcagtggtattgaacttgctgctgggggcgttaattgattcgtttggaacattcccctccagagaatcccaatcacaggtcccctgatcaagaaacggacacgcagtcggggtcctggatatgtagagacacacgtgtgaggctgttgtcatcaaaataaaccatttctgtcccctgacaggggttgagtctattaggaacactccccaatcctgggagcttccgcaagaggctttctatcttggcagaggtggcagctgagcatcgcttctttgctgcaggatggaaaaaagggactggattattggctgcattttaaactagctgctgttctagagaaaatgttggggagggactgaacaagcttagcactggatcagtgtgggggtgtgttggtgaaaagaaaaaatgcctcctcctaacttaacgtttaactgatatcccctcaacacgacccaaatctgtctctccagatacacaatgtctgttttcctaactacatggtgaactgtggagcaagtcttggtcatgtttagtttgtttcccagaatctactagaagacaatgcctagcatatagcaggcacagaataagggccaaaggggagaatggaaacaaaatatgtacatttgaaatttagaaacacagttaagggactttgcctgaaattgtcataaaactttgaaaattgcttcaatgtatagtcccagtgggagaatgtgacagcatattttattctttgttcttttctgaaattctgtgtccagtctaaaacacgacatttccctttaatgtgttaggagtatgcatgactacacaggaatattttctggagaacttctggtgaagcatattttgataaacagtcttactaaaagttatatatatgtacttttaattgactagttgcagagaaataatcaatgtaaaaaaaaatcatacatagtacaggtagtaaaagtcacagttccggcagaagcacaaaagccttcaaagtgagtgggaacctgggaaccattgatcctcagtggctgtttaccatggaaaacacctgcatcaccaacattccagttttgcaaaagtacctctattacagacacataccaggcaaggagggaggaaaaagcctgaaaatttctctccaagtttaagtaatcaggaaactttggtggggaggttggggtggggtgggggcgggggggtaacttctttatttagcattaatctcagcaatcatgaaagtcatggaatttcaagtgatgaaaaatttgaccacaacaatacctatcactagcctggttttgcccacttctcgaacaggaattataaagataataattaattctaaaaagcagaagacaaaacaaacaaaccaaaccaacactgaatgaactaataaggctgctgcatatatatgttggagttggatgtttatttgcttactgcagtagtttaaaaatagttttccagttaacatcttttccacatagtggagatgtcagggtaggtttacatgattgcgtaaatggtcagaagttgtttatgtagctctgaactgctgagagatgagcaggaagacctgggttcagcaaaacccttggggctttttcccagagagagaaacagaggctcctctctgggttgctggaatgctttccagacgaattcgactgggttggcttttctctgcctgtcaaagtcactttgcacagtgctggtgaggggctggggcattgctgccaatctctacggttaccccgaggtgtggagttgcggcgaagggagccacttctgcaaggaaacagtagattcataatgtagaatgaccgtggcaacgtcgttcaaagcacattctttcgaataacaaggctttcgacatgccccacccccgcgcacaacacaccacaaattgatccttgtacctaatttacagcaactgttccctctgacctccccccgcccccgccccacattccaacctgaaagcactttgcgtggatgagacttcaggtgtgtaacgcagcctgtccagccagtgtcctccgcctaaggacaggcaggtaaaaacctaccaaagccccctcttctggcctaagttcaatgccacccgcccacccacattccccggttcagcaattttcagcccagacgcagaagcatctgtttccctggccagggcgccttaacgatcccccgaattccgcgtctcccggaggccagaggtttgggtacccaggaaggtcgcgcctcctcgtgccccgatactcgggttgtaaagggaggagacatcgcctcggcgcatccctggccgctgaacaacgcaacccctacgtccccgcacgggaatccggctgataatctcctcttgcctgagaatcgggccaggcgccctttactaatttcgcgcgctggggacctggggctgccgcctctcggccgcgcggggcaggtgctgcgtccccagcgctcgcctcctccggccgcgcactgagcatgcgcgggctccgggcctccggcgcgtctccccgtccccgctcgtctcccgcccgttcccacccgcccgcgcctctccccttccccgagcgtctcccccgccccgcggctaaggagccggcagcccgaactccggcgcgccaggtttttccagccgccgcgagcgccgggagggagggcagcgccgcgccagacggagcccggggttcgacgccaggattggctgcaagtagggagctttcgccgccgccccgggcccctcggactgtgccggcgccgcacccgaggctctcgccagcccggcgccccggtgctgaggtaagtgaggcggcagctgtgcgggtccggctcctgcgtgggcgcgcgatgccccggggacgcggtcgcgggtgtgggggggaaagggcagggtccgcgcgggttgcccgaaggacaggggcgcttcccggggctctgactcccgcggggccgggcagcgtctgcggggccgtccagctcagagcccggaagccctgcagggtcggggagcgggagctgaacgcctgagcgcggaggactcagggccccgacgacgccaccgtcaccccacagcgacccttcttctccttctcagccggaaaataagtttgttgcgctgcgaggcagccacaaaacaaggaaccgagagcccggaatgctgcgggaagccttcaagtcagctcctccgactggttcgggctactgccccctctccgtgcgccctggcctctggcgccgggttcccggcggggcttttcttctgacagcccagtcacagcccgcagcagagggacgcgaacctggggagtggagggacctgggactaaaggaacaggagcccgtagccgtggtggaaggagccgcgtggagacggaggctgatgtctgtggcgcccgctgggtgccgggctggctgctgagcgctgaggctgcggcggcgagcgacaggccaggtgcctgctcttagggaaggtacctggcttccccagtctctgccgcgggagcctgttgggtggcattcgtttccagcaacttctggggggtttccagtttctttcgagaggcaagacaaccgccccgtcccctccccgggcccagacggcggcgaactgtgcgccgggcgccccacagaccccaatccactcactctccttctggaacgcggggctcaaaatcttcgtgcattttctctcttgtgcttcgtgtatatgttttactatttatgaagggtgtggaggtgagggtaggaggac

SEQ ID NO: 9643 - DNA, 6000 bp, Homo sapiens
aatctagggaccccaaatcatgagctctggctctgaatcgttgcactagactgtctctctcaatacaaaaaaaaaaaaaccctactaagtgtaatgtaatgacacagagttagttcttagtttatgttaactattgttatacagacaaaagagaaatcagaatggagagcaaacaattaaaaacaaagaaaattctaaaattctatcaaccgaaatctttacataagcaaacaaatatttttattttttaataacgtttggctggctaaaggtaaacagtaaggaaacagaaaaagttgaatatgttaacctgataatccaaagtgtagtttatatctatagatcaataaccaaaatagcattttaaacaagtttgtttattatatgtgatagcaaataattgagagagtccttatttctcaccaacaaaaagttggtagaattatgcagccattgagcattatagcttcaaagactttttaatgatatgaagaaaatactcatgaaataatgtgacccgattacataaagacattcatttattgattcatttattttaaaaaagtttgagtacctattacatggtataggccctagtctatgagctggtcacatcatccctctccaaagagtatatggtctagctttcagtgcaggctttgtaaatagactggcagagttcctcttctagggcttagtttctttatctacaaaataaagaagttggatttgatgactgatacggtttggctgtgtccccacccaaatctcatcttgaattgtagctcctataatccccacatgtcgtgggagggacccagtgggaggtaattgcatcacgagggtgagtttttcctgtgctgttctcatgatagtgaataagtctcaagatctgatggttttctaaggggcagttctcctgcacatggtctcttgcctgctgccatgtaagatgtgcctgtgttcctcctttgccttctgccatgattgtgaggcctccctagccatgggaactatgagtccattaaatctctttttctttataaattacccagtcttgggtatttcttcatagcagtatgaaaatggaccaatacaatgactgtcaacatctctgcaacaactaagttctacaagtggaaacaggaccctttattcagtcaggaataaaacattatttgatatatctgcaaagctgcaactcaactaaaattgtaacagcaccataaacctattaatgttagttctatttagaaccgcccaccatcttggtttatccaagactaaggtgtgacctgagatgttgagatttttaggactaaaacctggagattcccaggcaaactaagatggttggtcactttagttctatgtcaaatttttaagcttaaatgcaaaaactagttttaattacagaaacgtcaattaatcccttttttgtgttgggatgtttcatatgcagtaaacaaacaaacaaacaaacaaaacccgagaagaacaggaactacgtatatgtagtaaacccactcattgtcaaaaattcttagagaaacaatacatttggtatgaaagttaacaatgatcacaatagtcacaaaattttaagctacagtcatcaccctctaagagcttggtggtggttgttttaaaatcataatttcagttcagaaattggaaagaactctgactaccggtactctattaatatttcaattagagagagacatattttcaactttgaaaaattgcagttttaagaggcatatgataattttcttttcaaaatacagatgttcttctaaagattattcaaatacgactgtcttctgaagtttcatctttcttttttttcctcatttaccacatagatcagtacaattaggctaacaccaatgataatgttccttcaaaccaaagctaaagaacctcaaggggctggtaggggaatccagaggggtttgtagtgtctcaacacagccaatcgaggggcaagaactctttacatcaacaataagaccttgctctcctgggaactcttgggctcttgtctccaattccgttctccttcaaaaattccaaggtcttctaccacaccttaataaataactattaagtgcttttttactaactaataaattcaggatcccaggactgggtgagctcattaggagtaattcagatggatttgagctctttaagcaagaagcaagtaagagatttggttatgctggttcattgattcctcttcgtccaatgatgcaaaaatgcgtgtttcctcttcatccatcccaatgacaaggagcttttaagtgtcagttaacaagacagtcccgaaacccctttgcagagttaaaaaagggtaatttctaaaatttggaccaattaccaattcaggcaattcagcaaatttctaataattacaccacatttcagactctttcataattgtcatgctcatttttcctcttctgtccacagcaagccccatcctctcacccaaattccttcccccatccctgacacacatttcttcctaatgataatgctcttctctctgtctggaaccaaatgcatgcagtggtcaagtagaaatgggaaaagctgcctttctcactcttgccttggggaagagggaaattagtttaaataaatgatatgctaatttgaaaagaaatgaatcgaacagtggagagacagagtccatttcctccactggagcagctagtgcctttgagatattctgtcacatgcggaatcattatcccacctgtctgaattgatgtcttgttttagtcttcaatacctgcctaataatgcctagagcttacatctgtcgttgaatgcttactatatactaagcactgtcctaagcattttacatgtttactcccacttaaccatcacaatcctttgggataagtactgatattaaccctactttagagccaaggaaattaagccttaaagagataaagtgacttgccattagggacacagctcataaattgcagggctgggacctaagcagtgttggcctggtttcaaaattcacaccttggtccctgactcacaccattctcatgaagtctcttccaaaacctggaggctgttctagatctggcctcccaagagcaactctcaccatcattaattgctccgactgctcctccaagacctacctctgtaaagctcctccttgaagggcacaacctcatctctcttccactcccaggaaggcaggctggaaacctaatagagactccctaagaaacctgcattctatctttccctgaccattcaatttccgtacttccaccagagcccaacttctatcagacaaactccatgctatctgcatgctaactccatggataatctgcatgaaaaggggggaaagagacaaaatcatgttacaaaacttgggcaagggtctagactcaacttgctttgaaagatcttaaatcttcccattcatttgtagacagcagtgggcctttttcttcctctgctctgcacgaccttctagcccaagtgctagtatcaccttttcctaaagacttttaagacaaactgtgaccatttatgtctacatgacacagtttcaggataacaaagtgtgaagacacacaaagacgtcaaacatttatcagagacctaagcgaaacgccaataaatgttacagggatcaagaatatggttactgacattgaatgtatcctgtggctttgaagaatccaaaggatgattctcgaataatgtatccttccaaattctccagaagttctaagtttagacatcataatgaaatgtcaccacgttcctctgccagaagttgttcagtactgaggggctaatgatgctttcgcttaaagccgattcccccaataaagggtgccaaggcttttctgaagccctgcttccggctggcgactttgaagctgagacgcaggttcacgcgcagtttccgaagacctattccgtccccaccctcctccccttcctcggagacacctccacttaacactgccttctcagtccctcgccgcctgtttaaacacaacttccacccctcacaaatcagaaagctgtaatttcaaagtttcagaaacgttttcggaaagcctcctccaatgggaagcgacttcgccgctgagttaagcgtccgaatcctccttcccgcggcagggacaccggcccgggccaggtctgcggaggacgcccccgggcgcgcacacacagcccgaggacgcgccctgtattttaagacgcagggtcggatttcaccccgaaacttggctcccacagccccaggccgaactgtgtctggttctcagcccccgagcccgagttctacgccgcaaagagatggggccccattgtgcctagctggcctcctagcacggacgtgtattttcttttggtctgtcttttgctaaaaaccggcagtgcgcttcgcctccctgcccagccgcagcctgccgtcccctagacaaaaagcggcgaccgcggcccggccacccgagccccgccgcgctgcgcctttgttgggcggtccacagatggtgcccagcacggggccgcgccgagggcgggggcgggaggccgcgaagagggtcgggcgggaggggaggagacggcggagcagccaatccgcgcgcggcccatcagctgaccgcctttgcttacaccaggtgcacgccggctgcggggagcacaaagcggggcgcaccgcgggcgccggcaacgagccggtgaacgaggcgaggcccgtgcgcccgcggctgcaagcgcccgcctggcggggagaggggccgacggcgtcagcccgggcggcggcatccctaggcgcctggggcgccttcctccggacctggccgctcgctgccccgccctctgcaccccacttctccgaccctccttcccagtcctgcctccccctgccctggcctctgagagccgactgagcccagccccgtgcagcagcggttgcctgtgtcgccgcctagtctccggtcttggtgctctcccgggggtgccccaaggagccagtgcgcgctgcgggctgggaaggaggcgccgctcagctagtcctcctcctcctcctcgtctttctcctcctcctgctgctgctgccgccgccgccgccgtgggtgccgggtccgcgcgcaccccaacacccccaccagctgggcctcggggtaagtccctggccggccgcgccgcggcaggaggtgtgggaggcagcgaggggaagtcgaggcaaacttggtggcgtgggagaccctacggggtctggggaacctcagggtaagatcgcgggcctgagggggacgagggggcgcggctcacggagctggggaaaatgacgaagtcgggaaacgagaatatagtgccccgtttccccccgtcccccttgccaaaaaaaaaaaaaaaaaggtgtgggagagcgatagttgggaaggcaggccagatagaaacaggcaaaaaaaggcagtgaccggagccgagcctgctggatttcaggggccgaccaggggagggaggtgcccggggacggggagggaggagggctgccgggatgtgaaccggggaaggcagctggggctggagagcagcgcggaaagggggcccagggagctggaaagagggccaagaggagggcaaggaaggtggcgggcgacggggagaggaaagaaaaagggtgtcttggcggtggccttggtaagagaaaggggcaaggggtataattgacaaggcactgaaagtattgaagtcagagccttgggaaggatctaccgaactctcggcggtccacgcggggacagacctcagcccgtgagccttgagctccacgcggggacagacctcagcccgtgagccttgagctccacgcggggacagacctcagcccgtgagccttgagctccacgcggggacagacctcagcccgtgagccttgagctccacgcggggacagacctcagcccgtgagccttgagc

SEQ ID NO: 9644 - DNA, 6000 bp, Homo sapiens
taagaaaataatagttctctttacttgcttacatgattctagacaacactggcagcaatcatcagagatggtatagcagctacttccatattgcatagagtactaagaattcttaatttttgcattattttgtagttatcatgctgccttccagattttaaattattgacattttgtccatgttccctccactcacaaggtgactgaccagcagtttcttccgcacttcagagataggacaacaaaaataggccctcttgctgtgtcttctctcattctcacaggatatctagagcctggattcagaaaacatcttactttctatagctccataccaagtcgtcctctctcctgcccttgttcgaatagcaactccactttttccatgtcaagtagggttgattaagtgtctgtaggtcatttcttctggtcatctttgtaagttccaattagccagtaagtgctgaatgcttactctgtatccagagcagaacaagatgctgcaaagggtcctacatttataggacttagtccctatcttcaaagaggttatctgaatggtgagacaaaaatcaccgaaaaatacagctaaaagataatctagtcttgtgggagtatctatgaatgatttttagaggactggtacaagaaacttaagaactggtgcagaaatttgcagtatctgtgttgtgctggggcaagtgcccatggattttgtgagtttccacgagggctgtgactctatccctccaccataaaacattcacaatgaccaagagagactagttggactagctatgcagtagctatttgtctttgctgatgttttccatggtcaatggtagtccatcacattagataatatagtgtcagtgccaaaatatagattgaattctatgattgggtgttggacattctttcttgccatttaagtgtcatttagagttattaattaaagcactcaaggctcattgtgacattcataggtgattctgttctttttttttaaattttttacaggtacatagtaggtgtatacattttggggtacatattttgatataggcatgcaatgtgaaataagcgcatcatggagaatgggctatccatccccctcaaacatttattctttgagtcacaatccaattacactccataggcaattgaaatcttatgcctgagagaaaattgggaatagtgctgccccaataatctgaagtttggtttggaactgagtactgtatcaggacgcatcaacattatctccattcttgtcaataatattctcttactttagtatagcgagggtgagtttgcaaagccctttcatgtcctatgacccattgacccagtgagattgacaaggcaaggattgttagtatcactttatcaaacaaaacaaaacaggatataaatggtacagctgggtgtcaaaaccattttctccgatccctcctttctccagcttatcttgctctcttaaccagggcagcatttgaggtgggcttctaggcagatgaattcagttagagttttcagctgtgtactgctgatgaaacctgcttctatttgtaggtcttccctgggggtaggctcaagtgctagttttggactttcttcagacttctgctcagtctatgatactgtactgaccttgcaaagccctcgtagttccctgcatgaacatttcaagggcaaagtcataaatggccattttaatgggctggtcatcatctcgaattgtgatcctgggaatcagattcttggttttctagatcagtgctgcataatatatgatatgagctatacatgtaatttttaatttcctagtagctatattaaaaaaggaaaaagcaggtaaaataaattctaataatctattttatttaacacaaatatccaaaatattaccacttcaacatgtaatcactatacaaattaagatattttgcttttttttgtactaagtctttgaaattcaatgtgttaacatctatttcacatctcagaactagccacatcttacgtgcctaaatggctagtagtcactatactggaaaacacagggatagaaaattcttctagaaaaaaatagtgaagagaaagcagctcctttccctctactgataacagagaatgagttaggcagtgacccttatattctgacattaatcatcataatttatcagtcatacatcatcatagagaacctcttcacatcatagcaaaattactttctagtgacctagcagcttctagaccttaaaaatgttgaataggattatccatacatacaggcggagaaaataggctatgatagagatgggctacgaggtgttgcatgctccaaaaatatggtcatgtatcctgccatatgcctgacacaccttccattaaaacatcttcttaacaaactttttttttttttttttaacacatctactaaaatgtgcagaaagaagaataagtccttctgggtcaggggaggtagagagcacaagcatgaataagacatagatgctgccttcagtgaaatttgtggtctccgagggaagacagtggataatgcaggtaggagataaatgtccattatatgatgaaaatgaaaattgtccaactggatcttcagaaaaccgctgttaatattccattgtttctgagttagaagcacatgaaataattacccttcactatttaccagttacacaggcatacactgatttgttgaatttgcttgaaaagtagagccgaagatcctttgaaaatggaagaggttttcatgggggaagagatgagtgggggcgaatgagaaacatctcctttatatggcagatgcggcagtttcttgatgatggggagaagcagcttaacgtattaggcactagaccccagcgtccagtgaccaggggataatgctgacagggaacggagggcaggagtgaatatcgtgaacacaaactttgtctatttcaagagctttgccccttcctggactgacattaaatgcttatctgagcaggcaaatacagtgcacatgtttacattggggaggtagcggagactagtagtttaggaccagggttcaagactcagctatttgtgtgactttggaggaagtaatttaatcgctttgtgccccccctcagttttctcataagtaaaaaatggcttaataggatttaattaggtgctatacagaaagagtttagaccaatgcctgacacatggcattcacccaataagtgtcaataattatgattcgttttggcattattatgtcagtaataactattagctatgattctcctctaatttgttcctaaagtttcatgagactcgattttatattaaggaatcctgctaaaaagtagacatattctaataagaatttccttcagatggcaaaactggggcaaagagatgaaaatgacttgcccaagggctcagaggctgctcctaaatggggagagaggctatttaaggcaatggcggtggatttccccaaagacaagggtttcatacacgtagagtctggaacgggagtccaggctgtaccacttaactcgaggggtcatttgggaagttacctgatttctctgagccctggattgtgcacctgccaaatagatataataaatatacctacagttggtaaaactcaatagcatgacgcatgaaaactgcatgtggtctgggctcaataaaatcagcctccccattgattattatcattattattactattgttataacagatctttaggcggcgtcaggaagtgcctgtctgggatgctataatgcgtttggctcaccactatgccccagcgcctggcacctagtaaacactcaggaaacgtttgaggaatgaatatacgtcatttgaggcaagacagggcagtcggctgactgcctccgggcttagctcttcccctccttgcaaaagccggagccctaagcagcgtgtagcccgggagcccaggcattacttggcagcgggtgaaacccaccttgccccattcggagctcttggagagcgccccgcctggatgcgcatctctgtgtgagcggctctttcctaagcccttatttttctggtttgcggtttatttacttaagcatttacagctcccaggagcagaggggctgctagaggtacggtcaggactgaggtcgcggtttgtatttattttctgcctcccaatctcagagccggcaagtcacaacacggctcctttatttgtgcaccggagaggtctgcctttctttacctcctcacgggcgataaaagacaagcaactcgggctcagaaaagtgctctcacgcgacttgcctgtgtctccgcttgcgtggaccgtcgctcccaggcttggtttctcgtgcaaacccgagcagggcggagcagattaaataaagacacctcgcgcctttaatccttgaccgcaaacactggcgtttttgtgccccggatttctgaaattcttggctcggggaaccaaggcagggggagggtgggcttgtaaaaacttcccaaagcagaaatccgagctcctagcccctccccggccccagtgacacctggattccagggaaggggggcagccggaggagaggcgtccccaagggttgcgggcgcttcccaggggtgactttgaacggctggctccaagccctaccgaccccagccaaggaacaggctcagcagcctgaaagcctcgcaggacgcccctcccctgtccccgcacgcgtctatttagggcccagcccgggcgcccaggggattctgggacttgtagtccctccccgcagcctcaggcgccgccacgacccgctacttggactacattgcccagggagcttcccggcctatataagccacccggagccgctttaaagtgcagtaaccatgtggatgtgctgctgaagcgtttcctcaagctcgctggggtgggaggagaggaggaggaggaggtggtggtggaggaggaggcagggggtggagagagagaaagcgcacgccgagaggaggtgtgggtgttccgcttccatcctaacggaacgagctccctcttcgcggacatgggattacccagcggctgctaacccctctcctcgccctgctcccccaaaccggcgtggctccccgggcaccaaggtagcggctggggccgggcagagggcgcggggagttggcactggctccccgggcgcagaagtttttgccccgctctcggggagatcttgatggatgtgcatgcacttggcatgcatttgggggttcctttactgcgggcagttgttttggggggagctcatttgaagcttaaaaaacaaatatcctctactctagtgcgtggctttgggggctccccattctggtctgatgtggcattcccccaagttggaaactgttgctgcagctgcaggaaatagttctttttttttttttttttttgaagagaggttgtgggggtgtcatatgtgagtctgctcaaggaaataatctttctaaaaatgtatccctctcttgcgctccgtggttgggagaataatgcatgtgtaggggccccccgtggggagggtttttaaaaacggaagaaaaccggagaagcggtgagggatgaagtgtggacgaagctcatgtccaatgaggatgcgggcttcggatacttggccttctcgccgggaaacaagtgctttgggatctgccaaacacttcccttagttccagcctcccgcacgttcgaagtttgtgcgtgcctagtctcaattgtcagttacatcctggaaataagtaagcgtagttacctggaatcttcgcccaagcgatcccaccaacctgcctaccaagtttgggggcgggggggctgtccccagtgaaggaggctaaagaaggtggaaacttgtaatttggagcatttctgttagagctcatcttccgcggtctggtactcagtcttctttctttctaaatatttaggagctgactacagaggagcagga

SEQ ID NO: 9645 - DNA, 6000 bp, Homo sapiens
tgtttggtatgcactccagaaaagtgtatatacctactaccaatttgagggtaggtggtttagagctaaggtttaatcctttataactgctgtgttgctgggtttttgggggtttttttgtttgtttgttttgagatggagtctcactctgttgcccaggctggagtgcagtggcgccatctcagctcactgcaagctccgcctctcgggttcccgccattctcctgcctcagcctcccgagtagctgggactgtaggcgcccgccgccacgcctggctaattttttaatatttttagtagggacggggtttcaccatggtctcgatctcctgaccttgtgatccgcccacctcagcttcccagagtgctgggattacaggtatgagccaccatgcccggccagctaggttctgctagaatttatccagagctttggagaaacctggaatggttagaaaatactactcttaaaagtaaaggggctggaggaccaacaaaaccattgtatccccttttggacttgggaagtagaacattaaccacttgctaattatagcatctcccttaaccaattcttatctacaattgtgacttaccctcagtgttgtacaatgtgtatcacacaatgtgctagcttgtttctgtggcttaagagaattcaccatttctatctactacccaataggtgaattagataactcttccatttgtatattttattctgtaagaaaaattcaaattgctcttatttgtcatactattagctaatttataagcgctagccctcattcaaagaagggttaaggatttatagaattcctatattctctggaagcatcagtaacctaaaggctagagcatggtatgggcatgtgcatgatgaatatttttgatgtatagttcatatatttgtttcagtggtttggtgttagaactgctagaagggaatctcactatcttttcttcctttttgagatagtcttgctctgtcatcaggctggagttcagtggcgcaatctcgactcactgcaacgtccgcctcctgggttcaagcaattctcctacctcagcctcccaagtagctgggactacgggcatgtgccactatgccaagctgatttttgtagttttagtgcagatggggtttcaccatgttggccaggctagtcttgaactctgacctcaagtgatccacccgcctcagcctcccaaagtgctgggattaccggcgtgagccaccgcgcctggcgacttgtgctaacgttaaaccaaaattatggggggtcattgtttgtggactgagtttctgcactaggtcctagcagaccaaagtagttacatatattaagtgccacacagttacatggaaactttacagaccagtttttcctgaaaacagaaaatcccagtctgtctgaatcagaataataaggaagtcccttcttctttaacccttaaaaaaaaagtaacccgatgttaaccaatcagttatttttcattgttttgtttccttgctctcatcttacaaaacccactattctgctgtttctcattgggagctttcattctgttttgtagaatggaggctgccccattcataagttatgaataaacgccagttagatctgtaagtaaatttgttgtaatttttttctgacactaggaattgccaaatgacccttcacacgggaagtactagtttttgtttttaccagtcccagtcccctatgcctttttaaaaaagagatgaagtctcactgttacccaggtaattgcattggctatttacagccacgatcataggaaacgcagcttcaaactactggctcaggggatcttcctgcctcagcctctcgagtatcctgtatcttgctaacagagcatgttgacaaacttggatttgtgcccatcaaataagtttgaactgtaattatatacttttttttaggccttcagctttgcaaaacctctgcttttgaaatacttttttttttttgagacgcagtctcactctcttgcccagaatggagtgtggtggcgctatctcagctcactgcaacctctgcctcctggattcaagtgattctcgtgcctcagcctcctgagtatctgggattacagacgcccaccaccacgcccgggtagttgtatttttagtagagatggggtttcatcattttggccaggttggtcttgaactccggaccttaagtgatctgcctgccttggcctcccaaagttctgggattacaggtgtgagccaccacgcccagccgggtgctagttttaaaagtttcagagttgaaaagtattaataggtctcactatgtagcacggttgtaagtactttatatatatatatgatgtaatcacaactgtgataaacattgtcctcatcactcacccattttatggatgaggaaacaagtcctagaaaagtaacttcccaaggtcactcttagggcagagctacgatttgaacacctgacttctgaatgtgagttcttagttgtcatctctttgcattccccagagtaaagccatttttacactgaaaaagtgcctcctttccttttttatcagtccctgatgcgcttgtgagattaccggaaaacctgtcacaaatcaaactgtttatcttaaagagttgattttcaagactggagttttctgattgggtatgggtgttgtcccaatcttatcagtacatttagcttaaggagagtcctaatcgaaaggactagcacaaaataacccatttctttcatttcagtttcattccagaaggaaacactttctgaacctagaccctaatgcctaggctatgccttgcagggcactaatgtcaaaactattgcttttgggtggcttggaaagagcagagggacctgtctgctcaagggccagctatttgaagtgcaaattgccctaaagtgtagtaactccctttctgcctagagccaacaggctctgagaattgagcccccaacctgatttcttccattatggcttgtggaataagctttacagttttctatgaagattaaataagcacacatgtcaaagtgttttgaaaaccatcagttttactatgaaaagcatctttcaggagttggatggttttctctggttattaaaagatttatttttataagagtttttctctaacatcaagacagaagctgtcctcaatgtggcctgcagttaaccaggtcaaatttaagttaaaatttgcaataaagtagccccggaaggaaacatgcaacatgcaactgaatattcacattcagtttgcaagttccaggaaggcagaagttcaggatcaagggctggagctgggctgccagcacagtccctaggcatccttcacagaggggaaaaagcagaagctgtgtagtctaaagaccctggctcaagctgtcttcgtaatctttttgctgcttgggctgctctcgatgtctcaatgttgggaaagaacaaggctcagccaacagtaaggaccttcctatgtgccagctaccatgtgctgtaatcaagtgttttcttagttccccttacacctcctctgtatttcagaaagtcctctaccctgaaaatgtgatgagagtgccacatgacaacttaccttcttatgcactccattggtcggccattcagccaatatcagatttgggggtctagtcaggtcttgcttcccaagcttttcagaaaccctgatgaaacaggcatagggtctaaacttagggagggcaaaacttacagccaactccaaatgcagcaagcaaaataaataagcgcctaaaccattgaatctttatgtgaaagccatagccctttagagctaacatttgcaatcttcttaattataggaagtagatacagaggggtaaagttatttaactgggaatctaccccacacctcaaaggttaggtcactaattgcgggtgcacaggagagatggtaggatgggagggacaggagaagacatgtttagatatatctggtaaataatttggtggtggtgggagccttcattcccacccccaacccgccccccccttttaaaaaaatcctatttccgagacaaaagcaatataacataactttgtatttcctgaaacttccagtttctaagaactgtccaagagtacttacacgcacattcccgagaccgttggagttgttcgataggtctagggagggatctggggatacgtgttttacaagcaccatgagcgattcttcaaagttgggtgtttgaatcaaaagagcagaattcatgataccgttttgtgcactccttgagctaaaaggtagtatcccaccctctccataaacagacacctaagttataaaacttatgcgctcgatatgcaaaaatagctcgttttatacagaaacgatcctttccttcttttccttatatatcttttaactgtcatcactcctaacctagacctagagtggctttttccggtcctagctctgccggacacacgctctgcccagagacccgatccacccaaggccaggcggtctggggtcacgtctgtgtccagcgtccggcgggcgctgccgtgccgctctcccattggctggaagttccctcgcgggccggcgcggctcctgctcgccacgccagcccatcgggctacggaccgcccaggggggcggggcttgggagttggggcggggcccgggtgaggggcggggcctcggggcgtcgcggacgtcctggcggcctactgcgtgggagggagtcctgggccgcgccccgcgaggccgggcccaggccgggccaatcccgggccactgggcgggcgaccgtggggcctggccggcccgccggagagcctgggggttggggacgatgggctagttcctggtgcgtcacgggggagttccttaaaggggaagcgagccgggctacggggcgagcgcggggtgcggtggtcggcggggaggcccccgcgctttaaaataatgcccgcggcgcccgcgcgaccatgcaatggcgagcgctcgtcctggggctggtgctcctccggcttggcctccatggagtattgtggctcgtcttcgggctggggcccagcatgggcttctaccagcgctttccgctcagcttcggcttccagcgtctgaggagccccgacggccccgcgtcgcccacctcggggcccgtgggccggcctgggggggtatccgggccgtcgtggctgcagccgccggggaccggggcagcgcagagcccgcgcaaggctccgcggcgtcctgggccggggatgtgcggcccagccaactggggctacgtgctgggcggccggggccgcggcccggacgagtacgagaagcgctacagcggcgccttccctccgcagctgcgtgcccagatgcgcgacctggcacggggcatgttcgtctttggctacgacaactacatggctcacgccttcccccaggacgagctcaaccccatccactgccgcggccgtgggcccgaccgcggggacccgtgagtagcccccgccgcccggggccgcgcgcccacgcgcttccttccgccctccgcgccggggtgcagccctctgtcctccggggcccccgagggcgccagggccgttagggtcccgggcagcgctcccgcgccctgtcccgtgtgagtccctgtgaagacccccgagcttgagggtgcggggtgggccggtggccttcctctcctgattctcccggaatctccaaacttcagaactgctgtccagctcagtgtcttacgcgtgaggatactgaggtccaggaccagaagggacagtggcagtgccaagggctggcttggagggctttccacttccatccgaccccttcctccggatgagcataaactctaaatgaaatctccatcatgccccccgtgtaaacgcagcctcagaacaagcctttacctcgcacccccacctctatcacattgccacacccacgtcttttctatgtaaaaagc

SEQ ID NO: 9646 - DNA, 6000 bp, Homo sapiens
acagcagcttttgagctacaagggcagaggtgagtagtcgcgacagagaccacatggcccacgaaatctgaaaccagggcagtgcaacccatagggccccatgcttgggagatgccacagcttgatttcaccatgttgaaatttttaatcatttttaaacaagagctgaatttttgtttttctctggacccctcaacttatatagccagtcctgcctgaaagatttactatatggtcctacagtttgccctgttcttctccttttttagctcttggttccctttcactcttctaccttaatgtttctggacccaggaagccagcccctttcggaagcagtctattatatctctgggaaactttgaggcagtccttcctggtacccttaccgagaactatatcagctatcattatcagtggggccaacgatgacccaggccctgggttgagtcaagcgaaagtctgccacttactcaccagtccttgggacctcccagaataaatctcatcccttatgccttcagagatttgaggaaagttcttccgtccctctctctgagtcttctctttagaacccaaaattgtctgtttctcacaagacatgtttcaagctctttcttaaaggagcttccttcctctatagagatgatctagtttcccaacacccctcttcaagcatggagccccactagacctccaagcgtagtctgaccagtgcacagttgagtaggacagtcacctccattattctagagtgttcatctctattgatgcatcctaagatcactctgtctattttggaacccattccaaaaatctcccagatccctcatggtaggaaaagatggtccgttatgctcattatataggtgagtaaaccaaagtttgggagggagtggcctgctcatggacatatagcagttctgtctccaaatcccaagctctccagtccaccaactgagatttttgggccctcggtttctacatctgtaaaatggaaaagctgggtctcttcgagctcgagcatactgtgatttgttttctaaatgcagaccccaaaagccaagtcatgaagaaaacagaagctctcaatccagatctaaaacttgtaggaaaaacaaaaaaaagcttcctttcctgctgatcattctagagttactagccttggaaacatttgcatgagtgatcaatcttgcttgttaacagtagccctagacttgttagctcactgagttttcagtccatggtaccattactttcttagtgactcagctcatgtaaatctttccctttcccattacttcccctttggaccctccacaaatgtgtcttcctgcacatcccattttcaaaattcttttctctctcttttccctggcaagccaaataacaacaacaacgacaaaaatcctttgaaataagaacgctgtgtcctctataaaaccccagatacaaaatgggctccggaaagccactctctctccttaattgctttctcttgttagctgcatcaccccagggttgacttgaaagtttcatctgtcagtacgttctcttcgtaacattttttctgtgagtacacagcccctctggtgccccattaggttttcccactgagtgcgggggcacagactcatgcgtggggaatacaggcaggttttaccatccaaacttgacaaggaccccaggcctcagagagggggctcagagttgcttcacgatagggccaagaaacaactaatggttcccggcttcagtgctcttttcaccagtgaggtttttagaaatacaattgtcataagaaagtgagagatgaccctttctctgcctctggcatctggccctttcctctctgcctctctgagtccactcatccttctggcccagctgaagtacacttccttcctgtgaaatccacaatgtgtgttagttgctccactcccttggccctcagcaccgatcaccagctaggggcactgaccctttcagataacaaatgagcctccttacacacaccaaggatgcctaggaaggaagccaagcacataatgattctcaacaaacagtagttgctattgccattagcgctcattgatccagtgactatggttgtgaaacaagctcccccaaattccagtgacataaaaaaatgattatgatcatgaactgtgtggtttagatattcaaacaggacacagagaagacagtttctctgtttcatggtgtctgaggcttcagctggaagacaggaaggttggggatgacttgaagactggcgactgggaacatccaaaactttgttcaccctcatgcctgatgctgatgttggttgacagctggagcctcagctcctctctatgtggttttcccacataggctggtgtggacttcctcccagcgtggtgactgaggtccaagagcaagaatcctgagaggagagagccaggaagccagccagggagggaacacagaccctccctcttggtggaaggagtgtcaatctcatcatctttggaaaagatggccttccataatcattattactatgtcgttattattacttcccctttaggatgatgagttcttctaggtggctcttccatccctggcgacaagactgccattagctggcccacctttcaccagacatatctggttctacggtgcacaaagcttaagctcaggcttagatccctgccacgtcccttgtgaatacaagcagcaatgttctttttttttgttacaatctctttgcagaatattcatgtacctgggaccagggggacctggggacccaggcaagggaatggaaaagcaacaaaaaaagttacctcttaatcctaagcgacttagggacagttttctggttgcccaccatttatccctagtaacactgtgggggtgccgaaaatgtgctcaagctaaaaaacctacagttccatcatcgtttgccaagacaggagtgaccaatgagatataaacagaagtagttgggttggacttctaacaaagctttataacagagccgactcagttcgcagatgtcgtttcttgtccctgccccttcctctttcttcttatccagactcagagatgatgattggaggagcagtagacatcttgtgcctatgaggtggctttcgggctagcagaacagaaggatgggagtccagatgtctgaagacatcatggagccactataatatttctgaactacttgtgttaagtgagaaaaaaagttcctaccttattcaagtcactattacttttgcatcctttgtgttactagccaggtgtaattattgataaagcctaaatcacctctggttttccccctcctacctcaaacttcacccagctccaatccaccctccacctggccaccagggagcttcctcacacacaaatctgataccgaccctgtcctgctttgaagccttcaatggctttccagcacccctagacaaaatccacattctttagtatgacatttgggatgctgcacacccaggcctgagctgagctgtatctcctgcctcaaccccagacaccctgtgctccagccactccacacttttcaacattcctgtctataccactcctcaatatccacaatcctgtaacttgaagtgttctaggtgctgagctcctgcttgtcattcgatacctatctgcaaagccacctcccacaggaagtcttccccggtgtcctcagagtaagttactgactcctatggacttctaagaccagctctttgtaaaatatctctgatctgtggcacttaccgcacagtattataatcacttattgttttaattagtctccccaccttgactgggagcacttcaaggcggacagagccttgttggtctgtttatccccagctattagcaaatcctgaatgaaggagtgaatagacaggtaaatggaagcacagaccctgacccctgaggattcagagttgccatccttcatgctgctggagcccaggggaaggctgagttagaagagggcacagaaaaaccgagcaggtatctaagagaggtgcaccccactgatgcatgtggagtgtctgggacccaagaaaatcctggaagctgtcactagggcagggtgaagggtagcacgaacatggacttcatgttccccccaccgggcatatcccagtgcaggctccagacggcagacgaggggcagccccacagcagcttcctctccctgtttcatccccagcctggccccacaccacagtccatcaactcctgctccaggtggaaacctcagaaacccacaaagctcggacctgctccaggtcaccaagcagcagggccaggcactggcaatccaacgagaagccccactacatcgcattccagctcctgaagccattccctgggtaggagagccctgattgttattatcatctctccattttacagatggggacagagtggcctagagaggtgaagtgtgccaaaggtcacacagccagccagaggcagaggagggactaaccccacttccctccacgggcagtgcaccccaaaggagccaaaatgctgacagcagtggggcaaattccaggggccccggagcgaccgccgagttggccacagccacacgatgcataggaaacgctaggccctctgcaccctctcctgaggcccagtgccctgaggcagccccctttaaggagcgatcggccttccagaagagctccagtcttaattttagcttggaggcctgccacaggaggctttagagagaggcaggctgaagttatgtgggacagctgtcagccggcatgctgggtggggcctatttagctggcagggacataagtctggggacactgaattggtctctctgccccaagtattttcagccccagccggccacacagctcggatctcctcctgtggatccccccagctctgcgatgatggcagaagagcacacagatctcgaggcccagatcgtcaaggatatccactgcaaggagattgacctggtgaaccgagaccccaagaacattaacgaggacatagtcaaggtaggctctgcaggcctgcctcggcgggcggagagtgtcaggtttgcgagacgtgggcgcttggcaggggagggtatctgctgcagacacagtttccctgaaaagagacttgttgctctgttgtctctgtatcacccccccaaccccaccccacccccaaaaaaaggcttctaaatcaccgaaggatctttagcaaaatcaagagcaaaaaattagcctcatctccatgacctaagtgctaatcagggcaggaggagcgagtcacaaagaaaatccctccttactactgtgacgctcctgccactcactcctggctctcaccctgggaggaacaggaacgggcggccaagttgggctcctttctgtgccaaggggcatttctgcggtctctccagtgggtgcagggttaatccccagagggcagcttccagcagggccggcagcccctcgaggtacactcactcccccagagcactgcccaatatctgtccccaaggccgagggccatgcccagccctcccctagctaccccctcaccccaggtctagtggccaggacagggcagacggcacccgggaccctcgaagagaaagctcggggttgtctagccctcagggagtctctcagcgtctgaagttgggcctcttccctcgcctcctggtgacactagcggccctgctgcctccaggcccacaccttcaatccaacttccagccagtacccagagggatctttcttttttctttttgagacagtctctctctgtccccaaggctggagtgcagtcgcacactcacgcctcactgcagcctcaacctcccaggctcaagtgattctccctcctccacctcctgattagctgggaccacaggcgagtgccaccatgcccagctaatttttgtatttttagtagagactgggtttcattatgttgaccaagctggta

SEQ ID NO: 9647 - DNA, 6000 bp, Homo sapiens
atcttggttgtgagctacttatgagaatctaatgcctgatgatctaaggtggtttcatcctgaaaccattcccccaaaccccaaccccttcaacctctgtgtaaaaattttcttccatgaaaccagtccctggtgccaaaaaggtcggggaccactgctctagcctaacagaacaacatttaatactgatgccttcccttgaacccagctgtccgctaccactactctcctgcctccacgaggcacctgtgcagaagttatctatcctaggaggcagagcccatgcagctgacaggctctgcacaatcctgtaaactattgacaaatttcacctgttacgtaactaggagcactttatcagactatcttccatgtatctgatataaaaaccacagtcaagtacaccctcaataccacagcaccacgctgactaagcatgactagctctttcaaacagttatttcttaaatgctcacttgcagcttatatgtttgttttgcattgtatgagggctcccaagcagacaggtgatagcaacacagtatgaaagaccaagtcacgcttaagatggccacatgcagtgtctcacacttgtagtcccagctgaggtgggagaaccgtgtgagctcaggagtccaaggctgcaatgagctatgatcatgccacagcactccagcctgggtgacagcataagactctgactctaaaaaaaatgtttttaattaaaattctgtccaatttagtatgctttgtgcccaccctgtagcaggctctgggagatacaagaaaagtatataacacagttaaggagttcatagactaataatagctgttaccaataaatgaatatacattgtagtttatttaaaaagacattcatgtgcatatacccatttgatgctctcaataacccagtaaaataaagattattatcccccatataaaaatgaagaaagtaggccaggcgcagtggctcacgcctgtaattccagcattttgggaggctgaggagggcagatcacctgaggtcaggagtttgagaccagcctcaccaacatggcaaaacccgtctctactaaaaatacaaaaattagctgggcatggtggcgtgcacctgtaatcctagctacttgggaggctggggcaggagaatagcttgaacccaggaggtggaggttgcagtgagccaagattgcaccagtgcactccagcctgcacgacggagcaagactctgtctcaaaaaataaataaataaataaataaataaataaacaaacataaaaaaattaaaataaaaatgagggaagtgagccttaggaaagagaggtaacctacctccatgcaaggaccacaaagctagggactacaaaggcaacagttaagcctggacccaggtctcctgaccttaaaacttacattcttttcaatgatatgttttgatacctcttcagctgtgcaggagagtaaagtgagacagccttcctggtttgtgagctgctagaggacacagacaatgtccgcacccgccttctttcctcagggcttggcacagaggacacactcagagtctgtctgttgacaaatacctgactgcagcaggagctgagctctgggaaagatcagtgggagccggagtgactggggaagccttcttgtcagaggtggcacttggcctaagcctcgtaggattgggggtgtggtggggaggaacagcaggggcaaagactcaaggccagacagggccagattcacctccctggggacagcctttctgctctttgtttctacaggcccggggctcaagcccagtgtcactagacctcatcattcccttcctgaggccagggtgctgtgtcctggtaaggaaacctaccctcactctacatacagagccttggcatctgctcccctagtggcacccacccctggaaaatccattctgcaaaaatgtttggtttggccagcacagtgttttaaattgaaattgcttaccaccatttacatatataaacaaagctggatttctggcctctgttgaaaaatcagaaaaacctagtgccgtgtgtccacattctggcatggtgacaatggcctggagctcagtgccatctgattgtttcagtcagggcctgtgctctccaggtcctcacagcagccctggtcaactttgagtttactttttgagtttggcccctgtcacacttgagtttgccaccattgacctgttctgtgccaggctagcagctggagcagacacaaacccacctgggaagaattccctagccagtggggactcccctctcccccagctccatgcttcactcagctccccgggaggagaagatgcctggctcataggggtggggggctctgtgccctcaggtgtggcggtcagatgtccagtttgcctggaagcacctcttgtgtccggatggtgagttcttggggagggggaggtaagagggaggctgggcactgaggaactgggcttggcctcatcctgcttgactcagtctcttacagacacctggggctcttgatcctggcactgctggccctcctcaccctactgggtgttgttctggccctcacctgccggcgcccacagtcaggtaagctcacctggggtaacctgggaagtcagacctgcccagctcggagactagctgccccctcaccctcccctgtctgagctctcagcactgcacccaatctctgttacccaggcagggagcctcaggcccccaagtgagcaggaatggttaaggcaaggcaaagggccctctgagcatattgtcactgtactgagtctctgtacaaaaggctagtggggcagaaatccagcctgcgctgtactcgcccagcctggagccctgaccctctcttcagaaggggtgcctttatctaattagcccataagcaccctataggctagggctgttttcggtaccaacccccagagcaaataaggggcgggggcgggggcggagaggcgagcaccctacggtatcccgagagggtggggagaagagggctgagcagtccctcagccgcccagccttcatctgttgcttcccgccaccaggcccgggcccagcgcggccagtgctcctcctgcacgcggcggactcggaggcgcagcggcgcctggtgggagcgctggctgaactgctacgggcagcgctgggcggcgggcgcgacgtgatcgtggacctgtgggaggggaggcacgtggcgcgcgtgggcccgctgccgtggctctgggcggcgcggacgcgcgtagcgcgggagcagggcactgtgctgctgctgtggagcggcgccgaccttcgcccggtcagcggccccgacccccgcgccgcgcccctgctcgccctgctccacgctgccccgcgcccgctgctgctgctcgcttacttcagtcgcctctgcgccaagggcgacatccccccgccgctgcgcgccctgccgcgctaccgcctgctgcgcgacctgccgcgtctgctgcgggcgctggacgcgcggcctttcgcagaggccaccagctggggccgccttggggcgcggcagcgcaggcagagccgcctagagctgtgcagccggctcgaacgagaggccgcccgacttgcagacctaggttgagcagagctccaccgcagtcccgggtgtctgcggccgcaacgcaacggacactggctggaaccccggaatgagccttcgaccctgaaatccttggggtgcctcgaggacgactggccgaaaagccgcattccctgcctcacaggccggaagtcccagcccagtccccgcgcgcgtccctcttcctcctcatactttcccttgactgagagctcctctaacccctgttctgatgggggagggcggtcttcccacttcctctccagaactccagaaagagcagtgtgcttatgcttcagtccaggctggagaggttggggccggggtagggaggcaggagccatgtcagttctgaaggagggtgaggcggtgggggattgcagggggcggctgagagaaaacctccttgggggccagggattccctttcccactctgaggctctggccagagggagagaggactctggacctaggaaaagaggcttttggctccaggtggtcaggacagtgggggttgggggtggggtgggtgggtgctggcggtggggaccaagatccggaaagatgaataaagacaaacatgacaaactaagaaaacacagtgtgcttctctagtgtggctggggagcctgcctggtggggtatgtgtcagtgtgctggcccaaatcctctgtgtccataccgcatggcatccgtcacattcttacaagcaatgcctccaaaagcaaaggaggatggggcaatctccttgatcccccccagtgattcttacaagaggagaggaaaacagaggcttcgccagatggtgtgtccatcatcacacagccggcccacagcaacagcacagatgggacccctgtctgccaggctctggggtcctgggttccttctactccccataccgcatttgagccaggcagtggtgaaaagcccactttctggtgccttttgtccgtgcttttagagctcctgtcccacaaagggttaccgaggcccaaagagtgtctgaagggaccgagtgtgcctagtaaggggagacttagtgggcccaggactccagggctgtgtcctccttagggctccgggggtgagtaagagctcccttactcagccgtgatgcattcgctgtcttcttcaggggcccctcccagccaggtgtcagcagagggagaggagagccaaagaaggaggaggtgcggccaccaccctagtccaaggctgctggctcccaagcctggtgttggtgggagggacagagaggggcgggaacagccagcagcctgccgggagccaaaacgaaagcactccgtgctggaagtaggaggagagtcaggactcccaggacagagagtgcacaaactacccagcacagccccctccgccccctctggaggctgaagagggattccagcccctgccacccacagacacgggctgactggggtgtctgccccccttgggggggggcagcacagggcctcaggcctgggtgccacctggcacctagaagatgcctgtgccctggttcttgctgtccttggcactgggccgaagcccagtggtcctttctctggagaggcttgtggggcctcaggacgctacccactgctctccggtgagtctggaaccctggggagacgaggaaaggctcagggttcagtttttggctcagcaaagccttagcctggctcctgtcactgctgccactgccagaactgccctgtctggtctgtctggtgctgatggtagaagagaagaacggggaaggggcaagagctgggtctgtctttctctgggagggtctgggaatacggagccccagaaaaaggtaggtggaggtcttaggcagagaacagtgcctagatggtgggggcacaaattctgactctcctttctttccttcccagggcctctcctgccgcctctggggtaagtatccctacttttaaaaagaatttcccaggttggccgaagggagcagagctgtcccaggcccatgccctccatgcccacctcagcctaggacagccaagttctttggctctctgggtatgtcaggtgccaccaaattctgggcttggaacagcttcagctcccacccgctcctccacacacagacagtgacatactctgcctgcctggggacatcgtgcctgctccgggccccgtgctggcgcctacgcacctgcagacagagctggtgctgaggtgccagaaggagaccgactgtgacctctgtctgcgtgtggctgtccacttggccgtgcatggtgagcaagtcatcctgtgacagtgcatgtgtacacgtgagtgtgtctggggtgggcatgagggccaggggatctctcaagcagtgcta

SEQ ID NO: 9648 - DNA, 6000 bp, Homo sapiens
tgtagtgagccaagattgcaccactgcactccagcctgggcgacagagcgagactctatctcaaaaaaaaaaaaaagtttgttaatgaagatgttgccagtgcccagcattatgtttgctggaagaatagatgtgagcacctccaggttttgtaaaaggcaggaagacccagcaagtgtttgtgaaatacctgctgaatgagtgcatccccactgtccagcagagggccaggcacatgcccatggaggggacctgagcagacccccatttcctttccaggtgtggcctctggaacctgactccgttaggacgaacatctgccccttcagggagggtgagccgaccggcctggggctggggttggggtgttgcgagcgatgggtacctggcctgcggtgactgtgccctttccttgcagacccccgcgcacaccagaacctctggcaagccgcccgactgcaactgctgaccctgcagagctggctgctggacgcaccgtgctcgctgcccgcagaagcggcactgtgctggcgggctccgggtggggacccctgccagccactggtcccaccgctttcctgggagaacgtcactgtggacgtaagtgaagcagagggcacctcccgtggtgaggggagagtggggaaccgggggtccccttttgtgatcccacccattcctctctttccacagaaggttctcgagttcccattgctgaaaggccaccctaacctctgtgttcaggtcagaaaggggtgcatagtgctgggctggaggctggacctgggcagaccccccagccaagggggtcttagttcttgggccgctaaagcatagtggttgccagcttcctctatgggagttccactgcctactttagtagtgcgcgggaccctgggcaactcacttcacctctctgaacgtcagtttcctcatctgtttaatgcagatgataatacagtaactacctcatggagtggttgtgacaatgaaataagagaagtgcttccccttaggaatcggtacagactaaatgctccataaatgtagccacttttattattgctatccttattctatttccatacctgtagaatgggttgctctacagtttcaaagggtgattataagaacattcactcatccggccaggcgcggtggctcacgcctgtaatcccagcactttgggaggccgaggcgggcagatcacgaggtcaggacatcaagaccatcctggctaacatggtgaaaccccatctctactaaaaatacaaaaaattagccggtcgtggtggtgggcacctgtagtcccagctactaggaaggctggggcaggagaatggcgtgaacctgggaggctgagcttgcagtgagctgagagggcgccactgcactccagcctgggtgacagagtgagactgggcgacagagtgaaactccgtctcaaaaaaaaaaaaaattcactcattcaagattttttgagcagcacaagtcactgttttaggcacttgtgatagaccctaacatctctaccctcatagaacttatattgtaatggagaaaggcaggcaacagacattgtaaataaatcatatagtatcttaaaattgcatacaaataccatgggaaagggataaggtgggactggggttgcaatttttagcagggtggtcatgtgagaaaggaatctctttgagaaggttagatgagaggggaaccatgctccgtaagacataaaaacagctttagggtcagaagacgctttatacagatgatctcacaaggctggggcagagaaagatgtagtgattcctaatcacccagccttgaatccacatctgcctcaggtcagattgagtgcagattcccaacccaacaggccttctgttgcctgccccattctggtctttctgcctttggcttttgcttttcttagtggccctaaccatggtctcttcccagcaggtgaacagctcggagaagctgcagctgcaggagtgcttgtgggctggtgagttgggcctgggggcagctggggcagggccacctcctaggggtgaaggtcagggcatgggaggcaggcaagtggccaatcccagcaaggatgggtcttggtcagagtggcctctcaccccttccagactccctggggcctctcaaagacgatgtgctactgttggagacacgaggcccccaggacaacagatccctctgtgccttggaacccagtggctgtacttcactacccagcaaagcctccacggttaggactgggcgaccctcctccacagatctctccaaatgcatctcacatctggcctcaaattttcactccatccaccctgtgccggtctctgggaacatggggggtgactcagaccagggccatattcagcggcatcaccaaagtctcccagtcccctctacctcattctacccagctgtagcctggtaggtgctgccctaagggtgctacctccaggtaacagtgcccccatcctttggcttggcagagggcagctcgccttggagagtacttactacaagacctgcagtcaggccagtgtctgcaggtgagctggtggaagaagggccccacctcaatgcctaggggcaacaggcctaaaactagcactcacctactgtctatttaggcttattttatgttcagccctgggaaagttaagagtagaagaagcacagttcctatccccaaggagcacactgttggctagacacccataaacagataaccacacctacaggtgctaagttttgggttccagggagagcttccgggaagaatttcttcctataagccagatttggtatggaagaagtcataccctagtcagtgggcacagcacaaaggcagagcagctgcaggaaccttagccgggagatatgcatagttgatgctgggaatttggagatcaggccaccagagcttggtgaatattggaacacctggctggtgccctggatttggttctgtttgtatcttacagctatgggacgatgacttgggagcgctatgggcctgccccatggacaaatgtgagtattgtaagaactgcctttcctttctgtaccaggagtggggatcttgacagggaccactcttgggcacagcacatgcaatggccttgtccttccctgagatcagataaacagagggtcattccttcattcactcaaaaaatgatgagagcttgcagggatcgcaggaacaccaaaaatataaatccttgcccccgccccacccctagaagactagcaagacatgagccagtcacttacatttaaagtgggagctactgaagcaccaccaagtgttcagtgctgtaaatgcatacaatgtggacctgacctgggtggggtgaggggtgaggggctcagggggaaggttccagcaaaactctgaagactgagctaggggaagggggtagagatacagggtcttggacaggcaggtttctgtcatgagataaagatgcaggagacatgtaggggatttggatcttatgttgagagcagcaggagctacgatcaaatttttatatatttcacacacacacacacacatatatatatatatatatatatatatatatatacttatttttttatttatttttgaggcagagtctcactctgttgcccaggctggagtgcaatggcgcgatctcggctaactgcaacctctgcctcccgggttcaagcaattctctacctcagcctcccgggtagctgggattaataggcgcctgccaccatgccctgctaatttttgtatttttagtagagatggggtttcaccatcttggccaggctggtcttgaactcctgacctcgtgatccgcccgcgtcggcctcccaaagtgctgggattatagtcgtgagtcaccgcacctggcccaaatttatatttttaaaagatctctgaggctgtcatgaatcaattcaaggcaaatcaattggaggtaaaaaaaaaaaaaaaaagacagggcagggacaccaggtagttgcagacacccaggacagcaagatcaagggcccagcaaccctagcttaggggagaaaaacagctgacattttagcacttaagatgctcggcattgtgttaagtatgtattaacacattgtgttaagctttatatgtattaatatatttagtcctcacaccaaccctatgacacaggtacaactttacagaggagaaaactgaggcagagggtgacattacttattcaaagacccctaaacagatggagctatattcatccactggctctgacactgtgctgtggactctgggcaaatcatttcttcgttttttgttttgttttgttttgttttgagaggagtctcaccctgtcgcccaggctggagtgcaatggcgcgatctcggctcactgcaacctctgcctcccgagttcaagcgattctcttgcctcagcctcccgagtagctgggattacaggcgtgtgccaccacgcccggctaattttttgtatttttagtagagacggggtttcaccgtgttagccaggatggtcttgatgtcctgacctcgtgatctgcccgcctcggcctcccgaagtgctgggattatataaaggcatgagccaccgcacccggcccaattcatttctgttaagtctcagtttttcttctctgtggagggtaagtttctaactcttcttctctgggtctcccagacatccacaagcgctgggccctcgtgtggctggcctgcctactctttgccgctgcgctttccctcatcctccttctcaaaaaggatcacgcgaaaggtgagcgcttcccggctccccattcccctgggggaggaccagagtggctgtgggagttctccgagggaaagcggcggccgagctcactggctgcctccgcccctctcccctaacagggtggctgaggctcttgaaacaggacgtccgctcggggggtgagtgggagcaagcgctgggcggagggccgcccccggggagccaggcctgtgccagctcacctcttccctccccatctgttttctccggcagcggccgccaggggccgcgcggctctgctcctctactcagccgatgactcgggtttcgagcgcctggtgggcgccctggcgtcggccctgtgccagctgccgctgcgcgtggccgtagacctgtggagccgtcgtgaactgagcgcgcaggggcccgtggcttggtttcacgcgcagcggcgccagaccctgcaggagggcggcgtggtggtcttgctcttctctcccggtgcggtggcgctgtgcagcgagtggctacaggatggggtgtccgggcccggggcgcacggcccgcacgacgccttccgcgcctcgctcagctgcgtgctgcccgacttcttgcagggccgggcgcccggcagctacgtgggggcctgcttcgacaggctgctccacccggacgccgtacccgcccttttccgcaccgtgcccgtcttcacactgccctcccaactgccagacttcctgggggccctgcagcagcctcgcgccccgcgttccgggcggctccaagagagagcggagcaagtgtcccgggcccttcagccagccctggatagctacttccatcccccggggactcccgcgccgggacgcggggtgggaccaggcgcgggacctggggcgggggacgggacttaaataaaggcagacgctgtttttctacccatgtggcccacacgcgtctccgtttcagtggcggggctggcaaacgtcattccctagccccgcggccctttaaagcccggacaggtgcagctcggtgccgcctctggttggctggcgtggggtgacgtaatggcacatggcccgtcgccattggctgggcggcaagctccgccccctggactgcggcgcgggtgggggttgtgcgttttacgcaggctgtggcagcgacgcggtgaggagacggcccacggcgcccgcgggctggg

SEQ ID NO: 9649 - DNA, 6000 bp, Homo sapiens
cccttgtacgtcgcccagcacctctaactttcatttctgtgatggcttggttaacttctacctctgccgccatcctgcaatggggcttgcacactggctggggtgcatagggctgatctgtggcacttgcaaattcccacagtgtaaatacaaccaccgtggaagatttcaagacaccaacaatggcgccatgcaaaatccctgaaaacgcaataatcagctgtcatgagctagtctgagccagctctagcataccattgaggtgggccttatacttggtattgctccctagtgactgatattgcatctggaaaataattaaagagccaaagcaaggccgggcatggtagatcacgcctgtaattccagcactttgggaggccaaggcaggcagatcacttgaggtcaggagtttgagaccagcctggccaacatggtaaaaccccatctttactgaaaatccaaaaaaaaaaaaaaaaaaaaaaaaaaaaaaaaaaaaaaaaaaaaaagaaccaaagcatttggtgaatgaatgaatgaatgagcaatgctgaagtttaaatgagcctcaggacagcagctgctgtttccagaagatggaagacattgagtgcttgccccaagaaaggaataagggagttatgacatttctgtcccctgaagactgcttataacaaacatgtctatatcaggcacaaatccaagtgctttacaaatactaacccacttaatcctcatgacaactaaaaggtagatactactactaccctgattttacagataaggaaatgaaaactcagagacatgaagtcattttccaaggtcatttggagttggctttgaaaccaggcagtgtgactgcagaaccaacattcttacccactgtgctctgttgcatcagggccagccctggggataagatgtgtgtcccatttgtgtcccaatccctgtatatcgaccccacagacagtgtgtgctcttcagcccactgtccctcaacaaagaaatgatgaagtggcaaaggtctagagatgaggtcctgcaatgatgaagtggatgtgggctcttctggataaggacagagtaaaaagatcaaggctttttaagggccataaaataaccaaggagatggactttaaatatttacttactaaattcaaataggaaattgacctggctaacttttacaaagggaaccattcaaacctgagaggtgagtttgcaacatcagtatttgtacaacgttcttccctgagtgtgatctcattttgccttgatgaccaccctggaacatgggaataattgtgctcatttgagtgaaacgaggacaccagagcttagagattgggcgatgtatccaacaccacagaaccatccatcagcagaactgggcctgggtcccagaccagatgatggccagcttcagccctctcatgctggttcagtgttacttcccaagcaggtctggtagaatcacagctgctcagaggaagtcaattcctggagctaattatgctgagcaccagcacaaagcgaaaatgtaattagtttcaaaggagctttgcacagattctggagtgacagcctaatattgcaatagtaagattcaggaatatgtctaactttttttttttttttgagacggagtctcgctctgtagcccaggctggagtgcagtggcatgatctcggctcactgcaagctctgcctcctgggttcacgccattctcctgcctcagcctcccaagtagctgggactacaggtgcctgccaccacgcccagctaattttttatatttttagtagagatggggtttcaccgtgttagccaggatggtcttgatctcctgacctcgtgatccgcctgccttggcctcccaaagtgctgggattacaggcgtgagccaccatgcctggccaggaatatgtctaacttttgatgtacttgttcgtttaacaaatagactcctagctacttatgtgcctactctgtgtaagatcattgaggtcaaagaaaaattccttcctttattgcccattctatacacagcattgaggatcatcaaaaagaaaataaaaataacgaagtcttagtgtgggagaaaaatggcattcaaaaatggtagaaggaaaggctgggacaatttgattgagggggaattttgaatattagggccaggaatttggttttatcctgtaggaaaaggaagtccaatgaaggtttttttgtttgtttttgcagtcaaggtcttgtgccatagtccagattggaatgcagtgacatgatcatggctcactgcagcttagaactcctgggggagttcaagcttataccatcctcctgcctcagcctcctgagtagttgggactgtaggtgtgcactaccacgtctggctaagtatttttttttttttaattttaaagatagggtcttgctatgttggcctcccattagggcttttaagcaagggaatgaactaaccatcctcctcctcctcacaataaaaacaatagctactggccaggttgttggcctcccattagggcttttaagcaagggaatgaactaaccatcctcctcctcctcacaataaaaacaatagctactggccaggtgtggtggctcacgcttgtaatcctagcactttgggaagctgaggcgggcagatcacctgaggtcaggagttcaagaccagcctggccaacatggtgaaaccccatctctactaaaaatacaaaaattagctgggtgtggtggtgggcacctgtaatcccagctactcgggaggctgaggctggagaatcgcttgaacctgggaggtggaggttgcagtgagccaagattgtgccattgcacctccagcctgggtgacagagtgagactccatcttttaaaaaataataataaacaacaataatagctactgttcacagagctcctactgaggcttttaacccacacacccaccctgtgaggtcagaactcatgtgaagcccacttaacaggtgagaagcatgaggcaaagaggtaacagagcacctaaggggcagagcttgaatgcaaagccacatccatctgaattcagtatagtctcaccctgaacaccgcaggatctttgcttttaaacataacctaggcagcacatggggacagaggtttgggaggcacccacatttagttcagtggttcaagatatgagaaaggctgaatttaaggagagagaaaggagaaccagagaagcagggagagaaatggtagctgcgccaggcaatgccaagaaaaccacaccagtgggaattttaagaagcaaaggagggagcaatggtgcagaaagttacctagaggccaggcaggatagggatggaaaaggaaccgtagaatttgccaaattgagagggcgtccgggacttcacagcattttcagaggagtggtgggggtgggtgccagattgctgtgggccaaggaacgtgtgggaggtaaagacagggctggcagcctgtcaacttactctttcaagaaatatgatagtggggggaggggaaacgggaagatggtggaaggaagggctttctggggagatggaggttgggagcgacttgagcagttgtgagccagaatgaaaggagaagcggaaggcaggagtttgaaggcttcaaagcaaggagcctgtccctaagagagctccagagggagctccgagggacagatggagagtagggttggtgggggctcaatgtggctggacttttccaggcctgtgcaatggaagaggtggaagtgttcatctctgtggcccccagcagcttaatagtctttccttcttccccttttcctcttcctaccttcctcccttcctctctagccacaaacatttattgagcacatactatgcaccaagtcttgtgctaggttatgttgctattataatgaacaggacagtgtatatcatccttacaactaagtgaggagacaaatattatacaagaagatggacaaatgtgtgtaggtctacatattgtataatactaacaatgggtaatgttcattgggcactttcaaggtatcaagacctttataagcatttcttaataaccttttacctaaaaatccatcccctacattaaaacttacaagatactactgatattaccttttgcagatcaggaaactgaggcacagagggatcagatgactggccaaaatcacacaacttagattcacctgtttccagacgcaagcacttaactgccacacggtcctgactatgttgagagctgcggacaccagtatgaacaagacctgcagagtgtctagggctgggaagaagccacgaattcatttactgccttttcctcaaggtgtggtccctggaccagacatatcagcgtccctggggaggtagtcagacacgcaggctcttcagcctactgcgacctactagaccgtgatgtgtagtttaaacaagacccgcaggtgtctggtgtgtagttcaagttggagaagtctggtctagagcccattcctcttattagaaacaggaaaccgaggcccaagcatttgaaggttatggacggtggtagaactttggggtttggtgagtggagccggcctaggccggaatgggcgcttccactcttggcccagcaggccagtgggcagggccgcgggaaggacgggcgctgcaggggctccgcgcgctcaaggtgctcgcgggctcccgggcccagccgggctgaggtggcgtgggcgccctgcgggccgggcctccgcggcgcgtcccagtcccagtctccgcgctggtctggcccggtccctcagctccaccccctgcctccccctcccgcccgctcgcgcctcctgaaaagccagctcgcccggggcggcggcgcagagccgggccggcgcacgaggcagccagcgcggccatgacggcggagaaggcgctgcccctgggcaatgggaaggctgctgaggaggcgcgggagtccgaggcgccgggtggcggctgcagcagcgggggcgcggcgcccgcgcgccacccgcgcgtcaagcgcgacaaggcggtccacgagcgcggccactggaacaacaaggtggagttcgtgctgagcgtggccggggagatcattgggctgggcaacgtgtggcgcttcccctacctgtgctacaagaacggaggaggtgaggtgatagtgaggagaaggggagggggcgccaaccgcccggtgggggcggggagccaggggcgagcgcgagaccccctcccgcgcctgcgtggagcggaacccgagcggagaacctcgactccaggcacctcgcgtgtgagctcgccccggagcgcggcccacctgtgccagtgcgcacgcgcacgtgccaattcgcacctgagggttccacctgccagcgcggggacttgcccgcgttctgtccccagcatgagatgcagaccgaggccagggagcccttgctttgggtaggcgccctggtgtttcgggcacttggccccttggagcctcagctttcctaactgggaaaacggcctgtggggaagggactcctgatgatcaaagtggtctcagtttttgcgcgcttactgaagtgccgagcacctttgaccatatcatctcatctcatcctctcagtcactttcgtaggcaggggtctacccattttgcaggtgaggacactgagggtcagagaagtctcactcgaccaaaaataaagatgagattctgatgtcaaaggccctattttaaactgggactggactcacaacagggagaacttttaggcgaggcattgctctatggtttcctgcctagtctttcgtctgctcttaagcccatttctagggccaatatttggggcccctctggtggaagaattgacaacgaacagtttattttacgggtctgagagtcacccacgacaaacagcaatactggtttaatgttgatgctctgcatagagatgtagaaggggagagggaaaggacagt

SEQ ID NO: 9650 - DNA, 6000 bp, Homo sapiens
atggatattccttgcaattcacagcagaacaatgaacatatactgagcatttaccacataccagggcgttagctggctttctccaagcaaccttctgaggtagagactactatcattcgcactttatagagagaaaactgaggcctagaaaggggaggtcacatgtccaaggtctgtctagctcaaagacagcataatacctatagtacaatgtgccgtggagaaatgtttatgaagccatctcctgggggcaggctcatctccatggctgctcttggcctgtcttttcatgcgctgcccatttggaggcatgtgcctgttgagtgtttaagtattgatctcagcatggtatgacaggcacaaatatttaaacattcagcagtgaggcctcgttgcccaagatctgtcccagcgtgactcggggacagaataacaaaatgaacttaggtcttattatctcctgcgaggcttattgtggtttctcaagtgattacgcacattaatgcagggactccttttgctaatgggggaatttctggcatggaggggggtgtggttaaggtaataacatttcttctgaaaacaaaaaaaatgaaggcctgcttccctacaggggatattttcttaggttgaagggggacttctcagtgttactacaattttggaaagcctggaatatgggattctttgttgtcatggagacagagtctgctatgagcagcagatggggtcctggacagagggcctggacaacgggcaggagagcaaagcaggttggtgacaagtctgggggtcctgactcccagattgggtttcttcccagatcgtcacctatagcctaatgagaggctctctggggcggcagaaaaactccctggcaggattcatgagcttacaggcccagagccctggctttggaggagcccaggcctaagctgagatccagtctctgctcctctcctactgtgtgtctctgggccagtggttcgtcctctctacacctctgtttccccatgtgtcaatcattaccatgcagcaagtgctcaaaaatgtagctagtaggcatggttttcgtggctttgccagcagatagccaagtaccctcaggcaagtcagtgcctctctctgggcctcagtttacctgcaaaagcattcaactagctaatatctaaggaccatttctagcctaatggcctgtgagtctatgactcaatgaactctcccaactcgagaaagagagaggactatgataatgacattcacaatcgacatttccaccatctattgggtgcctactatgcgctgggaaccctgctgggcaccaggtcctcctcgtctcacacctacagtgcagcctcctgacaatcttctcacttctgatcttctcccttttaatccatcctgcatacctggccagtttcagctttcttaaaccctgcctgctcctttgctccagaacactcagtggctccccagtgcccctcaaggtcaagacccaactccttaatgtggcaagcgaaccttccatgctcaagcccttccctttgtcatggactctctgacagactgtgttgtctctttgtctagtcctccccattcctcgtactcagtaggtgctcaataaatatttgtcgagtgaatgaacacatggataaaatgtttctctaaattaggctactcaaactttagtcctttgcaaagcagccacaagagttttgcaaaaatctgcacaccatgtctatttttatttacttaaatattttccttttttagattaaataaatgtatctcaaaaggaaactttacatcatgctataactagaaggccaatattacttgccagaaataggtctccattaaaataaatacaaggacaaatgagcaaagcattcaattctaactagatactgttgtctaccaaagctggcagcctctcagttaaaatgggattagtcagtgctttggagaggtgttaaagactaaaccagcaccaacctgagacttgcccattgacagaaatcacaaggatgtaacaaagggatgaataggggagaactgtttcactccaagttatttcactccactgaaaattatcctacctaccatcagaggttggcagcctacattttggaaaccttgttctacagagcccacagctccagctcaggaggtatgcatatgagttctctgaaagacttcaactcaggctttttgaaagagtattggaagccctgcatgcaactacctcgccttcacaatatagtgtccctatctgaagtctcactgcaccagagacagctctcagagctcgactgtgataagagtttgttggaaaccatcttcctggtggaataatgagctctccccatccttgcagagatgcagacatacgctggacagtcatgggtgtagggcaggggcagagaatgccagcgggggcagggaatgtcatggagataattcaagcatcagatggtcagcctatgaaattgacctgatagctagagtttgctttcatatgtaagcaaaacaaatccagagggatgaaaagagagaggaattcatttctggtcagcaacgtagaaaaaacagagagacaattgtgaatgaggttacccagaaaacacgaaggacaaaagggggatgggaatggctattattattcctttttataatgcttcataattctcaatccaacactggattcatgaagactattttggttttaagcaacataaactgaattcaaacttgtgtagcataggaaaaacaatttaatgatataaatagctgacactgccttcaggtatggctggatccagggacctgatatacatcaagactcactccactctctgtctctcagttctgctctcctctatgttggcttcattttaggtcgggtctgctcaagttctgcaaagatggctgccaacacctctatgcttaggagctttggtggagattgagtttctgtttgacaatagttttagcaaaagtcccagacagagttctcattggcccagcatatgtcacacgtcccctcattgaggtcagagtgatgtgctctgattatctgtgccctgggtcacatgtctgtctccaggaggagggagccccacccaaccatattgaatatgagtgaaggaggggaagtttcccaaatgaaaattgaggttctgtcacccaaagaagttgaaatgaatgtcaggcaagcaaaagtagccttcatttttgctacccttgtatctccactcaaagctatgccccacatctccatccagacagctcctactcatccttcagacctcagttcaaatggcgcttccttgaggaaaccttcccaaaccatcccacactagactggaatcccctgctggactagaatcccctgcatgtgtgctcctggcagagcttgtcattctgggtttgtgcggttatttgatgaaagcctgtctcccatactggactggcatcaccttgaaagctgtggcctgtcttgtccatcgctctgtccctggagcctaggacagtgcctggcacacaggtggaactcgggaaatatttatttgaaataccaacggaagtccacagcacatatgacctggtgatcagtggtgggaggtgaatgggtcaagaaagacaccaagattccctgctcatgagtgagagtgtggggaaacagaagaagtcagggtgaccttggtgagcactgccctgggggactcgaggatggatgaaagcagggaggaggccagattaggtggggtagaggacctgaggtccatcagcaaaggccatccctggggacaaagagaggaggggaagagtaggtctgggctggagagaaggaatcttttctctgagttcctggggaccccagagggaagggcagatgtggccccattcccagaagcctttataaaagagggtggggaggtcaggccttggcaaggacaagggaaggagtccctacgtgctggattgggattggctggaaaggggacttctctgggagaatccctcaaacctcaagaactgagagaagggtgtctggggctcctgccaccatccctgtttcccttttaagtaatctgtttccccatctgtccatccatacacacagccacttgtgtctccatgaccaaccgctggcagtggaagggtgtccttcccacccccactcttacacacactcccagctggtacccagagcctggtcaccccaggccaggcctgtgtttccaggtgtaacgggcagcagacgctgccctaggactagagcagggagggggcacgggcccaccccaacccacagcgacccacagagggcgaaaagaggacgaccgcagagagaaacggaaaggacaggccaacggaagcagtactgcaaggctggaaggagaaaagccaggaggggagtgcttgctgtgaaagacagggagacagagaccaagacggacaggcagacaggctggtgacccaggatgaggccggaaagagccatcaaaggaaggagaaggaaggagagagattggagcgggacggcggggcaggcgagggaaggagggggtggggagagggagggaggaagagaggggagaaagagggaggaagagaggggagaaggagggagaagagagcgggagaatgcgagaggaaagaagggagaggggaggcgtagaaggggagaggaggtgaagggaaaaggagagagcctgctggcggcgaagctgcaagaggcagctgcggagggagcgcgcggcgggcctgggggagcgctgggcgggggcgggcggtgcgggcagggctatacccgagctgggcgggctccgggcgccgcgggccctgccctccccctccatccctccggactcgctcccccctcctctcccttccccgcgaccctccgcccgccctcggaagaccgagacagcggagaggttgcgggtgagctgcgctgagcccaggagccgaggagtcgggagcgcagtagcgctgagcccgagcccgagcggccccgcgtcccgagcgcatcggagcggccgagccgcccggatgcagcgcctgtcccgggcagcgcagccccggccgcaggtaggaaagggcggccggcgtcggggcgcggggcgcagagcctgggataacggcgcaggaacggccagagccccgagccgctgccgcgagccgggccgggtggggggcggacacctcgagattcaagcccccgcgccgcaccttccctgagccacatgaaggagcagaggcgccgctcggaccccgacgtgcgcccaggccatccgtcccctgggacactcgggaggcaggagggctggaacagaggcgagagttgcatgccccttccctcccgcggtgccccactggccccgcaagttggcactggattctgctggagccgtcgaagctccctattcattccccagggcatggaggggacgcggagtgaatgacacgagcagcgttggggggccgtgcgccactttcccaatcctggggtcagctgagccgagttagagctatgcccctcatttgttctctgcgggctacggcggggtcgggtgcgacttgaggatgggacgtctctgggacagcccgagctctcagaaacgttggcttaaaagcacaccggggcttgggctgagtgcaccggagctaagcctagtgcaccagagctcgcgccgcgctctcccagccccgactttctccaagagatgtggggtgcgggcggtcccttagagggctggaggacggtgcctccttgctgcttcgggaactgcgctccccttcttgcttttggtctctgcgtgtactccccggcgcgacaccgctcaccacggtagcctcgggcagtgcccattgggttctgagcacacgtccccacgggtggcacccacagatgtcctgttctaggcttggctcggtcttcagacaagaaactcagaccgggcagtcccctattgaggctctgagctaatatcc

SEQ ID NO: 9651 - DNA, 6000 bp, Homo sapiens
ccctcttgattttatagtttttcctcttcaaaatgccttagcatatctaggctctgttgttgttcttgggtgtcaagaaggaagagtttatctgaataaggtgggggggaactaagggaggttttggtgagcgctgtttctataagtctttgcactaaaccgcaaatacagggtatgatacagcatcctacaagaatgagcacacctataacgattataagggaggtgaatattgaggtcataattcctttccatttcccgaaccatttctccatgagggttgtaaaggggtcatctattctagaatttttagctaactcatttatttgataaggaggtaaggccttgtaaggcttttgttattgttccatcgggggcggtgttattaggaataaaagtacaacattggactccaatcgtgacacaaactccgcctttttcagctaatatcacgtcaagggctattctgtttttcccaggctatttggctggtaaggcctaattgttcaactgttcctttaattgcatctctagtaaaattaacaaagtgttgttgattataatagatataatttattcaagctacattcttgtttacagttgaccaccagaacaatataaatttgaagcctgcagctgtttgattttgggctttgaattcatctggtacccctcatggtactccgatagcatctatataaacatgaggatcaaaggatccaggagggacgtgtctctttttacaatattctgtcttcagctttcttggtcgatgaaatgccaaggtgagagggatagccaactgaattacagcacaagtgctgctccaggtacttggcagagtacccagcgatagtcccccacaatatcaccacacatctgctccggaatgaacaagggcatactgattggtaagctcttgaaaaggcttggtttcactgcaccctgttaggtctccaaggaatgctaacttctccccctgccatgaaaggcaagaggtgaagttaacatcaggggctgcaggctggatggccctcaagggctgacccgcagggcttttgacttcagggaacagcagtggaagaatcttgcatgactcattacaccaggctgtggggttctggaagagagctatcacacagctcatgcctcgttggtcagatgaccatccaagtgggaaggggacaatttgggtttctggcctacctgtcgcacaagcctaacagtcgcttttatttagcttgcggatggaatatttaatcccttccaaccaggcatttggatcttgatatcctgtttcaatagctagagtttgctttaaatctttaacttctataatggtaactttagttttatcattgggtatgaagtgagaaaaggtttggttagaagagggtttagggctgggcgcggtggctcatgcctgtaatcccagcactttgggaggccaaggcaggtggatcacgaggtcaggagatccagaccatcctggataacacagtgaaaccccgtctctactaaaaataaaaaataaaaaaaattagctgggcatggtggcaggtgcctgtagtcccagctactcgggaggctgaagcaggagaatggcgtgaactcgggaggcagagcttgcagtgagccgagatcgcgccactgcactccagcctgggtgacaaagtgagactctgtctcaaaaaaaaaaaaaaaaaaaaaagaggatttaggaggagagggagaagggggtgaaggaggtggaggagcaatgaagcacattgtgaaatatcctatagggtctgtccctgagacttctgctcctaccataaaaatggctcaaggaagggtaagaaccttgggaagctgggatagtaatggaaatttgtacaggattacactggttatattggcaattgggaggagtactccctttagtgaaacaaatgtatggtttcaggaatatacaactattcgttgtggcagtccatccctggtttttggttgtcaatagaacattggaccaactgtggcagagatgctgaggctctgctttaggaggacaagtttcccaattaacggaatctccgttaaaatcttcccagactaattgatcccggttaacagatttccagtctgaggagagccaggaaggacaaagatacttttctgaagtagagttgtctttgaccctgcagatctccacagggtataacaagacaagcatagaaagtgatagtttgaggtgagttagacttagtaacattaataataagatgtggggtagctggggtaaagaggaaaaggaggaagaggcagattaagcttttctcttttttttttttttttttttttttttgagacggagtctcgctctgccgcccaggctggagtgcagtggcgcgatctccgctcactgcaggctccgactcccgcgttcacgccattctcctgcctcagcctcccgagtagctgggactataggcgccgccaccacacccggctaattttttttttttttttttttttttgtatttttagtggagacggggtttcaccatattagccaggatggtcacgatctcctgacctcgtgatccgtccgtctcggcctcccaaagtgctgggattacaggcgtgagccaccgcgcccggccgcttttctctttaacgttacattttcgggggtaggtactttggagaggggtacccgggtatgatgcgtccatcctctctcaacggtccggactgctgtctcagttgtgaggagcactaggtatggtccttcccaagtgggttcgagctttccctctttccaacttctgataaggatgtgatctccaggctggtgttgatgaactggtaattcaatgggtggagtttgtgctaggaggccttgagtcctgagggaggaaagggtagaagatagacctaacacatagtttctaagaaactgatcttttgtttcgaatgtgggaagatcagtagtagaatgtagataaggcaatctaaaaagcatctcataagggggtagacctatgttttttcagggagcagttcggactctcaacagggcaataggcctttcgactctccctgatgagggtggatgcacggcatgtggtactcccattttctttaggttgtttgttggtttttctgcgcactctgaaacgatctgcaacttgtctagcaagggtataaattcctacgcatccataaactctgaggactgcatcacacatagcttgggggccccagtgagttccttgatgtagctgtgacaatacctctcgcatgaagggcttagacagcatttccttcttgtctggttgtacccatcttccctcgtgactttctttggctcctatttcttttaacttttctttttctctgggggagaaaacagggactgtagctggagggggaagataaggggttaggtggaaaatgggtgctgcttgagaagaggcaacatgtttagccacttggtcagctagattattccctcagctctcaaaggaaagattcttctagtgacctggaacatgaacaactgctgtctcttctggcggctgtaagttctctagtacttggattatcaagtctctatggactaagttttggcctttactgttaataaggcctcgctctgcccaaattttcccaaaggtgtggactactccaaaggcatacgtggagtcagtataaatagttccttcctggttttgcagaaattttaaggcttgatttagtgtaaacaactcacatgtttgctcagaccagtcattaggtagggtgtctccgtctactgctgagtacctgttatgccttttcccttttattacttgagaagaaccatctacaaaaaggtgtcttccggtttgaaagggagtttatctaaacatctatgcccaagttcttctggtctggggcatgggtttttttctgcgtttgaatttcctgttaagaaggcagcagggttaagtgaatcatctgtagttcggattaaatcatctttttctaacaagatagccttgtattttaaaattcttgagtcagtaagcaacctttctgccttctgatttaggatagttctgttctggtgaggtgtgctcacaatggggtttcctccaaaagttatttttctactttcttctgttagcaaagtagttgccgctacagattgaatgcatttggaccatccatgggttactgggttaagaatttttgacaggaagcctacgggttgggagtggcctccgtgcttttgggtaagtactcccaaggctacgcccttgtttacattgacgaaaagatggaatggctgcttagggagggtaaagctaggacaggggcagttactaatagatgttttaacctttctaccttttggatttctggtaattgccaaatgatggggtctggctcgtcttgtgtgagctttttgtatgagagttctgtttctagggcataagagtctatccatagacggcagtatctgactaatcctccttcaatccattcaagcccaattttccatttgcctttgtaattaaatgccctaaatattttacttcaggttctacaaattggagtttgtttttcgaggccgttaacccttcatcccacagaaaatttaagacatgggttgagaaagctgctacttcttttctatcatctcctgaaattagaagatcatccatgtactggaggggacatatgcacgagggcagggaaaatttctctaggacttgttctaatatttgactaagtaaatatggagactccgtaaacccccggggtaagactgtccatcagtattgctgttttcaaccggagtgagggtctttccactcaaaggcaagtaggtcctggctgccctctgctaatggacaagcccagaaggcatcatttaaatctattactgtactatctgattaatagctctaaggtcttgcactaaccagtatgacctgtctggcttctttaaaggcagtattggagtgttacagggagacatacaggatttaagaagcccatcatggagaagaccttcaattacaggttttaaatttaccctggcttctaaaggaatagggtattgctttctctttactacttccccaggggttttaaatttaacatgaatcagagaaatctgtaactttccttgatcccatcttttgaccatacctcgggataaatgtgttcttcgtctgcggtggtgagcaagattagggaggggaggggaggaattttccgtgattgatttggaggcctaagcctaattttagtattaaatcacttcctaatagatttgtccctgcttctggaattaacagaaatttgctgctagctgatcagttttcatatttcacttttgtctcctctaagatttttgctctaaatccttctccttttactccagagataaaaagtttttcttgtgaacaagttacactagatggaagataacagactgaggagtgagctgcttctgactcgattaaaaaggtaataagcttaggtttaggtcccacttctaaatttaccaagggctgttggtgggactcaagagacaaagatggagcccctgacctccctagtcttcttcaaaagctgtaagtgggatgactttttcttctttttcccatttgggacattgtctttcaaaatgacctatttttccacatttgaaacatttgttctgtgatttcttagtaatatctcgccagctattggtgacaaagtggagctttaacattccttgtccgagggggtcttctgattctaggccagcgtatttttctcatttgctctttaagcctttctaaaaattctgtcggtccctcatcttttccctgttttatattaaaggccttggtaagattttgggtgcggggcactaattctcaaattccttttattaccatctccctaaggtctctcatatttccttgatgggctatattgttgttatctcattgaggatcctgggctgggaattat

SEQ ID NO: 9652 - DNA, 6000 bp, Homo sapiens
tgctgtgcccactgagggagaagaggaagtgagcccaggcacttgccacccacagaccacatcctgcaagggtttcctggggtccactgtgctccaggccccatgctgggactgcttggcatccccgcttcctgcgtgctccctttctggggctccaagtttggcagagacccaggttgcagaagggcaatgggcaaagtgcttggcaggagggagcagcaagggtgaaggcctggaggcaagaaagcctggagcacacaggtggcaggggtaggtgggggtcctgctttccagagtgttagactgtgtgccagggacctggctcaacgcttcacatcaatcatctccactcactccacacaacaatctgcaggagaggggttatgattaatcaggctgtacaaatcaagaaaccaaggcacagagaggtcacattattcactctaggtcacacagcccatgagggatggagctgagatttgcaggcaggcaagaggagggtagtgggcaggaagcagatccctgaaggcccagatgctctgacaaggctctgcagccacctacacacccagggacgtggacacactgcagtgtgcccaggaaatgctggccaggtcagggaggcagccactcagcagccccgccactgacccttggtctcttcagggctgctcccagggatgatgttctgagagttgtaagaggccgaccagacaatcctcgatctccagcaggatccctgagctggccaggtggcccagcgtgggctgcacctcccacaggcattgcaacaactcttgttggtggcctgatagacgagacaaactcttccctagaaaggggcgagaagttttgttcaaagtcctagatcaattttattttactgttgagagctgctaaagaaagtaatcataaagtaggctttgaaaaatttcgttcactgcctctacgtggacggctgtagactacagcctgaaaattggccctccgggagctctgtccagcaatcgattttcattcttgaaatgagaagaattagtcccagtggaatttcaggctagtctatggttctgaggggaacctcggcctggctttccttgaagctcccttcttgttgccaaagctttccatttcccttggtactcacagttatctttgagggggcagggtgcacaaagtgcatcatgggtctcaaattcagctccctgcaagggccggtaggtgacagaaaagagcaaactagctaggagggagctgtggcaccctggggagcccatgtgagagggtggctaatgcccctcagctccaggacattgtagacagggggttaatgggcctgggtggccccattttgccatatttcaagataaaccaggcattcagattttgttgttgttgttgttgtttggagacagggtcttgctctcgcacctaggctggagtgcagtggtgtagtcatagcttaccgcagccttcacctcccgggctcaagtgatcctcctgcctcagcctcctgagtagctgggaccataggcatgcaccaccatacccggcgaatttctaaaaaaaattttcatagagatggaattttactttgttgcccagcctggccagattttttaaatgtgaaatcttccaagcttttattcataaaaattaactccaaacacattaaagctcagtgacagccaaagaagcacatctgggagctggattcggtttaaggcctccagttcgagacttctcctctcctcagaatggctcattgaggcagggtgtattttatctcatattacaatgaggaaactgaggctcagagagcaggcctgcaggcccaagtcacacaactgggaagccacagggctgaggtggagctagggtctgtggcctcccgcactgagctctctccaccctgtgcatgcctctagctttggcattggctcctcctggccccttctccggtctgaccatcccttttccacctcatctgccacctctccctggggctgaggttggggctcttcttgcctccttctcctcctttctctccttggggctgggtttttttgtctggcaatcgcccacccagaatcccctcattcaagattgtaacctctggagccaggtggcctaggtttgaattccagctctactatctgccagctgagtgaccttggggaagttacttaacttctctgtggctcggttttaccttctataaaacggaagaaataattgtaccaatctcataggggtgttgtcgggatgaaaagggttaacttattaaaatgcatttaactgtgcagggtacatagttaagtgccaaagaaaagtaagttaaagccaggcacggtggctcacgcctgtaatctcagcactttgggaggccgaggcaggcagatcacctgaggttgggagtttgagaccagcctgatcaacatggagaaaccccatctctactaaaaacacaaaattagccaggcgtggtggcgcatgcctgtaatgccagctactagcggggctgaggcaggagaatcacttgaacccaggaagcggaggttacagtgagctgagattgcgccattggactccagcctgggcaacaagagcgaaactccgttttaaaagaaaaaaaagaaaagtacgttaaaataaatgcagcaaacacttattgagtacctactgtgtgtcaggcctatgatagactccaggagttgatggaggcaaaagaacagatcccatccctcatggagctggtaactggatagatggttcactcgtgtgtcttgcgctggcactacctgcatgaggctccgctggcctacctggaggtcaaaggatcccatgggcctttccaagttgcagctctgaacacacaactcttccctcctcccacagccactgcccttgctcactctctcagaccctcaagctcagccctgccaccaacaaccttgctctcaggccttcgcacggcaggcacctctgctagaacttgcttcctctcctgccggcttcactgctcgtggcttagtcaaagcctccttttggttcaaacttcaatcctggagtcccctccccacgctaggacctgcccctttgcttcagtctttgtgccctgtgcgaccacacatgcacagggcgtctgaggagtttttgcttgacgtctattcctgcagttcatgagggaacctcatagctgaagcagagggatgtgggagacccagtcactcctcttcctcagctttcgtttgctcacctataaaagggtacagtgaccctgaactcaaaggagagtgctcaggtggccagaagcagatgtcacgtgggccactgggaccctagaggcactgctgatccccaggtgcttcctggaggaaggggccacccggggcccgcagagaagggtgggaagggtgacaggaaggcaaggaagggcatgtgcccagtggtcctcgtctgtcttggctggagccagtatgaggagcacccactggaaggtcaggttggagtccgatggcaggggcctccagggagagccagtgtcacttcgggatgctccttagcatcctggggctgtacagggagagtggctgcagagcccttccaggcagggatcctggcctgagtgggggcagctcttggtcggacctgtgtggtatttcttcttcttcttcttttttgtttttttgagactcattcttgtcacccaggctggagtgcagtggcgtgatctcggctcactgcaacctccgcctcccgggttcaagggattctcctgcctcagcctcctgagtagctgggattataggcacccggcaccacgccaggctaatttttgtacttttagtagagacggagtttcgccatgttggccaggctggtctcgaactcctgacctcaggtgatctgccccctcggcctcccaaagtgctgggattacaggcatgagccaccgcgcctggccggtatttcttctttcattctccgtgtaaatggtggaaggatcggctctctcctccccgcctcccaggtgcagagagagagagagagagagagggacaggagaaggctggggttcggggttctcacagcgtttccctctcatgctgccagggcggggcagtggaaaatggtccctgagggcccgttcattcaaataaggacaagaataatggcacactccccatctccatttaaaaatagtcacattagctgacactggcttggcacttcctagatgccgggtgcgttccgagttctctacgctgttaaccttggatcttcataacagccggaggagacaagcgctactattttcctttccattttatagatgaggacactgaggcagagaaattgagtcacttgcccagggtcacacagccatggcaaggccaggattctggagctctgtacctggcttcacaccacaagctcaggccaccctcccggggcataccgagtctcccagaacgtggacgatcgcccagggcaacgcagtggagtgcgagcccggtctggtttgcacctggctgctccaggagccctgggcctcatcctaggagcctggcggaagaggcgagcggtggagtttggaggctgctgtgaaggaaaggactaggcgggtcgggtcgggtctgtcctgctcttcttccgcaggcaggaggcgcccagggcgggctgccgcacctggcaacgaacgttcgccgcgcggcatgagggtgtgcgcgcgcgctcggcgagcccgggttctttgtgtgtccgagcccatgcgcgcgtgcgtgtttgcgtgtatgtgtgtgcatgtgtatgtgtgcgcgcgtgtgtccgcacttggggcggggctggaagccccggccccgccccggccccgcccccggcccggccgagctggtatttttccacccagcaggatgggtgatgctgagagctgcctgctcagacaacagacacgcgaggtcaggaagaagccgcttataaattaccgcttccttcgcgccgccgccaacgccgagccccgaggaccgcaagcccagaggacaagctgcgccaagagggagtgctggagctgttcacccagcgggtcagagagcgagccgggcaggccagcccccggccggcggaaccctggcacagcctgagcagatgctgcgggcggcgccgcagccaccccaggtaccggagggaccgggagctgggcgcgcagccggcgctgcccgccgtctgcagcccctccccatccccgcgtcgccgcagtcccggcctcctcccctccgcgtgcgcccatccggcgcccctttcaccaccgcggaagggaccgagagtcgcctgctcagtcccgctggcggggctgttattgtttccccggcaaaagggctccggctcttggtgcgggcggcaggagagtgtgtgtgtgtgtgtgtgtgtgtgtgtgtgtgtgtgtgtgtgtgtggcatatctgtgtgcctgtctccgtcaggatgcctacatgtgcctccgtatccctgtgtctgtgtttctgagggtgactgtttcaccgtgtccccagcagcgtgcacatgtgtgttccggtgcatgtctgttattctctgcgtgctgggctgtgtgtgtgtgcctctctgtgtgtgatacctgagtgtgctgtctttggatgtgtgctcttgtgtgtccccgtttgtgtctgcatgaatctgtgtgtggggggctgcgtcttccaggccctggctaggtgcacgtgcgtgtccctgagtgtggttgtgtctccaggtccctggttgtgggcactcgtgtgtcctcggctgtacccaagagggtgtccctggtgcctagagggtccaatggccagagctggttctccagggccggcgctgagtggggagaggtgatagggcagcgtggctccataggtgcatgcactccataggtggtgtgcaggtggcagcgccagcgtccagcagtcctgagtggtgggaccaaggcccggaggggcagccaagg

SEQ ID NO: 9653 - DNA, 6000 bp, Homo sapiens
cctctttaaaattaggatggccatatgacttattttggtcattaagttgtaagtggaagtttgaaaaaacagtatatgctttgccggattatctttttctcttcaaagaaaataccttttgagcagaacttccatcaatctgggccccaataatgagcaggctcttaccaactcaggtgggacatgtagactgagcaagaaatagcattattgtaataagccattgagatattatgttttttattgaggcataacctagattactctgactgaaaccatagctttggagattgtgctggagtattttagtttctacatacactgagaaataggcagtgaccattggggaacaggaggcagtgaacactggggaagaggaggcagtgaacataccactggaatccagcttggttggatataagagcacaacaatttgaaagcgttagtcaaagaaatgaactgcttgattttccttctgagcttctaaagtcatttatatttagaaggaaaagctcaccagtcataggttgtaacaaattattaatacataaatgtgttctgagctaacaggaccataaactgtcatagttggtcaacaatatttattgtggataaacaacttgtattagatatgttagaacataaaaaagagaacaatgattattatcatcccttttattgtatgccacatattatgagattcaaaggctttcataaatattttcttctactcagtggagtaagtagggaaagtattattatcccagttttacagttaaggaaatggaaacccacaaactttaaatgacaaaggggataagtggttgaaacaaaactagaactcaatacatctgagtagatgcctgtaaattaaaatattgccttcttgcgaaggctaaaattcttgttgccagaaaaagtttaagaatattttcagtgcctacagtcaaatacatatgcatcaataaggcatttgcagctattttgtgtcatggtattggatgaatgctataattagaaaacagacgtgaagccgacctaaaaccatcaaactaatatagagagccctgaagctttttccagttccagtcagtctgaaaagacaacatcaaatgctaatgagagtcagtcttaaataaaataagaataaaaattgctttatctgtggcttataactcttaagtgaatttaatgtgtattttctctcttgtgtgttacattttccctataaggaattatagagttgaacccagatcttgtacccataaatctcaaatgcttatggagacataaagaataggtaaaaatggatttttaatcacattaaggaatgctgttatgaggcaacttcctttgaaactcaaaatactaacaaattgataggaagattttaaaacatggctccattttatttgatacttgttccatctaaaggttggacttttccccctttctgattaacctggattctgtgcttgctttcaatctggccgtttctagatcaggccttaagaaactggcagttcctacttcctgtctcttcagacactctggaaaccaccatgctgtgaggaagcccaagtagttcctggagagatctacaccaataactgaagccccaaggccctagcactggctgagctcccagctgaaagccagcaccaaatttccataactttgagtgaaccatcttggaagtgtatattccagttccaggttaagtgtactcagaaataacctgccccattgatccctgtaaaaattggagatctgaaagcaaaatacaatattgttgacattttaagtcagtagggtttggggcagtttattgtatcagtgaactttgcctaggttggttttacctagaggccttctatagtacataatagagtaccttggtctggttatagggattttgtgccttcctttacattttaaagtgaaagaaaaatatcttttctgtgaacatgaattttttattattattgttatacttttaagttctagggtacatgtgcacaatgtgcaggtttgttacattggtatacatgtgccatgtttgtttgctgcatccatcaactcgtcatttacattaggtatttctcctaatgctatccctcccccagctccccagcccccaacaggcccgggtgtgtgatgttcccctccctgtgtccatgtgttgtcatgaacatcaatatttttaatgagggcattaagtttactctattgtgtggttatcctgtattcttgtagcattgtctcgtttagtccgtagagaaagatcacatccctgtagtgtgtgatctactataaaatgagttggggttttttgtgtcaataaaatgagttgcaacaaaatgagttgggtttttttgtgtcaataagtggggacagtgggaaaatttccttaaggaaagcacatgagatttggtgatttggggcagatgatagtgaaaactccagactcccatggtgcttctttcacggtctttgctttccaggtggcaaaacatgtttaaagggatttaatatacttaaacttggatggaggtcatgttctaatggcacaatttggcctcactgatgccacaaacccttaggatgaacattaggtttcgggctagaacttaaaaagggcctggaactcaagaccagagtggtgatggctgtcttcattaagaaacacttcttggtgggcaaaggatataagagatagttaggtccatctactgcagttcagtagaatacagggcttgaatttgaatttagggcagggatcttgccatgcctagcacagttcctgacacataataggtgttggaggggagacagtgaatgataaatgccaggctccttttgccatgaaactggggctttcttttgggttgtcatttttaagccactatgtggcttgcttcttgcagtgatttcatatattaggtaacagatcaggaccacgaggaaacaatttttacacacacggccctacagtgcaaattgttatgaaccacagtcatagcttacaactaatacatttcatcctgaacttcgagccaattcacgggtggcgtttatctccgttttacatcggcagcaacagcctgaattttctgggacacgatgcgccacccaaacaacagggactccctcatctttttctccccagctccgcccaagactgagccacatagccacctgcagttgcgatcggctcgccgcgtgggggactccacccgcgtgagctcggtttccgaaaagcgaagctggggtgggacacaaggattgaggggaggacagggacggacctgcggcagaagcagggtgcagctgggcgaggaaccccacgttggtagcttctcttctgggatggccgccccgcgccgcccactccggaatcctgtcccctccccggcgcgcccccgcccagctagcctagagcctctgccggatcttctcgaatttcaacacaaagggaatcctcggccgcaggaagtgcatcacgagaaagggggcctgggggcggggagagggggatgccgcttctctctcttctccccctccctcccggagcccaaggcagacgtgacgaaacccgcggggtcccccccgaagccccaacagccgagataattgaaacaagaaacccccttagtaagggggcggggggtgggccctccctccctcctcccgccacgcccgagttcctggagatcagagctgcctcgccgcggctctgacacctgtttgctttttccctcctttccttccgggtgcactagcacctgggcttacgtttgtttttctaccctggggctctcaacttcccttccacactccacctcccttgcagagttttctataaagttcgggctctgggtgtccccttgcactccccacagggctgtgccgcaggcttgggcgactttccccgcagaacgttggccgagagggagtccccgcggggggggccaggggggaggactgggagagaccactttcgttttctgagacgccttcagttcctggccgtccgccaggctttcttcttggaggtgtcagtcttcgggagtgggggctggggaaaggggggcaggctaggggatttgtgtttgaagctatttttggaaggcagccttactgtttttacttacgtggtattttgcaaattaataaaaatagcaaacttttctagaaatgctttattcacattttaccggagaatgggaaaccatccattgtccgttcaaaaggctatttttttaaagtttgggatggcttggggaggccaatggcaatttggggagaagggctgaagcacccctttttggagctcggggccagtttcccggactaaaagaccctggtgactggggatgggcctcacaactaactcgggctgccctgcccctgtcgcgtgggctcgcaatggcaagtgctccggaagggggccgcctccccgtggggctcctggctgcctctgctcccttggacaccactggggggcctccccctcctaagttctaggttgaggccggatacctgccccgacctgtctcctccctttctccaataccacacccacgggactccagtctccccgggagtgggacggagagggaacaaaggggtctttgttcactggctcccggggcgtgggagttgcgctcgctctcctttcccggcgtcccgtggagaccgggaggctcagcgcctctcccagctctcagcgccgccctcccagaccccagagacgtcggtcagggcgcggcgccccgggccactgcgggctctttccgggcgggcgacgtggggggcgaggcaccgcgcggcggcgcctggcgggcactgttgcccgcggagggacggtgggggggtttcagcagctggcgggggtggagggggcgggagagggagcctgcgccgggctgagcctggaggtgcggggcgggctcggggagcgctcttggggctcctcctgccacagccggggcggctggaactctctccctttctccctccatccttccacttcccctgctcggccccgccgtcaggccgggtcccccttccctgccgtcatcaggttccccttctcccttcttggcactttcctttcgaaccatccttctggacaaactttgatggagaatttcacaccacgctggaaaaatgccggttatgaaaggattactggcgccgcaaaacaccttcctggacaccatcgccacccgttttgacggaacacgtaagtcttacacttgaacgagtggtatggcattttctgagactgatttttctcgtacacattacttttgctcccaccttcccttttgcaccagcggagtgaattttcttctgttcttgccaaggtatcttttgtgcggagaaatttgttccctcatggtttggtgtagtattaacactttgtattggtgtaatagttggctctcttgagttcttgggtttgttaaggactgaaacgcagcctgaggaaagaccgacgcccgtattcactgtgggacctgcattttggtgtatctttagggaattggttgtaattttctgaggtgaaaaggggaatatcggtgtacctaatctttctagagtttcaaggctccctagatcaaaaggagagcttggagtgttctttcttggagcttcattccgtgatatatttcggataggtatgattttctatctgagtttaagaaatgcaggattgccaagtgtaagctttctgtagaattttaagtgttgtgagtttgtcagaaccttgattcctgcttttgagctagaatagcgtatcttttaatccttaaatgagcctaacactcaagcagaggctgttcaggaagaaggacatgaataaagacgatttgatgataagagaaagtttttagttttttttttttgagtacgaatattattggacatttagctcatttaagctacagtaggaaaaaaaatagataggatgttgtgtggttgctagcagac

SEQ ID NO: 9654 - DNA, 6000 bp, Homo sapiens
caatttaatttgtagatgatcctaaaagtctaaattggagtcctactgtcttcctcatcttcagcccccataacaaacctcatgatagtttttgtctataagaacccctttgtagttttaccacctgcaaattatttaaccttgcttttccgtgattcctcacccttcacatcccttatatctcttagctattgcctcaaaaattctggataacaaaccaacccaaatttttccttaaacggcatttacttattcttactcagactcatatggattggctagaggtaggcttgagattggctgatggaggtctggcttagattcaatcaggaggttggtccacatctgttccacatgtctctcctcctccctgcatttgctggtctttaagtgccttcaactgaaaataatcagtataccaaagcagcatattttggagtggcatttcctgaaatccttcactggtcaggtggcgaagatcaaccacctgatcaatttgttctagagtgtagaacaagtctggaactagacaggactaagttcaaatctgggctctgtcttttactagctatgtgacctttgtcaaatacttaatctctttaatcctcaaattcttcatttgtaaagggaagattagaatagtactgcaaggacatgctccaaaatttaacaaggattatctttggataatagggttaagaatccttttaaagtctgcctttaaaaaaaaaatctaaatttcctacctataattaacacgtattacccttgtaattttcaaaaagttatttttttcaaaacatactattgatgctttctgtaaacatgtggcataattgcaggttctattaatatctgtgaagaactgcaaacaagagaatggattaggaaaactgatattcttatttttctctctattgaagacaagaaacacacactgaatactgattatctgtagagcacggagtgtggttctacattgaaaaaggaatattttgtgcttttaagggctttacaatcattagggtagaattctaaaaagcaaataaataacaataatgtactccatgttagaatggggcaaacatttttttttaaaaaaaggctaaataaacgaaatgttccctgggttatccctgggaaaggagtgatcacagtaggtgaagcatcacaaaatatttcctggaggaggtagcatcatggatgacccacaaagggtggatgaccctcacaaattaactacagtctcagtgcttattggtttgcttcacaataaaaggaaaattggtcaagagataagagctgagaatgaggctggttaatttataaggagaggaatctccctgttaactgctctagctgacagtaacctcaacagctgcatgtcacaaagctcaggggagtaggaagttcttctctcatcacaactgagaaacccaacgtttaaataaaccacaatttgattcagttcaattgtgtgtgtttgtgtgtgcgtgcagagtttaaaaagctggtaaaatagattgtcagcttttaaaatttctgttcaagttgatatttattgtttttcaactcattaagggcttaaacgttaccttccttgttttttaaaccctgagtcgggctattatttttttgttcccatttgcaaatggcccagttttttacatgtatatattaactgcttatgtgaatacacaaaatattatactaagccaaatatacaactatgtgtgaaaatgatgtcttgattaagggtatcagacatccctttcaacaagaatttcaaaaggaagggcatcatgacaatttttttttctttttcttttatttattttttgtttttgagacagggtctcattctgtcttctaggctgaagtgcagtggcacaatcatggctcactgcagcgttcgtctcctgggctcaagtgattctcccacctcagcctcctgagtagttggcactatagatacatgccaacatgcctggcttttttttttttttttttttttttagtaaagatgaaatctcactatgttgcttaggctggtctcgaactcctgggctcaagtaatcctcccatctagacctcccaaagtgctgggattacaggtgtggaccactgcactcagcctgatgaatttttaaaattatcaaattgcaatatgcatgagtttacacatctattatttttattatgatgattttcaaaaggctagcttgcacttggcaatgctgaattctgattcttctcaatttcacaggagactggagattaaatcagaaatgttaagggcaaacaaaattaaaatcaacattaatgatgtatcatggcaaagaccaccagttaaacattccaccatagatttaaatatctagcctccaacaatgtaaaacatctttgtgataattaaggaaaacaaagcttttggaatctattggacatttatttgccacattgtgttttcaggagaaagaaagtacatgtttgctatctggaggaacttgggcaaatgtaggaaaaaaaaaagaagaagaaagaaacccacatacttctccattcttaagaaaaggaagtagtggtgacatcattctcggctaaaatgtagtctgtttatatctcaaatattcggtaacaatgttttctccagagttatgaagcaactagaacaatcaaatacaattttcttctaaatctttattgcctgattcattcattcatccaacaaatatttattaaacatcgattatgtgtttgatgcttagggacacaatagtaagtggagggaaagatacataatacctgccctcaagaaatttggagttgagtggaggatagaaatataaattaaagaatgacacaaataattataaagttacagctgttaaaagaaaagcatatggtgccaagagaacgtgtaatacaagatctactcatggaggtgagggaaagcttgcccatcaaagaagttatgattcaatccacgaagaccaggagttggctgggtgaagaaaaaaaggtcagaggaaggaagtccacactggggaaggctctaagcataaagggtaggaggattacagaggcatattcacgaaatttggagaaggctttcagtaagcaaggagaagccaaatgaaagtttacgggagagttggaggcttgaagacacgttcaaggatctggtttttatcttctctttatctcaagagcagtgggaagccattaaatgattttaatcagagggttggtataactagttttgtattttgaaaagctgaattcagctctcgtttgagaaactgagtgaaagagcccagaacggccgtggctgagggtgactcgtgggagactcctacacaagccatggcagtggcatgggctggtggcagaagagggaatagggagaagatttggaactcaatcttcctccattgacaaagtcactccagctttggcaaggcaattaattggtgggaaagaagatgcctagccctcctgatttcactgcactttctgcatcttcaacatgagtactgggaagtggcaaaacatccagaggcagcttgggtgctaggtggagcatgagttaaaattccaggatgaagcaaatgaacacttagaatgacaggaaagatttgggagttgggtttgggggagggctatttacctttattccctggagaccctggcacaaacccttgcctctgcaatcttcctctcaggtaaaggaattcattaaatgaattgctagaagatctactgaccagagggctgtacagaatcatatctttgagagtgggaagtaggttgatcacatagtttattatccaatcaggacatatctgaaagagaaagggggttctattaatatttaaactacaaaacatgtacaccaggaatgtcttgggcaaatctggttgccctagcaagaaaggaaatttgaaagtttatactgttctgctcccatgttaccccgtttgcacatgagagggtaagtattctctttcttcacctgcattaagggaataaaagcacaagcattcaggtgactcccaacccacttttaattttacagtttctgctatactctatacattctgaaaattacatttcccaccactatcacttcgtgataggtgatcatttacaattactcactgactcagtcccgggaagaggcggtgcaaaatgggacgctctatccaggtgctcattagaaatgcagaatctctgcctgcctcctagacctactgaattagaatctgcatttttaaataagatttccaggtgatcaatatgtacattaaaacttgagaaaaacctctagacttcgacctaaagaaaaacattttacaacttgacagtgtatgcacatacatacatgcatatagacacaactgaagcacaaatttaatgaagtagaatttaccgttactattttatttgggaaagaaatgtgctcgcgactcaatagattggagtattcactcctggatctcaacttgcaatttgaaaacgcatctctaaagcacctaggagcaatctgaagaaagctgaggggaggcggcagatgttctgatctactagggaaaacgtggacgttttctgttgttactttgtgaactgtgtgcacttagtcattcttgagtaaatacttggagcgaggaactcctgagtggtgtgggagggcggtgaggggcagctgaaagtcggccaaagctctcggaggggctggtctaggaaacatgattggcagctacgagagagctaggggctggacgtcgaggagagggagaaggctctcgggcggagagaggtcctgcccagctgttggcgaggagtttcctgtttcccccgcagcgctgagttgaagttgagtgagtcactcgcgcgcacggagcgacgacacccccgcgcgtgcacccgctcgggacaggagccggactcctgtgcagcttccctcggccgccgggggcctccccgcgcctcgccggcctccaggccccctcctggctggcgagcgggcgccacatctggcccgcacatctgcgctgccggcccggcgcggggtccggagagggcgcggcgcggaggcgcagccaggggtccgggaaggcgccgtccgctgcgctgggggctcggtctatgacgagcagcggggtctgccatgggtcgggggctgctcaggggcctgtggccgctgcacatcgtcctgtggacgcgtatcgccagcacgatcccaccgcacgttcagaagtcgggtgagtggtccccagcccgggctcggcggggcgccgggggtcttcctggggtccccgcctctccgctgcgcttgacagtcgggcccggcaacccggcccccgggcggaaacgaggaaagtttcccccgcgacactcacgcagcccgactcccgtagctgcagggattgtgagtttttcttgaaaaagagaaggaaagttcagttgcaaggggcgcggggcacgtttggtcccctttgtgcgagcaggaaaggcgttgtgttggccgcgttcgaggcgagcccccacccccggaaagggaagtttgagaagttggttatctgaaggcggccggggagcagcggcccggagcggcagcctgagctgccaaagcagccagcgcacctgggccactccgcccatggcgatgccgcgtgcccacccagctctttctgagccacccgttcaaaaggccagctcctcagtccttagctcctggagacggccacgctttccctcaggccggcttcttggcccggagtttttggaaacaagtttcaagaaaataatcgatttccaaaagaaagttagctggctccactgacgccttggcatggatggatagggagtggagatgctcaggtgaaaccgagaatccctcactgaatgcctactgggtgctagaggctgtagattttgcctggaacaagatagtcctgtcttcagggagttgatggttctatgcaattatcgtttgtt

SEQ ID NO: 9655 - DNA, 6000 bp, Homo sapiens
agagcctgtgctctaaaccaccacacagtaccacttagcagcatacctagctcaaatcttttttctccctctctgcttctctcctctactggggctatggactaccagggaggttctttgacaggtgcttgtcagaaagggacaatataagcattgggaattccctcagttaccagatatttgcaaatgtcaattatattgtagaccgtagcagccccctagtgtggtgtgtctagtacaagcgtacatgtcttgttgtttgtgtttctctaggaagaatgaaacccactctccgacctgtgtcattcctgggacacatcacaggcacttaaatcttttcttgatcactgtgggaaaggctagggactgcggatcgtaatttagttttttcttggtctgatttggtcctgtctgtgcttttgaaaccagacttttagaaagggtggtatacattctctgcctccacatcccttgccactgatcccttctcacctgctgccatctggtttctgcccctatgactccactaaaattgaccttgctaaagtaattggtgaactcctggttgccaaaagaaaggtacacttttcagctgtgtcacactccatttctctgtaccttgtgctgcttctgacttcactttatttccctttcttcactgctgggacattgctctatcttgggctccctgtaggcacatctaaatttggaaagtccttagggctctatcctcaacccttgtctccttgtctatagccttgattccagcaaaatttcacccgtagccatggagtcccaagcctttatcccagaaaacccttcctcctgaacatcacatctctttaagtgtctgttatccagctcctcttggatgtcctacagggacttaaaacattacatctccaaagctgatttgatcatctcccctccaaatctgctgcttgtcctttgctccctatttctgagacatcactttccatccaaataactaaaccagaaactccagatttgtcctaaaccctacttttattttaccccaatcaccaatttctggactctaccctcttgatacctctcctatcagtcctctcctctctgagccctactgtcccagttttggtacctaattctcttgcctaaatttctgtaaatgcttccttattggtttctctgcttccactctcaccctttccagtacatctttcatactactgtcaatttttttcttccatcaaccaagtctgatcatgttattgttgttcaaaatgtttcaatgaatcccagctgcttacagaataataaactcctttaccaggcagacaagtccttgataatctggttcttatccctctttcagtctcatctcccaatgcaccttcattaatattaaactttgtgtattaatttgaaggacttcctcgttccttcttggaatcccccatccctcttcctggtgtgtcttgtgaacttctgctcacccctcaagtttcaactcaaatactcccttcccctggaagctgggcctctgatgtcacaccactctgctcatcatgttgcacccatagtgtttgattgactcctgagatatttgaactcaggaggatgttacaagcacctagcaggattagaacctcaagtgcaaaggggcaaacacattcaagcttcatcacaaactgtaaacaatttttccaagttgataggctagaaattgtgaattcacaatgctgcaatttatttttatgggttctctagtggttccacaatagcatattcctcacaaaagtaatctctgaattctcaggtagagcttttactggtctcctctccaaaatgcttttcacattgcagccttggtaatcttttcaaaacacacatctgatcaactctctccctctatctcaaatacactacatgctgcttaaaaccctttatggcttctcaatattctgaagttaacatgaagcaaaaaacacctcttaaaaggacctacactacccggccattcctttgactcctactgcaccttgtcccactgtctgcattgcagccacttttctgggttactcgtatgcctcccctgccccactgcagtgcctttgcacgtgcttctctatgtaacgcgttccattctccttctcctcgtccgttcatcatcacttccagtgctgcttcctcagggtaatgtttctcatccttctggtgtagatcaaattccccatgtgcctgtcctccacagtgtttgtcaccctgcattttggtcctgaaccatctgatgatttggttaatacctcccttcctagggctggctggtgaactctctgagagtaggagccctgtctttcctgttcctagctgaatccccatgcatcccagttcactcacagtggtcggcataaaggagttcaatatatacttgctgaatgaatgagtgaataaatgaaggtcaaaaatcaaggggttttcgtagggcttttcacctttaccactaccctgtatttgcacgttccttaacaatttcctaaaatgctttcagataagcttttttaatattaacaactgactttaagagcagaaagggcaacccatgcaggtgacttgtccaatgctacatgactagtaagcaacaatttgggactatttcactttgtcacttttcagatcaggcctatggccattaaacagccaaaacaggaagcaaaagaagataacgtagaacttactagggaatagatacacaaagacaataaaatagaaatatccaaacaaattaaaataaaaacacaaattttattttagactgataaaactttggttcagggaacacagacaaaaatcctctgctgtcatttcagcatgtaccgtttgggctatgaggaaaagcatgtcatctttctctgtataacagaggcagttaatattttatcctaattctcattaaaatgtgtacgttcaataaatgtcggctattaaactgttggtgagaaagtctatttctggaaaccttttcattatttccttaataagactatttatggtttttttaaggaaacaagacaaaacgtaaccacttagcaggttaaaagggtagctggagttgccttactttcaaggagctacctcaaaataactagggttcatttatctaatattttaagacttctattaatattgaaacacaatttgtagttaaagagaaaaatttaaatcacctaagaaaataattcagggcctttatagttttacattaatatgccctttaatatccagatgttacttacctaataaaatgtacaattagctgtgaattgacatgaacaagtatttactgagcaccgattacgccgaaagctccgtactttctatggggtttatataagagcaattcgagtctccccactacctcacttagtttaagctcattttgccctgagtttatctggtagcactttattttagcggacaaggagggaagtggggaaaggaaaggaattataaaaatacaaggtagacgtgcacaagaaccttcgttctattattatttagtaaagtgagaactggaaacagcttaacgtccagggtaagttagtttcactcactcgacggaatgtatgcagccgttaatgtatttctgcattttcccatatttccagtgaacatacagtactttcgcaattcggagtacaaacgaaaaagggcgagagaaggtcgcattttgcctgccggagctaggggcgcgcttgccggttccaacgagttttcggtgtcggaaaacttgtctttgctcacattctcggattcccgcggccgcagaagccggaggcgggacgtgaagggcaatgagcaaggtaggctgtgtcactgccgccgcgggctcactcgcagcgccagccgaggagcgccacgggctgctgaacccctcggcccgacccacgcgccgagggctaggataatgcgcctgcgcggccgtcacgtggtgagggctccgcgcaaagcgggttaaaagtcacgaccgcggagagcccgcgagcgtcctgctggtcggtgcggcgctttccgcgtcctttaagacgagtttgaccgaggccgctccgcagttcccgcccctcggcccagctcagctccatgaacctagcggagccgcctagtaccctttctcgccgaccgcacaggcgcgcgaaaccgcgtctttcaactgacaatgaagccgtagccgcgcagctcggccactccgggcgaatcggcgcgaggccgggatggtgggggggagggggagacggttgggtcaagctccgccccagctcgcgcccctattggtgggcgcagcggttctgggcccgccccctaacggacctgtcgctttgtgacaggcggaggggccagttcctgtcgggccggaggcggagtcagaggttgcttgagctccgcccggactccagggggctcctccccctgctcctttcggctgggcgggcggcgggctagagagggaatgtcattgcttctcagagccgtggtgccgcctccgtctgctgcttctttcctggcgccctcgtcccgtcggctttcgccgccgccgccgcagctgcactggggatacggatggctagtggggcgccggggccatctgggttgagagagcggcgattgcggccgctgctgaggcggagactccccgccgccgcttcctccacccccagtccgccggcctcgcggcgctgagggcgggagcgcgcagagctcttccctcctcctttttcttcctcctcctcctcctcctccgggtccccgcccagcacccctcgcaccaggcggcggcggcggaggaggagagctagacccgccgccggggcacaacatggcggagccctcggccccggagagcaagcacaagtcgtccctcaactcgtccccgtggagtggcctcatggccctgggaaacagccggcacggccaccacgggcccggggcccagtgcgcgcacaaggcggcgggcggcgcggcgccgccgaagccggccccggcggggctgtccggggggctgtcgcagccggctgggtggcagtcgcttctctccttcaccatcctcttcctggcctggcttgccggcttcagctcgcgcctcttcgccgtcatccgcttcgaaagcatcatccacgagttcgacccgtggtaagtgcctcgccgcccctcccccgcccgtggcccgcggggaaccgggacccgctcctccgcccgccgcagctctcctcgacttggccccgcgccgccgcggagccccgctcgcgtcctggctgaggccggcgcggatcccggagctccgggcgcgccccctgcccgtgggcgaagtttgccccgtgcagcctgaggcggggcgtcggggtccaggagcgaaaccttgattctcggccgggctagtgtgaagactgccaggagtgtggatgcagccgccgggagtgtgggtgcagccgccgggagtgtgggtgcagtccctcgcagcccgctttggtcgctgagtccggacccgccacgccaggaggcggcaggtagctcctccgcggactgtcggtcgattccccgccctcctcgcccgctgctttcgcgttctttcatatttgcgggcgcgtttttgctagttcagacggaatcggccaggggggctgccctgttgccgctggaggtgggtccagatgtgccggaaccccggctgctcacccttgcagttttacgcttttactgtttctttttatgctctcatgatacgagaagggaaaaggagagtgaatggcgtgttggagggaaggaaataatacccctgaaagtgatctgaaagctagctactcttatttatttatcattaggtattttaaagagtggctttttttcagagctcttaagtgcactcagcaccttactgtttcactatcgtcttgggttgctttttagaacaagatccttaccctgttagccactgtcacccttagtgtgttatgcacagtatct

SEQ ID NO: 9656 - DNA, 6000 bp, Homo sapiens
tcacttcttttgcattgttacagtagcagtaacaattcaacaaagtatgtatgtaactgtttaattgtttaacaatgtaactgtttaacaaagtaactgtggagagcaattttgcacagcttatagaaaacgccaatgctaggtgagctgatagagcatgctgttcagtttgcagccactaaggctaatggaaaaccttcagattccttcttgaagtgagagcataaaggaatggagggcatttggttgccatttccgttgggaaattggacaagaggttcagtttttcaaaagtctccattccataaagcaaatctacattttgcatggccaggtttgaaatagtatgcctctcccctccagctggtgaccctggagacacgcccttcaggtcaagtctctgtaaaacagcttattctggcaactaggaaattgagctcactcttgagctcagattatacgaataactaatacatgtttagcgttttatggttaggaaatgctgtcctgagaagctcatcaataggtttattagttattggtatccttgttttattgatttactaaaattacacagttgttcgggcctgggagttaaattctcttcaccagatgccaaatcctacgtttttcttaccacatcatggtgccacaggttaaggaatacagtgcagggttctgaatctctctcctgtaggacagtgcttcccaagcctggctacttgacaaatctcccaagaggtgttggaaatgcagattcctgggccttgcccctagattctgacctagagtgttattagtaaatctgtatttttaaatagttgcctggtggtctaatatacagtcaggattgacagctactgtttagttaaatcaaacaccaatgctataatttttaaccgatatcatttttagggtttggtttccaaagttggaaatcagtgtgttttagatcagtggtttcctgtcttctaaaacctaccttacctttaaagaatctgttgaaatctgtggatctttccctaagaaacacacaaacacacacatacacacttttatatataattctagagggctatattagtttcctgcttctgctataacaaatggtcacaagcatagcggcttaaaacaacaacatttattatcttacagttctggatgtcagaagtgggacaggagtctcactggattaaactcaaggtgttgcctttctggaggctctaggagataatccattttattgtctcttccatcttctagaagctgcctgtattacttggctcatgggtcccttcttttatctccaaagccaacaatgtggcatctctctgaccccacttccacttcacatctctttctcgtgctacagccaaggaaaggttctctgcttttaaggattcacataattagactgtgcccagccagataatcctggaaaatctttccatctcaagacccttaaccttaatcacattttcagtccttttttgccatataaggtgacatattcacaggttccagggattaggagggggactattagtctaccaaccacaggggatcttaggacctctgaagcaacatggaaaatgagtgaactctaggttaggagcatctgttctagattccattcattctagatgttaaatcaacaagaaattctgcttgcctacaaataacagaatccctaaaagcagtggctcttataaattaggtgtttactttttttcaggtagtaagaagtccccaggaaggcatcccatgtcaggtgcagcagttctagcatgtgacagctgaagtctctgcaattctcctggcctttcctttgaggtggccctcaaaacagctgctgcatctccagccatgacctctgtgcttcatgcaagaggggcaagggcacaggacaaaagccataagtcagctgagttgcctctcctttaagaaacctcctgagaagcctaccacccaaataacatgctcatatctcattggccagacactgcacatggccactctgtctgcaaaagagactgggaaacatagttttatttatttttaaagctaggcatattaacactccactaactctgggctttgttagtaaggaaaatgggaagtataaatattgggaagatactagtgctctctaccacagatgaaaacttcagccaggcacagtggctcatggctgtaatcccagcactttgggaggccaaggcaggtggatcacttgagctcaggagtttgacaccagcctagacaacatggcaaaacctcgtttctaccaaaagtataaaaattagccgggcatggtggtacatgtctgtggtcccagctacttgggaggctgaggtgggaggattgctggagcctgggaggtcgaggctgcagtgaacagtgattgcaccactgcactccaacctgggggacaggagcgagacactgtctcaaaaacaacaacaaaaccaaaaaaagaaaaacaaaagaaaaccttgtgttttgtgttctacaacgagaattgatcatttttcactctcacacaaccaaaacatgaagaaagttaaaagtctccttcaaaatctcccccatagtgcctcatcctcttactaagcttgcttttctttaagcaggtcattctttttttttttcatttttcttgagatggattcttactctgtcacccaggctggagtgcagtggcacgatctcggctcactgtaacctccgcctcacaggtaaaagcagttctcctgcctcaacctcccaagtagctgagataacaggcgtgcggcatctcgtctggctaatcttcttatttttaatagagatggggtttcaccatgttgaccatggttggccaggctggtctcgaactcctgacctcaggtgatctgcccgctttggcctcccaaagtgctgggattaaaggcatgagccaccgtgcccagctattctttttctttcttttcttttttttttttttttcagatggagtcttgctcagtcacccaggttggaatgcagtggcgcactgtcggctcactgcaagctcgacccctcagcttcaagcgattctcctgcctcagcctcccaagtagctggaattacaggcatgtgccaccatgcttggctaattttttgtatttttagtagaaacaaggtttcactgtgttggccaggctggtcttgaactcctgacctcaatccacccacctcagcctccccaaagtgctgtgattacaggagtgagccactgcgcccagccagttcattctttcaacaatgtttaagcatctacctaagcctggcactgagctgggccttgggggctacaaagatatctaagacttttttctccttagagagctataccgtctatggagagggacagagagcccccaaaatgatgaacatgttctaagtgttgagatagaggcatgtgaacactctttggcagcccagaaaagaaaggggaagaggaaatggcacagaaagggtgaggcaagaactggcctggaagtctaggatggataggattttgccagttgaagaggggtaggcacatttcaggaagaaagaacagcgttggagaaggcacagatgtgtgtgaaaacccctgttggacacgttcaggggacagctagaagttgtgtgtggatacattgtagggtttgtgggaagtgagtcaggaaaggggcataaaatggggctggaaagagagatggagcctccatgtgaagttatgctaaggagatcgggctccatcctataggcaggagtaggtggtggggggcaacgggaagttttcaaccattatccaaactctgttgtagaattaaaaagtggaaagaagagaacacaggcagggaaaccataatagtgtggtcagacttcaacatgatagcagtcaattcagtaggaatcttgaatttgagtagtcaagttcatagagacagaaggtaggaaggtggttgccagaggctgggggtggggatgggggtagggttagggggaaagaggagttattgtttagggtataaagtttgttttccaagatgaagagttgtggagatggatggtggtgaaggttgcataacatgcatatacttaatcccccgaactgcacagttacaaatggttaagatggtaaactttctgttatgcatatttacaattacacacacacacacacacacacccttcagtgcacgcaaaccctgctggactccaaccttcagagcttccgatttagcagggctgagtgggacctgaggatttgcattttctgacaagttcccagatgacgttgatgctgctggtccggagaccacacttcgggaatcactggtgtacgagaccaagtgactagaatatggaggggtgctctgctcgcttccacgtggctactattgttatgaacaacaacagccggcgtttactgagcactgctcctacagcttatctcacaactgggtgaaggagcagaggatgcgcagggctagaacctggagtctaaactcgtccttcacccgggttgctctggatcttactggttgtgagacagggagggaaagagagacaaaggcagggagacaggcccagcagggccggcagagcctgtagtgacggaggggagcagccttatctccgggaacccgagcgccccgtgcgcggcggggagggggcagttcggggcgccccggcgggtcccaggggctgactcccgcccgggaagtgcgcgcagggctcacggcccgcagggggcgctgccgcgccgtccagccgccgccgcccgggccgcccacctcgcgggcgcgcccctccgcagaccagcgccgcccggcccgggacccgctcgcgcagacttctcgggcggactgaggacgccgccgctcggggccgcccctgtgctcgccttcagcgcccgctcagcccgccgtccgcgccccggtggcgggcccgacgcccgcattccgcccgtgtccaggcgcagagctcccgccccggggagcttcctggccgtcggcgggccccgcggcccgcgcgctcggcgccctgctcgccgggcagaggggaaggcggcggccggctggggatgggcggcccggctgcgccgaggggcgccgggaggctccgcgcgctgctgctggcgctggtggtcgcggggatccccgcgggcgcctacaacctcgacccgcagcgccccgtgcacttccagggccccgctgactcgttcttcggctacgcagttctggagcatttccacgacaacacgcgctggtgagtgcccgcccgactccgcgaccctggcccgcgcggccaccgccccggcccccaggccagcgccgccgccgcctttccggtctcttccacgccgccgtcccgagggggcgatttaaatgtctccgttgcgcgcggctcggccgccgggggacggcgggagaagggaggacgccgtccggggcccgctaaggtcggggtcggcgcctggaggcgggcgggggcgtccgggtgcctccctggggtcccagcccagagcgtggggggagagccgctagagttgtctcctccgccgcccagctagactcggcttcactctctgaatcgaaaagtaacttggctcctctgcctccgggcggccgccgctggcccagcgagcctcctgaacctcgcagggcctggaggagtcggggcactggagctgcacccctccccggttttggggaacccctgaggaaggagtatagcctctccagcgccgctgcgcggggtggggctccccaggggcagggtgtctgggatccactggggcgcactggagcccagagccccggcgcccccccccccccccagctcctacaagaccctgggtggaagtggagcggagaagctcctaggatatagggaagaggaaggtgagggagcacttcccagtgacaccgccggtggggcaggtagttatctcttgggagagcctgagtctcatctcatatgggc

SEQ ID NO: 9657 - DNA, 6000 bp, Homo sapiens
ggactctaatctgattgtgggtcataaaaggtcctcattccagagggggacctgccctatatactggaagaaggaatgctacacagaatggtcagaaagaatctggacaggccttgctgggtttagatcataccctttttgtacaatcacgttttgacatggttgtccatgcttctattcatatcatgcctatcgaatgaagtctccacaaaaaagcccaagaggacaggactgggggcttctagggagctgaacacatggagggtaacaaggaaggtgaacaagaattcatccatgtgctggaagctaggtgcagtagcacacacttgtaatcccagcgacctcaggaagcagaggtgggaggatcactggagcccaggaatctgaagctgcaatgaactatgattgtgtactgcactccagcctgggcaatacagcaagaccctgtcttaaaaaaaagtctacatgctgggagggtggtgcaccccaattccacaaggacagaagttcctgtgcttgggactctttcagacctcaccctatgtatctcttcatctagttgtttatttctatccttttaaatattgtttataataaattggtaaacataagcatttccttgagttctgtgagctgctctagcaaattaacctaaagaggtgtcaggggaaccccaacttaaggcgggtctgtcagaagttccagaggcccagacttgcgactggtgtctgaaagtgggaacgccagtcttggagacctagccttcaacttgtggggtctggtgctatctccaagtacatagtgttggaattgaattggaagaaacccagctggtgttggctacagaattgattggttgccagctggtggggagaaattcccacatatttgggggtcacagaagtctttgtttttaattatcatgttggtgtgagagcagaggaaaaattgagtttttcctaagagcattttaatcatagttgctttaaattcccagtctggtaattccaacatgaataactcttcttagatctgtcaaagacgtgaagtcacagggcaaaacactgctccaaaaacactgctagatttaagtctggttctgatctctgctgtgtctcttcaaactgtgtttttgccttttagtatgccttgtaatcttttgttgaaagctggacatgatgtgtactgggtaaagggaattccaagtaaataggtctttaatgatgtggtaaagtatggggagagggaaagcagtctatggtcctgcaattaggtctcggtcttttagtgagcctgtgtctctgcattgtgaacgttacaagtgcttctcagtctcctaccctctattaagtgggacaggatggctagagcaggcttgagttgggtctttctcttcccccaggtaggatagggtctgatatagggcaagccttgttaagaacagaatactctgggctgggcacagtggctcatgcctgtaatcctagcactttgggcagccggggtgggtggatcacaaggtcaggacaagaccagcctggccaacatagtgaaaccccatctctactaaaaatacaaaaaattagccgggcatggtggcgggcacctgtaatcccagctactcgagaggctgaggcaggagaattgcttgaatccggtgggggcggaggttgcagtgagccgagattgtgccattgcactccagtccgggagacagtgcgagactccatctcaaaaaaaaaaaaaacagaacactctggcttatttcaaatggttacttgcctctccctgctggaagcataagagaatttttctttgatattcactgtgtgaacccagtagagctcttggaagtaaaagccacagaaatatggaggcctttctctggagttcttaactctcagagtaatctacattgagtctccagcaatttgtcagttaaagttcaggttttcttatcctggtactggttcctgcagaggtttcttgtggatttctggtccagtaaattgtaattctctctctcctttttttttctttttttttttttgagacaaagtctcggtctgttgcccaggctggagtgcagtggtgtgatcttggctcacagcaacctctgcctcccaggttcaagcaattcttgaacctcagcctcctgaatagctgggattacaggtatgtgtcaccacgcccagctaatttttgtatttttagtagaggcagggtttcaccatgttggccagcctggtctcgagctcctgacctcaagtgatcttacccactcggcctcacaaagtcctgggattacaagcatgagccactgcacctgacctaaattgtaattctctgtattcacctgtgtgtctctaacttttggggcagtcttttattaccctgtgacttcactcctctgacagatctaagaagttactcatttttcagtttgttcaacaattttacttgttaaaaaggagtagcaacttccaagctccttatgtgccagaccagaaaccagaagtcttaccacaagtttttatttaatagaatcattaaattgcaaaattgaaagagatttgagatgccatctagtccatccctgcaggggatctttgaggaatacttccctctccctccaccccacacacggacacctccctacgctccctggacatggttgccggtgatcttcctgatacttcccatatggagagtgtattcattccactaaaaattgctcggctggttagaaaactcttgttacacccctctttggtcttagttgtggccttgaatgaaggcaggtacaaagaggaagatgaagacagcttcaaagaggatacctggtcatgggccttgaagcattgcagagagcctttggcagtctttacaggatgtggtggggaggaagggaggataaagttaagaggagaaagaagtaaaccaaaacatcaggatttggggaatgtagagataatgtgagaccagtgacattcggtgcctcagttccaaggtttggggatcatagttcagctggagactgactctagggaggtctttgatcaggcctcactcttgtcaggagtctgctaatcattctgtctttctctattttagaattgtacaccaagaagtagaagaatctttagagaccatcctttacctagatggggcaattgagggccagagccaggaacagattctcagggtgaatcagtggcagagctcaagtttcctacctcctagctctagctctcttggttgcttggagccaaacaaagcaaaaattccttttctgactggaatgaggagatgatgagggcagaggacaaggcttatgtctccatctcagttcttccccataaggggaataccagactaggcagtggtgactggtagcagttgttttcttggcaattcaataaagacaatgctaagaataagaacactcaaggaagctaagtgaaggaaaaaagagctggggacagtggtgatcctggtgggagaggttggggtggggcaaagagcaaagcatgctccctgagcagcatgtcaggccttgcttctgccctccactgtctgccctgccttgacctgtactgcaggctgactgattaacaggcttccagcagctgtgccagtcaggtggccagggctgccctgcacaaccttgcttccttgcattcccttcagcaatgttcctctgctcatgccttaaaatagttcaaaattgagaacatgaaaatgctttcttatgcatacacaagcagacatgaatatgtgtatgcacctggtgtgtgtgtgggctgtggtggaggcatactttgtcttgtgttcattgtcactgacattgctcagggaggctggggtacgtgcatttgttttcatctttagagtgtgttaatggtttccttcttgattaaagtagagctcaaaatgcagctctgtcattgctctgtattcttggtttgtctttgatgttgaaaagacagtgcacttgtgcttttggtggggctcctggcctgcatgctgcttcctaggattggcaggtattgcatatcaccacataccagacacccacaggagagaaaaatcatcaggatcaagaggccagattgggctgctggcaaagtttatctgcaggctaagtgcttgttgctctcctgcttatccatgctgcctagtgtgggctgtccctagaagggaattctgtgtccctctgagtgctgcaactactctcagggttttactgtagtggttttacctcgcctattggttgacccatctacctgtctcatttgagttgagtgtgaattgtttaggatattgcaattagaggtggtgcgggctggctggttgctataagccatcttaacatttggctaagctcactcctgtgtgctgggcctgacaaggtcctcttggttcctcttgtgatgactgtatcttttacacagttaataaaacatcctcagatgttataagctggagtgaactatttatttttctattttttttattttactttaagttctgggatacatgtgctgaatgtgcaggtttgttacatagatatacatgtgccatggtggtttgctgcacctatcaacccatcatctaggttttaagcctcacatgcattagatatttgtcctaatgctctccctccccttgtcccccaccccctgacaggccctggtatgtgatgttcccctccctgtgtccatgtgttctcattgttcaactcccacttatgagtgagaacatgcggtgtttggttttctgttcctgtgttagtttgctgaggatgattgtttccaacttcatccatgtggactattttttcatcatattctacccttcccaagtcacacctagggggctgaggagtgacaggtggagcagggcaaggctggattaaacattaatgcagctatcaccactgcccagaggagcaagttcccagagccaagctacagagctaccctagtgtccccaggctgaggaggtagtgactggcatacatggctcagtttgtccaggtcctggctgaaataggtgactttggtcgcttccagatacagctattgatcctgctgtgtgttctcaacttcctgtctcccttctacttttttgcccatgtcttcatggtcctagatgagccccaccactgtgcagtggcttgggtgaagaaccacactttcaacctgagtgctgctgaacagctggtactgagcgtgcccctggacactgcaggtcacccagagccctgcctcatgttccggccaccccccgccaatgccagcctgcaggacatcctcagccaccgcttcaatgagacgcagccttgtgatatgggctgggaatatcctgagaacaggctcccatccctgaagaatgaggtaggcttgtccttttgctggtctctccaccggttgtgggtctgtcaggtcttgtgcctgactcttcgccctcagtcactggctctgtatctgccccatgcccatatggtcaaccatgggcacatatgtttttcattttgtcaatctcattttcctctttgtcctctgcctattgacccatctgtctgtcatcttctctgtccagtctgtctgcccatctgtccattttttgcccatccttctgtcgtctctgtctttccttgtctctctggctatctacccagttggtgtcctctcctcttttcctatctttgtgcctttctctctacccagtgtgctcatctgtctgtccagttctctttgtctttcagtctacccctgcatgtctgcctatgttcctattttcctaaccctctaatgccatccctttccctgtccatttcactgccttcctgcttgctgggcttcaaaactttcagcttttctctctaggtctctgccagcctgcccttgggacgctggagaacatccaggactctaggacttgtcctgtggataactaagcgttcattcttgctaacttcattcttttaggagagat

SEQ ID NO: 9658 - DNA, 6000 bp, Homo sapiens
ttttagagatgggggttgggtctcgctatattacctaggctggtcttgaactcctggcctcaggcatttctcccccctcagcctccccaaatgctgggattacaggcatgagccactgcacctggcctcaaacactcttaatggtagcacagggaacactccaaaagttcaattccagaagccagccaaagactaatcactcaagcagtcctttctgaacatgtgcaagacataaacaaatcagggtgtctgggttaactcgttctttcatatcaggtattgccaaattgtccttcagaaaggttgtgccagtttgcatgcccatcagcaatgtatgaaagagcttgtttccccacagcctcatcaacaaaatgtgccaatgtgataggtgagaaatgtcacagtattgctgtaattagcatttcagcaaattttgagtgagtttgaagatttttttcattgaatggcatacttttacaagttatattttctaattgttttgggtttacagaaatgcaattgacttttatgtattcacattatacgcagctaccttgctaagctctcctattgtttctgattctctgtggattctttggggttttcttttcttttcaatctttatgtctttaatttctctttcttatctcattgcactggctagggccaccagtataatgtcaaataagtaattgtgggcatctttgtcttccctctgattttaaaagggatacttttaatgtttcctttttaggatttttttttttgtggaggggatagttttttcgttattaaattttttcatttttcttaggatttttctttaaaaatcacaaattgttgaattttatcaaatgcgttttctgcatctataaacatgatcatatggttttctccattgatctattaagtattgatctattacttatataaatataagtatttatatattatctaggccaggcacagtggctcaggagcctgtaatcccagcaccttgggaggccagggcaggcggatcacccaaggtcaggagttcaagaccagcctggccaacatggtgaaaccccgtctctactaaaaaatacaaaaattagccaggcgtggtggtgcatgcctgtaatcccagctactcaggaggctgaggcaggagaattgcttaaatccaggaggcggaggttgcagtgagctgagatggcatcactgcactccaggctgggtgacaagagtgagactctgtctcaaaaaaaaaaagtatatatatatacatatatatatttatatatacacatatatatttatatatacacatatatatttatatatatacatatatatttatatatatatttatattttctaatagtaaaaccatctttgcatttctggttaaaactgtttttaactggctgtgcatggtggcagattgccaaggcaagcagattgcttgagctcaggagttccagaccaacctgggcaacacaacaagacctcgtctctacaaaaaatataaaaattagccaggtgtggtgggtgcacctgtagtctcagctactcaaggaggctgaggtgggaagattgcttgagcctgggaggtcaaggctgctgtaagccgagactgtgccactgcaccctagcctaggtgaccaagtgagacactgtctcaaagataaaactgtctttactatgatatatttttctctcaatgtactattaaatttgatttactaacattgtatttagagttttttgcatccatttttgtgaatgaaatgtatctgtgatttcctttttgtactgtaattttctagttgtgctatcaaagttaaaattctttgggagtatatatgtttgcctattccctgaaaaaaaattatataaattggacttcctttgtgggaagatttttttacttctactttaatttagtcattatagaacttttaagactttctatttattcttaaatctgttttgagtaattttgttttagaaatttaattcacctaagtttttaaattcattggcataaagttgatgttagtatccagttaatattttcagtcttgctatatctgtatattcctttttgcatatataaaagacttatttgtatcttcttttttattttattttttacataatttcactaaagatttgtctatcttattaatctattcaaggaactaattttgaactttgttgattccctttcttatacttttgtttctagttccttaatttttgtcttaactttactacgttcttcctttactttctttagatttattcttttgtgttttttcccacttcttatgatggttgtttagttgattaattttcagtctttctgattttctgttataaagcacttaaagctataaacttgccacaagtaccactttttataccacccatatgttttgatatgttatggttcttactgtcacttatttgtaaatatttttaaactcccaccatgatttcttctttaacttgtattcacaagttttttttttaacttaaaaacatatggagttatctctatctctatcatctctatctctatcttcattctatcctcgtgggttagaagactcaatattgttgttaagatataaattcttctccactatagattcaatacaatctcaatgattgtatttatttaatacaatcaatatttgaatttgcttacatttttcccatttttaccactcattattacatctccagctgtcctccagagatcattttccttcttatctttcatttatttatttaaatatggaacactttacaaatttgtgtgtcatccttgtgcagaggtcatgctaatcttctctatatcgttccaattttagtatatgtgctaccgaagccagcacccttcttatcttttaaaagttcaatcaggccgggcgcggtggctcacgcctgtaatcctagcactttgggaggctgaggtgggcggatcatgaggtcaggagatcaagaccatcctggccaacacggtgaaaccccatctctactaaaaaaaatacaaaaaattagccgggcgtggtggcgggcacctgtagtcccacctacttgggaggctgaggcaggagaatggcgtgaacctgggaggcagagcttgcagtgagccgagatcacactactgcactccagcctggatgacagagcgagactctgtctcaaaaaaaaaaaaaaagttcaatcaaatcaggtctcttactgtgtgttctctcaatttcttgttatctctataattacctttattttaccctagttcttgacagacaattttgctgggtatacaattctatgtggtctataattttccatccacattttgaaaatattcttcgctctcctggtttccgtgttgcttaactttcatcttctttttttgagacagggtcttgctctgttacccaggctggagtgcggtggcgtgatcatggctcactgcagcctcgacctccctggctcaggtgatcctcccacctcagcctcccgagtagctgagactacaggcacatgccaccaagcctggctaaatttttttgaattttcttgtaaagacagggtttcactatgttgcctaggctggtcttgaacccctgggctcaagtgatctacctgcctgcacctgcttctaacaggagactgctgaggctcttcattagtcagtggcctgccttctctccagctgattttcaagatcttttctttgtcattggtgtcctgcagcttcattgcaatgtgtctagccatggttttcttttttatttatcgtgcctaagttacatttcctggatctaagaatttgttttaaaagttttagaaaacgtattgtttttatttcgtctccatttctccttgtgggcttccaatttgatacatgttaaatcttctatctaccaagtctctttacctctctctcacatttcagcaatttattccagttcactgattctttgtgtcaaatttgtttaactttcctcttagtgtttttatctcaacaacaacaacttgccgttcaacaagctttcatttttaaaagttcataatcttccttccaaaagtgtctgctttttcctgattgttgttttaagttcattttcgtaattacaacctttaaatccttaaaaagttcatacaatagctgttctaaattttgtatctgacagtttcaacatctgcagtctaaaagtctgtggtttctggattctgtcgacttgtagagtggcttgccttctcaagctataatctctttgcttgatgtacctctgtgagagtcttgcagaatcaacttgaagaaattttcctttagagaaggctcgcttctgcctctgctctgagccaaggggtgccccgcaccaggaactgttaccccttctgagagttttggctcaaaacagagttttaagcttagtttcccctccttgctgctgttgcaaggtaatatgctgacagtcagtactgctcaccttcctccttccccactcctgcctttccagtttggctccatgctgcactgcctcaccactgcaccagccttggtgccccatctctgtggcccaggcttccagcctcccaccttgggcccacctcctggctacagccgacgatgcagatctttgtttgtttttgaagaaaaggtccctagagacctctcctaccttttgcaagaccactggtgtctcagtgtgtgtgtaaacaaaaagcttgagttgtggggaagttgtaggagagttcctaagaacttagtccttcatgacaacagaagcacagcattttctaaaacattaaaaatctcaattacactaaaactccaggatggttgggccaggggggaataaatcatgttaactaagaaagcaagggagggaactactgagaacgtcaaggttggaatccatattgcttcaagccagaggccagttcctagtcggtggctcccatgctggtctctgatgtttaggaagtggtgtcagcagagactgagctgcaccctttctttggacagatggcaggagaggagaacttcaaggaagagctcagatcccaggatgcttccaggaacttgaaccagcatgaggtagcaggacatccacattcctggtctctggagatgctgttacgcagattgagggctgtccacaccaagcaggatgacaagtttgccaacctcctggatgcggtgggggagtttggcacattccagcagaggctagtagccctcacctttatccccagcatcatgtcggccttcttcatgtttgctgaccacttcgtgttcacagcccagaagccctattgcaataccagctggatcctggcagtgggcccccacctgtccaaagctgagcagctgaatctgaccataccccaagcacccaatggcagtttcctgacatgcttcatgtaccttcctgtgccttggaatctggattctatcatccagtttggcctcaatgacacagacacatgccaagatgggtggatctatcctgacgctaagaagcgatcgctgatcaatgaggtatgtcttgtcatgggttgtctgtaactaccctacaggctcagagttgtgcctcccaccctcactgaatgggtggggaaaccgaagctcagagatgggaagccattggcctgaggtcaacctgcagaggcagggtctgggcagaaaattagattcctgttgcccagccctggccctgcctatctatagagtacatttggggtagagatgggtgctgcatggcagggttttccatctgtccaagaaatcgctcctgtagttgtggttctgacctcagaactcacaaaaaatagggctcggggaaagaagcagctttgatcaggcatctcttacggggcttcccaacccgagctgcaatctaggccctttacaacacagaccgccctagcatgaatctgcaggttgggcctagcacctgcctttgggaaagggtctgcactgattcctgc

SEQ ID NO: 9659 - DNA, 6000 bp, Homo sapiens
ttactctgtgttttcatgtgaagattttgaaagattcaaaaacaatgcagccaacaacctaaccatcatcttcccagtctggtagaagttttaagggccagcatttaccatgctctctttcccttgtctctccaatagtagaagcatgtatcaaaaggtagccctcttagtctgtgtccctgagttattacaatgagtagagcttgtttgttgacctccaatggatatgtatcacgagaaagatataaattttgttattttaagccattaaggttttgggatttttccattagcacagcataatctaatctctcttgagagatagtgttagctttctacccaagccaattcatttttttgacctcaagtaaccaccattaagttaagagaaaggggcggggaaagtacgaggtctaggaagaaaataaataaggcaaagaaataaagcactttgagaactgtgtctaggaaataacagatagcttattaagtcttgggggaactgtattaccaaagaaagtatacactgcccacccctcccccaacaattatacactgtgaatggtactctcataaaattgtttaatttcgtattgctatgcctaaattacccactacagtgaatgtctaaccagggcctctcagaaactgagagagggtgaggccacttatattttctcaaatgaagaaattcccaaataacattataaaaactgtggttactttcaaagtttatcttgctaaatgaatgtatttaatcccttaatagaattcattataattatatagatgccaagtcttattacaatgctatagttttccatcttcttccatagcttgatactaaagaatgtcatgttcaactgattcttctcaattccttggtttctggtcttgattgttgaagggtggggaagccagggaatagtggtcctaacacactgaatgccttaatggcagaattcactgccataaattctacagcagacatttggggtttcagattttttttgcctttcagtttttggtcacccgatgtctgataccaaatgtgatatttagcaatcttgtagtcgttcaaaagaacagaaaacccaaatagaactcgtttttcaaatatccattatcacctttctcaaccagcctagtatttgcttgatgagctcatgatcaaaatgatggcagggaatcactttggttactatatggaagatttatttaaggcaagaatgaattcagaggaccagttaagctcccttctggttcactgctattgcaacagtccagatataagacaatgttgcagtagtgtacatggaaaaaagtagtcggatggtggatacacttttgaggctattttgctgatggactgtatatgggaggaatcaagtattgttaccgaaacaccaggggtttggtctaggtcctgctgctcggtgcacagaaagccaatcactgagatgacaagtattgccaaggaagaaggctttaatcaggtgctgcagccaaggagatgggagtgcagtctcaaatccatctccttgactgaccaaaaccaagggtttatatagcaggaaagaaatgtaacaatatgtaagaaaacaggaacatgggaggggcaaggaagcaatcatggtgactgaggggcccagcatctagtgcagtgatctggtttcagttcttttgatactttttatggcttcagttctttgatactttttgtgagaggcctgaaggtcctttcctgaggaaggaactcggataaaacaagtaagtttccagctttaactgcaaaagggtcaacttctataatcccagcactttgggaggctgaggcaggcaggtcacctgaagttgggagttcaagaccagcctggccaacatgatgaaaccctgtatctactaaaaatacaaaacttagctgggcatggtggcgtgcctgtaattccagctacttgggaggctgcggcaggagaatcacttgaactcaggaggtggaggtcgcagtgagccgagatcgtgccactgcactccagtgagggcaataagagccaaactctgtctcaaaaacaaaaacaaaaacaaaaacaaaaacaactgtctatgggactctttggctggtttcagtaggactcataaggttctgatttgagcaatggtgtagttgcttatgccattgattcagacagggaaaactggggaggagatttacggggaaaatgaggacttctgctttggctaggtcaaatttgagatgcctgataggctaccaactgcagttgtcaagtaagcagttggatataaatttggggttcccagacaggtcagagtggaagacacagatatttgggcagcttggaccactctgagtccttattatgatacctgacctggtatggagtagaagagaggaaccagccaatctaatttttggcacatggataaaagtcgatacctttcagtccatattggaatggagataacgatttatactccctagaaaagacacttaaactggatatggaattacttccgttatcacagtctatcactgtggcctcctgtgttattaccagataccttatacacagctagggtgtcccatacaacactgcttcttgcttggcacacagtcgcatagtattcaatcctgtgttaaatggcttagataataagtcacctgtagggattatagcaagcagggaccatcattttcacatagaatttcccaggactggaagggacttttaaagacccagaaatctttctgggcagtgcctccaaagtgtggcccctgaggtgttcctgctgctctggtgaccgggggtagttgaccctatttcaatgtcaatcagaacaatatacattcctttataaacttgttttttttttgagagagagtctcactctgtcacctaggatggagtgcagtggtgcaatctcagctcactgcaacctccgcctccctcctgtgttcaagcgattctcctgcctcagcctcctaccgagtagttggaattacaggtgtgtgtcaccatgcccagctaatttttgtattatttagtagagacaggtttttgccatgttggtcaggctggtctcgaactcctgacctcaagagcctcctgggcctctaaaagtgctggaattacaggtttgagccacctcgccctgcctatagtgaacatttacataatattttgtttgactaggtttctgccattaagaagatgcaaaaccctgagggagtgtacctcttcactttgcatatgggaaaactgaggctcagagaagtgaaatgactgagacctccaggtgccacctccctttcagctgctcctgccctgctccaagcaaggatgtgccaagtcaagagaagacagaggacaattaatgttatctgaggatctcggagcctcatccctgagctatgatggtctttccctccttagttgggagccccatcacgttcctccgaagctctagttgtgtgataaggagggtggaatctgagacagagaacgatggccctccaaggagggagttcggggtgaggaaaacagcaaaaccatgtgctagacaagatcttcaactgcagggctctggaggcaactgggaagttttgaaagtgcagattgaagctcagggccgctgtgggtggcgcaggaactgcagaagacaagataggattagggagggccagcaggttgccagaggcccttttccacctgctgggcttagaggggcgggactctgcccgctccctcacttggttgggtttaaatgaccactccccgccctagctgtgcctttgagtgtgtggcaagggattgcagacgggagactgcttgtcaattcagggaagtcagcctctttctgccacttaattcgcccatcagtagagatccgactttcccacggttcactgtcacccccattgcacaggtggggaatccaaggcacagaggcgtctgggccagagtcccgggactatccactcattccggggttgtagggcagcatgtgtcaggagcttgggctcgagcgtgcggggcactaattgcgagtgcagtggccacaggctcccgggcaaagtggtcaggagcccattcccgccacctccgtccgcgcgccccgccctgtcctccagcaagttggtgcacgcgcgtcctcccacagggcgcgggatgggggcggggcctccgtgttgttgtttctctggggccccgcccctcaggggggcgcggaccacgcggccggagggcccgcctcccctccccctccccgcccagcccgcccgcctctttgtatccaacatccgggtttccccgctggctcggctccgtggccgccgctcaggagccattttggactcggttcagctcccctcccccccacccctccccccgttcatggcccctccggactcggcccctgcgcccggggcccgggcccagccccgccgcgctatgcctgagtcgggcgcgccccggcccgtgccccgccgccgccccccggcccccgcgtcgccccggagcccgggccgcagcctgcgccgcccgcagcggccctgagcccggccccgccgaccggcccttggagcccgaacgctgctcggggacgaaggcgcaggaagcgcgcagggaacgagaccgaaggaaggagcgggaaggagagcgcagccgccgcctggccctgcgcgccccgggagcgccgtgcggccctgcccgcgggctccgggtgtgcgcggggcggcgccgcggaacatgacggcgccctgggtggccctcgccctcctctggggatcgctgtgcgccggtaagaactgggcgcggcgcggggacgccgagagggcgcgcggggctggcctctggcgccgcgcggtgtttaccaacaaagggcgggcccggggcctcgtcgccgcaccacctgtattcagccctcacctccgggggcgtgggctgggggcgcggtgggcgcccggctcgccgaacttgggggcacgatcttgtctgtgcagtcatctgcgggattctggttcctagaggcgcccctgcgatgggggccgggacgcggagcctcagggtcggagttcgggctacgcgggcgcgtggaacccagggaaagagtgaggaaaacctgagcgtggggaaggcggccaagaggggtgggcagatctcattgggggtggcaggattgtaggtgcagcagcagcagcagcatgcggggagggttgcatgtccctcagagtcactaagtgtagcgaagcgaagggggcggcttcacgcagcccaaagtcccctgcatctcttgccaccagtctgcgtcgcgttaccggcccggcgggctgttggtgctggctcccacctgctccctctttccctgccgttggccccgggatgcggagtgtggtcgcttcgcgggaccgctttgtttgggcacttgggaggggagggggtgggtaagatggaaaacccaacaggtccctcttccttcgggcctccaggaggcacgtggcggggtgggtgaccagcgctcagctcgcccgcggctgcgggcgtgtggctggaggtgttcggccagcgcatgtgtgtttgggggtatgtgggcgcgggcgtaaacaagcggagttccgcctggaaagcttgtttctcctacggtccaagcaccgatttccctctctcagtggtgccggggtgcgcctaaccccggcgggcgcgccgggacgtcccctggccagtcctgggaaacgtggggagctgggcattgaagctctggcgagaaggtcggggcggctggtacccggccgccgggtcctgcgcgtctttgttcccagcccccattacacatgcagcgcgggtcccccgccgccctcggtggcagccgcctggagtctgggaaaccctcgaggggcggggccgggcgtgcaggggcggggccggagtccccacgctgctgcgggggtggggatttgggatctgcgtcccattcccaccctgg

SEQ ID NO: 9660 - DNA, 6000 bp, Homo sapiens
tatcatataaggtagtaaaatggttaatattcttaatctataaaagagcatcctattcactcaacacatatttactgagtgctcactagacagttaacagtgctaagcactgagaatgcaaaaagtgatgtaagaaaagcatgatttctgcttgcacgtggtttactgtctagtggacagagaaagactaacgagagaattcctgttatgaaaggcagttgtgcacagcttctcaccccctgcatcgttacataagagcagccttgggcctggaacattttcttgcacagagataaagagtcatcatagcctgtgctaggcacatctctgctttgtaataactttccccgttccgggtttcacgtgtacttctttgttcttaagcgcatgggtcaatggccatcaagtgcacctccagctttctatagttctggccccagggggatgggttgaggatcttcacctgcagcaacagagcagtgtatgcattccatctccctgcatcagctagaggtcaagacccactgccatgggggcacacagtcatcactgaagctaatcctgttccatctcttctctatatgagtaaagtgttttccatccagtgcctgtgtgaatcatctttcttggtgacatggacatctccaaaccatacagtaagttaacatcctgggactgctgctttggtgataagcaacaggggtcatttgctcaacaacgactgtaatgaaactctagctgaaagaaaggaatgcctgctttaaaagcacataatttagggacttgacccagtttggatgtatgatccagattaggggatgccggggaagtatcagtgaaatgactgaagtgagaaaaaaagtataaacaagtgctaattagtaaaataatgtacaaaggtcctatggcaggagtaaacatgatatatttgaaaaactgaaagaaggctggtttgtcttcagagcatgaagtaagaagtagtatgggttaatagagactggaaagagagatagagaatataccttgcagggccttccaggtcacattgagaatctgattgtgaatccactaagaaatggacagcatagaagagtgttttacagagagttttgacacagagagatctgggttttgaagagatggggcctgttggcttgggaaaatggatcagagaggaagaaaatggacacagagagatgtgtgagaccgttgccaagatccagaaaagtgtgcatggtagcttagaccagtggttctcaccagggaaattttactcctctgaggacacttggcaatgtcttgagacattcttggttgtcacaccatgtgtgggaggatgttactggcaactagtagggaaaggtcaaggatgctactaaacatcctacaatatacagggcagttccctcaacaatcatctgacctgaaatatcaatagtgctccaactgagaaatcctggctcagaccaagatggtggctgagagagaaggaagtacatattgcagagacgattaagaggctaaaatcagcagtaattagtgactgattgatcgtgtataatgggggaaagactatcaaaggcaaccctcaggtttctggcttgctcacctggatgagtggggagtgccgagatgagaaatgcttgaggagttgatggtttggtaggggaagataaggagctctgcttgaaaccctgtaaatgtgaggtgcctatatgacacttgaaagatgaaaaacacaattctctaggtctacagatcaagaggggaagcctgaaccctgtatttgagagcttctgtgaataaaacagaagacgtaggcatggatgagattacctaggaaaagaatacagaatgagaagaaaataatcctggagactgagtcttgagaaactcccaggaaaggagcaggaaccagcaaaattgtctagagaagtgggaggacatggcacgcatcagatgcttcaagagggcctgtttcctggcaccttctccaacacaagcaccactgattattattgctatttttttttgagacagggtcttgctctatagtccaggctagagtgcagtggcatgatctcagcatctcagctcactgcagcctccacctcccagattcaagtaattctcgtgcctcagcctcctgagtagctgggacaggcatgcaccaccacacctggctaatttttgtattttttggtagagacggggtttcaccattttggccaggctggccttgaactcatgacctcaggtgatcagctgacctcggcctcccagagtgctaggattacatgcgtgagcccctgtgcctggcctagatctttttaaactttgctaagctaatcaagtctaatcagtttttttttaatcttgtttaaatataccaaagttttagttgacaatttttggtaaataatgagattaagcatctctgccatgttagtcagccattcatatttcttttgtaaattggccaatgcatgtgacttgcccattttctatttcagatattcatatttttctatagactttagtatatcttacggttttaaactctttactgtcacattcttaggtatttcctgagaatttatcttttttttggtgggggggggttgcagtgggtggtgtctttctattcagtcatttttcattttcatggattcaaatttgttgactttatttctcttcctgctttgactgcatagtagaagagactgttctttcccaaggatgataaaaatgttcttctacattttttagtatgtcaaattattttatacatttaaatttttaaaccacctaaaatctatttttgtgggtgatgagtaattagaatccttttccaaatgagccagttgtttcaataccagttattgaataatatgttatttcaacctgttctttatcttataatcctatatccaatagtctgttgtggcctatcttttttgttctttagatctctcagtatattcctgtgcccaagccaggctgtttttattactgtggctttacaatatgttttgatagctggtgggcaaatctgtattattttataatcaggaaaactcacaaaggagtgtgtgtgtgtgtctgtgtgtgtgtgtgttcttgcatgtggaaggtggatgaggaaatgcctttgaatgactaggtctactttggaagctgcaaaggagtttgacacagtgcctggagcagagtttccagaaaagcttggaaaaataaaaggagaattggagactacagggctctcaaaggaggctgatgctcacacttacaaggtctgtaggttgatgcaagcagagaggaaagctggcatggactgatctctgttatttttatacactagcactaactgcctttcaaggcccattaggcctggaaaccttttcccagcccctgggaagtcactggggatgctaaggttagtcattcacccactggggctatctaactgagctcaggtccgggtgcactgccagcagctgtttgtgtacttacagccccctgggtgcagacggacccccagctgccagccatatgccttatgtttcattgtcccacagctttcaaagaaaacaagtcttttaattcagcaagtattcactgaatgtctgacacccccagtgcagaccctgtcccaatcccccaatggggtccacctctatccaactctgggtgaatgaccatggtgctcttgcgcgcgggcacacacacacacacacacacacacacacacacacacacacaggcacacacacataactcaggcttggggcccacctctctgggctcagaggtatcaaagcaggggcattcctatcttaaggacttcttgtcttaggggctttggccccacctgcacaggacagaaaattagtggatttctaggagaaagcaggctatggcagggtatagccagggactcagctcttccttccagacatgcaggaaccataaggagggatggtcaaacagggcctgcttaggcctcttgctgggatcactccaagggtctctggggtcactcagaggagccgggaggctgcctgctgctgtacactgagacagactcctggggtgtttggatcacggcagcccacatgctgcctttttgttatcttttctgttttgcctcttccgggctgtacttgtcttgagtttttggccttatgacatccatattaaatggggtagggcagagcattgctcagtaaacagcaagaatggccctgggcatggccaaggcagttctgctaagtgtgaaagggaatgtgcctgccatactttgtgctttaggcccaagtgacctaggggccagcctgcctactggcctcactcccaacattacaggtgtttgactctactccaccccgtggagagacggagcacaggagccacccaccgggggaccacataaggtcatgcacacccacagagtgcccagtccctgcctggccttgtccccattttccctccacctagggttggggtgacaatggaggtaactagaagacagatcaaaaggttcttggtcttgacacagatgcaagaaggaggcagataatagacacctcccttccccctcgcccacataggctccggtgggttctcagggcaaggcctggctccctcctctccgacttcaggtacaggtgagtgtggagggaactgaaagaggaaaggtgaagtgctgtttggcttcgacctggagggggacagaaggctctctgggcaggcagggccggtcttttggcaagaggcgcgctctctctcccttccccttccatcgagggctgggtgtgaaggtgagagcaatcagaaaagaaggtgaagaggtacttggccttgacacggacggggggggcggtcccaggccgaggccgccccgcccccgccccgctatacccggcgccgcctcccggcgtctgagctgacacctccttagcgctggccgcgggccgcctctgcggcagcgctagtcgccttctccgaatcggctccgcacaggtaagatcaggggacccggcgcctgagctgccgaggaaggagtcgggggtgctgcgtgagactgagagttgggaggcaaagaaacaaaatcggatttcctcagagggccagaggaagagactgaaacacggtagccccaaatccttgggcggctgggaggtggtccctgtcatgcccacgacgggtgggcgcgtctttaccgacagcctgcatggatccgcagatgtgctgggcgcttagatgcctgcggctatgcagagacgcagtccagagaggtgaccccagatcctggtgggggctggatcccagggccccgacatccctttgcaatttccagccagcagctaaagactcccttcccggggctttagagaggctccaggctcgcgatccatgaacacacaaaaaccttccttgctcatgttctgaaaaaaagccccgcctcagctttgtgaatgttaataatagggggaagatttgttctctcttgggtgtgtgtacaggtggaacaatctgcagaaaaagaccttttttcggaaaaccttttcagtttgaagtttcagcaaatccatttttcatttcctttcatttggggagatgacatgaaatttaagctccagctttggggctgtctctgaagttctggggttcggcttacctttcccgggatgaggttttgatttggaggaagtaaaatgggttttgtcttaacctgggctcgttctttaaacttgtgaggccggggcggtggacttactgacatcctgtattctctcacctgcagctaggagaaaagatgttcactgtgctgacccgccaaccatgtgagcaagcaggttagtatctctcagcaggtagcaagcgtggttttgccaaatcgcaagagaaccccagcttcggcctacagtttttcatccatatcccctgcaaatgattgtttaactttattggtttgagactcagtactcagctgggttt

SEQ ID NO: 9661 - DNA, 6000 bp, Homo sapiens
cacactcctgatcactgtgcacctgccctagtaaccccaaggccaggaaatgatacctggtgtaatgcctctgtgacatagctgaatttctaccccattctacctctgcttatctttaagaaataggacacctgtgatacaaatttccctttgtaaccagaccaactaagactggttagaaccaagatagacaatcaaatgacttcagaaagatctgaggctttattataatgtcatttccatgctaaatgaccctcccacaagcaccatggcagttgacaatcgccatgaccatgaccaaaagaggccataaaaggacaaaaaggaaagcagcactccatttccaagaagttcgccacccatctccagaaaagacctgaatattcctcccctcatttctaatgttcaaccccttcattagagaaatccttcttgaacatggtaaaaccccatctctactaaaaatacaaaaaccaaaaactagactttgggaggctgaggcgggcggatcacaaggtcaggagatcgagatcatcctggccaacacggtgaaaccccgtctctactaaaaatacaaaaaattgattctgcagcattcattcaggaagcactcatgaagagcctaccaggtgccagccctggcctggggctgggcttagagccgggacaggatggcccggcatctgctccatggagctcacagcccagcctaggctggcaactccagtctgccccagtttccagttctgtccattccccttgcagctcagcatggatgaagctttgaaatccagctctccctctccctctccctctccctctccctctccctctccctctccctctcccgtctccccacggtctcccccgtctccccacggtctccctctccctctgtttccacggtctccctctcatgccgagccgaagctggactgtactgctgccatctcggctcactgcaacctccctgcctgattctcctgcctcagcttgccgagtgcctgcaattgcaggcacgcgctgccacacctgactggttttcgtattttttttggtggagacggggtttcgctgtgttggcctggccggtctccagctcctaaccgcgagtgatccgccagcctcggcctcccgaggtgccgggattgcagacggagtctcgttcactcagtgctcaatggtgccccggctggagtgcagtggcatgatctcggctcgctacaacctccacctcccagccgcctgccttggcctcccaaagtgccgagattgcatcctctgcccggccgccaccccgtctgggaagtgaggagcgtctctgcctggccgcccatcgtctgggatgtgaggagcccctctgcctggctgcccagtctgggaagtgaggagcgtctccgtccggccgccatcccatctaggaagtgaggagcgcctcttcccggccaccatcccatctaggaagtgaagagcgtctctgcccggccgcccatcgtctgagatgtggggagtgcctctgccccgccgccccgtctgggatgtgaggagcgcctctaccctgccgcgaccccgtctgggaggtgaggagcgtctctgcccggccaccccatctgagaagtgaggagaccctctgcctggcaaccgccccgtctgagaagtgaggagcctctccgcccggcagccacaccgtctgggaagtgaggagcgtctccgcccggcagctaccccgtccgggagggaggtgggggggtcaggcccccgcccggccagccgccccgtctgggagggaggtggggggggtcagccccccgcccggccagccgccccgtccgggaggtgaggggcgcctctgcccggctgcccctactgggaagtgaggagcccctctgcccggccagccgccccgtctgggagggaggtggggggtcagccccccgcccggccatccgccccgtccgggagggaggtggggggggtcagccccccgcccgaccagccgccccgtccgggagggaggtgggggagtcagccccccgcccggccagccgccccgtctgggaggtgaggggcgcctctgcccggccgcccctactgggaagtgaggagcccctctgcccggccaccaccccgtctgggaggtgtgcccaacagctcattgagaacgggccaggatgacaatcgcggctttgtggaatagaaaggggggaaaggtggggaaaagattgagaaatcggatggttgccgtgtctgtgtagaaagaagtagacatgggagacttttcattttgttctatactaagaaaaattcttctgccttgggatcctgttgatctgtgaccttacccccaaccctgtgctctctgaaacatgtgctgtgtccactcagggttaaatggattaagggcggtgcaagatgtgctttgttaaacagatgcttgaaggcagcatgctctttaagagtcgtcaccactccctaatctcaagtacccagggacacaaacactgcggaaggccgcagggtcctctgcctaggaaaaccagagacctttgttcacttgtttatctgctgaccttccctccactattgtcctatgaccctgccaaatccccctctgtgagaaacacccaagaatgatcaacaaaaaataaataaataaataaataaataaataaaaataaaataaaaaaaaaagagagaaatccttcttccctcactagttgagaagttgatttgtgagccaagctcccgcttctcaattccatggccattgaataaaacttgtgctgcttaagattcacttttggttttgcatattggctttgcagcactaaacaggaaaagatcccatttgtggggaaaccagctttgtctgtaatagtactagacaactagaggcagtccctatgccctggagcactcagaattatttaaatgagccaatccacagggagcccatgaaacctagctagccccacgcaactccccaacttcctacccataaactgtccctcacagctccagctggctgttgctctgcccccaggcaccctctgtgggcctgcctggcagccttgccttgtttggaggtataactaacaaatagttctgccttttatctatcttcgtgtcattgtggtgtgtcccgccatcaaaagaaactttaaatttcatgaaactgacctcatctctagatctttcacttaattacatctgcagaaaccctttttccaaatgtggtcacattcaaaggtggacatctctttcgggatgtagcaatgacttaagccttgtatacagatgaagtcagcaaaaggaatgccaaagtcaagggagtctgctctctgtcatgcgatgctataccagagtcaggttggaaagtagctccattataccaggttaataaaactccctttaatgagatattatggtttgtagggcataacttttaccatgcatagccttaggtcttgtttataaattggttatctgattgcaacaagcagtctattttgtcagtcttatgatctctgttttaaccttgatgctggtgagttgtccctaaagtcaaagggagggagtatgataaggtgtttccaacctcccctcctgtcatagctgggaatttagtttttcaggtttctcaggggtccccttggccaaaagctagtccattcagttggtttgggggcttaggaacttatttttagttagcagtttaaaatcaataaagtgtaacaactatttacatagcatttacattgtattaggtattataagtaatctagagatcaattaaagtatacagaaggatgtgcatagattatatgcaaatactatgtcattttgtataagggacctgagcatctgaggattttgctatctgcagggggcgctggaaccaatccacctggaactgagggacagctctaatgctgagaaacaaaactggcttggaaagaggggagacccaggacttgagcctgccgaggagctaaacccaagggcaagagctgcaggcagctgggctggagaggaggaaggaggtggctttgtttccaactgccctggaagacctcctcatccccctgcatccccagcctcctttcctttttccttcctgctctgctcccttccttcctctcctcctcttgggaggtggccagggacataggtcagtgcctggccccgaggaagacacatgcagtttgtggacgggtcttgggatgcggacacccagagtcttgtgcaccttcctggagtgttgcccactccagtacccactccctaatctcccctcttcctcctcaatcctctcttgcaggaagcagaggatggagaaccccctcaggaaggagggcagtgactctgggtttgcctagggctaatggcctctcaccgacctgtgcccttgtacctgtcgcctgggcaaacagtgattgcatcagctttggtttctcatgggtgggcagccttggctgtctgccggaacgtaaagagcatggagcaaggacatgggaatccgaatcccgctgaggtcccaggaccacttcatccttcttccctgtgcctctcctccccagcatgagcacagcagcctgatggagaaggattttccaatgttagaactggaaagaacacctgtagcctgtctccaccgtttacagtggtgctggaagtgaaaagatgtgttccaggtcacaggcaggtagacagcggagccagactgaaattcactcctcctgatttggagtttagagctcttctttggcaacattttgatgaataaaatcacaagttctgtgtcttttgaaattccttgtggagcctagtgccatcctctgaacttggagccaactgacctttgtccttggggcagagacatggttcatgggcccaatccaggtcctcaaagggagggcaggtctgagtccttgccctctgaagtcagaaacctcatctcccactacagacctgccagggcccaggagagctcgacccacccaggcacaccatagccccagagatggctggggacacagaagtgtggaagcaaatgtttcaggagttaatgcgggaggtgaagccatggcacaggtggaccctgagaccagacaagggccttcttcccaacgtcctgaagccaggctggatgcaataccagcagtggaccttcgccaggtgagggggaatgtgatggtacacgttccagaaaattcttgcacatttcttactaggtatacctgttacttttcttgttctattctgtgctttcaaattgaagactatgggtaataagatgcccatcatccaagaagttgtaacttcattaaagatcgttttttcactattacaatgaaccccaaagcaagagcaggcctgagcacccttgtgagctaatgcctggatacagagaaatcagtctgtgggggtggggagagggagcagccaggaaaggggaggggaggaagggcagctgttgcacccacgggcggtgcatgtgccccatgcctagggagactgctggacccaccttggagcccctaggaggagagactcacggcactgagcagacaccctcgggggaggccggaggagcagggggcctgggcaacaggcagcaatcctgcccctctctactctgagctgatagaatctttttaaaataggagtcttagaaatcatcctaagcctcatcctctctttcccaggtggaaatggggagccccaaggcttggggctgattgcccacagtgcacagagggtggaggccgggtcccacccgctgtcccctcccagggagagtctacatagagggggcagagctctcccactggcctatggctatcccaggccaggagctgccatagggagcattgcaccaaagtctcagtccatttatccatgggaagtttgaactctgaacaagcacaggaacagagcactgagacccaggggatggcagtggacttctgctcagaacagggcccaggcccctctgca

SEQ ID NO: 9662 - DNA, 6000 bp, Homo sapiens; identical to SEQ ID NO: 1066

SEQ ID NO: 9663 - DNA, 6000 bp, Homo sapiens
tgatgaggtcagggacagccaactcccagcaggccccagctgctgtggcacaggcctaggctgcccagctcccacccccaccctaggctgagtccctggatcctagcctagctttgtgactgggggtcctcatttcctacccccagctcccccagagctaaactttaagccctgggatttcaggctccaggagagaacattccacagggtcctctggccactaccccctgccttgctcacagcttccagttcagaggccctggaggctggactgggtccctacaggaaactcacaggagctaaaattagtacaggagggagaagcagggatctgcagaccagcattcacagcaccatgtatggaggggacactgtcttccagggagcaagggtgggggacttggagtccagaggtccccaaccccagatatgatgggcccaactgattttggggtgcagggggatgtggaggcctcctaagaagcagaaacagtactggacactgagcagtgtcctgggttggaggcaaaggctgaggtggaggccatagttcctgtgtgaccttaggcagggcataacccctctatgagcttaaattcctcactgaaaagccctcagagatgtaaagtccctcaaagatgggggaaaaaaaaacccatgtggtgttaggtattgattttcatcctcggctactggctcatagctcccattgcccttgttacggtctttggctataatgtgttgggcctcagggcaggccccaggaaacggaatctctctgaccttctcctgctctgctttcacctgccccaagtcaggaccctaattttcccacacctttctgattgcgagtcttaagaccctccccagagagggtcctgccctatactctgggaggaaggaatgcagatgtcgtgaagcctccataaaccccaagaggacagggttcagagggcttctgaatagctgaacgtgtggaggctgggtggcatgcccaggagggcatggaagctccataccccttcctccatatctcgccctatgcatctcttcagctgtatccttcgtaataccctttacagtaagccagtaaaagtcagtcagtgcttccctgagttctgtgacccactccagcaaattaagcccaaagaggaggttgtaggaaccccagcgtgaagccagttggtcagaagttccagaggccagactggcaactggtgtcttggggctgggtgggcagtcttgggaactgaggcctcaatctgtgggatctgacactatctccgggtagatcatgtcagaatcgaattggaaggcactcagttggtgtctgctgcttggcatttagggaaaaaacccacacatttgatcacagaagacttctgtgtggatgattgttgttgtgttggtgtacgagcagaggaaaagatatagtttgagagagttttcaaaactactttaactttcaggatgttcgccttaacgtggtgtttaatactggagaattggaagcaatggaaatgtccaacaataggacagagatccaacaaggttttttgtttcttttgttttgttttgttttgtttcttttttttgagatggagtcttgctttcgcccaggctggagtgcagtggcgccatctcagctcactgcaaccacctcctgggttcaagcaattctcctgcctcagcctcccgactagttgggactacaggcacgtgctaccggctaatgttttgtatttttagtagagatggggtttcactgtgttagccaggatggtctcgatctcctgacctcatgatccgcccacctgagcctcccaaagtgctgggattacaggtgtgagccaccgcacctggcccttgctgagtttttatacagtgtagtatcacacagcctttaacaagaatgataataattataatgactagcgtttaatgaaggcttgtgatatgctggtgcatgatactgaattaaaaaaaaaaatagagatggcgtcttgctatgttgcccaggctagtcttgaactcctgggctcaaatgatcctcctgccttggtctcccaaaggtgtgagccactgcacctggcccatgatcctgaattatatctgttttacagatgagggactgaagctcagaggggttaagtagcccacctgagggttcacagccggcagtatgctcatgtcccagaaaccttagtgcagttttaagctttaacaacttcagaagttaggacatataaagctatgaatttaccaaaaaattttttggaaagtttgtttaaattctcttatgctactttagttttgtgaattttgaatgacctaagtttctttttcttttcttttctttttttattttttattttttattttttagagagacaggggtctcactatattgcttaggctggtctcaaactcctggtctcaagcattcctcccacctcaacttcccagtgttaggattacaggcatgagccaccacactcagccgacttaaatttctttcagtcaacttttaccatcttcagagggcacaaaaggaaacttaaactttcaaatggtgtttcttattttttttttttttttttttttttttgagacagagtttcgctcttgttgctgcccaggctggagtgcaatggcacgatctcggcttaccgcaacctccgcctcccgagttcaagcgattctcctgcctcagcctcacgagtagctggggttacaggcatgtgccacctcacccagctaattttgtatttttagtagagatggggtttctccatgttggtcaggctggtctcgactcctgacctcgggtgatctgcccacctcggcctcccaaggtgctgggattacaggtgtgagccaccatgcctggctaaatggtgtttctcatacatttgtagctttatacttctgaggttattaaagcttacaactgcactgagacttttgggacaccctgctgtttaagttcagtcagtttgattttgaagcccgtgtgatagtatttggctgtggtggggtcaaggaggatctagagtacttgagttggttaaaaaaagttctgggtacaaaagtatactagaaatagtgtactgtaagatctcagctgtgttcaggagtctgcagagaagtggaacccacgcagagcagtggccatctcagggaacaccgggggacacatatgattgtattttctttcagatttcttcactaggcttgccctacttcttgatggatggatgaactttacagaaaacagaaacagctctcctctgggctgagctgtgattgggagcctgtaagcagcagagcactgcctgtcctgctaaggagagccagcactcccatattcattaattcatatcatcctcacatcaatcatgggagtctcaccctccccatgccatggataagaaacagaaacagaggagtaatgctttgctcagtgcattactgacaggctcacttagtcctcaccctgtccagcctccctgaccccatgtcccgagggtgacctccctgactggtcagtgtggctttccctagcctggcctgtgaccagcagcatgaggaagtggggattggagtgctgcaacaagtgatttggattttagcagagttcctgtttgcctggccagggcatgcctggggaggactgggtggcccagcccactcagtccccagactttacctcccactgttgagcgtttcctcgatgggtctcctgggctgcagtccttctccaacagctctcgttttcctgcctggctgtcatctccgggccctgacactggcaggtgaccgcaggtggccctccgctccctgctgcagcctgctgtggtccttgcccattcatggcatgtccaggccagaacctcacagggctctggagccacagggtctccctggttctcagggcaggccttgctgggccatccccagcctgcgcaggccttcaccagtgcccctggtgataagggttccaggggcccaacacctgggctgcttctcctaacactcagcagcaggagataaataagaatagaaggaaggaagaaaaggagggaaggggagtctaccaactccaggcctccccactcctcttcctaagtcttcagcccccacccaggtctctacatctcctcagaacctccctctgtccctcagttgtcaaggctcaacatggggtcagggccagagtgcagtgtgggtcaacttcagcatgaggtcagggtcctggcttagactgaagtcagagtcagtgttcaggctggggcagagattgagggcagccagggtcagaaaatggtcctccagcccttccagggacagcccacttctgtcctgtggggctgaagatgctggcttcttctggaaccctccataacactgccggctggcagctctgaccataccatcccctgctctccagctctggtgtccagggtgaccagagccgcctctgggcaggaagccaagccagaaagcccaggacatccctgagcgcctgtcaccatggcaacctgcccgctctgccccccccccaaactcaaatccagtatatttttcaaatccagcatgacagaatgggaagggcctcctagatcagcagattccagtcccacccccttgtcccagatggagaaactgaggcccatttgcagaagggagggggacctgttgattagggacctggccccagcctgtcctccctcccgcccacccccacctcagtgtccctggggatgcggaaggtgggggcagggagggggagcctgcggcccgatctcccgggaaggagggggcgggccctccaccgcagcgatggcgggggcgggcggcgcgggaacctgacaccgaggatgaataaatgatgctcgctgactacccgtggccaaagcccgtggccaccgagcgccggctggcaggggcagtgaccggcggccggcccgttcgtccctgggctccgcaagcggcgcggtggcacgaagatggcggggtggccgggcgcgggtcccctctgcgtgctgggcggcgccgcactcggggtgtgcctcgcgggggttgccgggcagctggtggaggtgaggccgcggcacggagggactggggaggctgtcaccctccaggcagggggctgggggagaggggacgcctttttgatccggagcttgtttgatcccttactcttgccctgagagatccagtctcccgggcgatgcagccctgccccaagccctgccaggctgtgagagagactcagccccactcttagggtccctggtctgatggaagggcacagtacccgatttctggaacattagtctgacgggggagactcaccttgaccttagggattcccagcctgacttggggacacagccctgcccagactgatgggggatactgggcccccatcctccagcctttggtctcactggcagggaggtgcacagccctgggtttcctggacctctagtctgatggaacagaccctgaatttagggtcttctggaggcaacagcctctatctccagagatgttccagggacccctgtctaatggagggggagacatagccttaagatggagacgagggcattccaagttggagggtgggggcagcaggatgaggagaccctttacagagaagctatgtggagcactaggtccagaggggcaggcagggcaggacctagggactgggaagtctgacttggtcctggtgataaccgggagctttagaaggtttctgctcagggacaagtcatgatgagttctggtttggaaggagggtaaattgggagcaggcacacagtgggagaggtgggaggagctgctgagatagcacagaagctgggggagagccctggtggagagcctggctggggccaggaagggtggggccatctgtagcctccctaacccccttgtaccccactcctgcggagcctgaaaggggagccaacgagggagctggca

SEQ ID NO: 9664 - DNA, 6000 bp, Homo sapiens
attataaaaatgtgtctagagtctttcttcatggggtctaggtagtcttctgagcccacaggggtctggccagtgaacaccagaggagtgccttcctatcagtcagccccttcttccagagggctgtggaggccccagtggccaaactcggctctgttttccctttctggctgttgggggagagggcacctgtaagtgatccctgtggaatgaagtagaaaatcctgccagttttccgctctcctctccctcagtacaggctgaatcattccccaccacagatagatcccagggttgtggtagagtactgatataaatgtcccaacccccccattctgagacctccggacccctccaaagcagacatgggaatgtagggctgtggaatatggcagggtgaactccagcttcacgggagccctaagggttatgaagagacaacttggggcagaaacaagtgtggagtctaatctcaagggtgaaggacaggaaatgaggtttggattgattaagggggtccacatttgtggtgtcagaagtggcagtagtgtcagtgataagtagctcaggggtagagtggaggctccatagctgtgggcaacatgcacagggcacctgtggctagaagaggcctcatacattgccagtctgaactccgcagctcttcctctggacctcaggtgtgccaagccccacgcttggcacctgggcatacagtggtatgcaagtgattcacgtgctctagcttccaggagcttccaatccatggggaacatagaaggaattgatcactagtgaatgtttgttttttgttttgagacagtctcgctctatcgcccagactggagtacagtggcatgatctctgctcactgcggcctccactcctgggctcaattattctgcttcagctccccgagtagctgggaccagtgtgtgccaccatgctcccctaatttttgtatttttttttgtagagacagggtcttgccatgttgcccagactggtctcaaactcctgagttcaagctatcttcctgccttggcctcccaaagtgctgggattacaggcatgagccactacacccagcccactagtgaatgtttttactggagcagcaaggccaggagcaaaggaccacccatgctcagggccactcctgcagatcagtggggccagggtactatggccttggcaccatacctttggcaatcctaaaaagagagaagatagcaccttctagcgaagtcaggagggattttccatgtagcccacaggggtttacacaataagcatctgagcatctcctgtataacaggctctgcttggggcgggatagaaagtgatagaagtgggacctcacaaagacaatcacactaatgttaactgagaacatacccatttagtcctcacagcagccccttgaggtaggtgctgtcatcatccacattacacagccatttaaaatgagttaggggcctggcgtggtggctcatgcctataatcccagcacttcaggaggctgagactggagaactgcttgagccctgggagttcatgaccagcctggacaacagggagatctcttcctacaaaaataaaaaataaaaattagctgggcgtggtgctgcacacctgtaatcccagctacttgggaggctgagctaggaggattgcttgggcctgggggtaggtgctgcagaaagctgtgatcacaccactgcactccagcctgggtgacagagcaagaccctgtcttaaacaggccaggcgtggtggctcatgcctgtaatcccagcactttgggaggccgagggggcggatcacctgcagtcaggagtttgagaccagcctgaccaacatggtgaaaccccacctctactaaaatatacaaaaaattagccaggcctggtggtaggtgcctgtaatcccagctactctggaggctgaggcaggggaatagcttcaacccagaaggcagaggttgcagtaagctgagatcgcgccactgcactccagcctgggcacgacagagcgagactgtctaaaaaaaaaaaaaaaaaaaaaaaaggccaggcacagtggctcactcctgtaatcccagcactttgggaggccaaggcaaggagatcgagaacatcctggctaacacagtgaaaccccatctctactaaaaaacaaatacaaaaaaattagccgggcgtggtggcaggcacctgtagtcccagctactcaggaggctgaggcaggagaatggcgtgaacccgggaggcagagcttgcagtcagccgagatggcaccactgcactccagcctgggcgacagagcgagactccacctcaaaaaaaaaaaagaatacagatcaatagaaggcctggatttggtagtatgtattgtcatggcatcaaagggccaggcttttaaaagactgagaaattctggtttctgatgtggttgtgaaattcccacagctgacagcaggtggagcagccctgcaacctgcttgctttctgttgtctggcaatgagctatcagtacctgtgcttagtggtaggcctagttcaggtaataggtgtaagaatggagttcaggaaaataggttaagcaaagtacagattttatggtgatcaaattctagtttttaaaaggctagaggggccggtcgcggtggctcatgcctgtaatcccagcactttgggaggccaaggcgggcggatcacgaggtcaggagtttgagaccagcttggccaacatggtgaaaccccatctttattaaaaatataaaaattagctgggcgtggtggcacgtgcctgtaatcccagctacttgggaggctgaggcaggagaattgcttgaacccgggaggcagaggttgcagtgagccgagatgaagccactgcactccagcctgggtgacagagcaagactctgtctcggggaaaaaaaaaaaaggctagagggaaatagtctcaacttcattccagaaaaggtatgagaaagccatgagatccttggtaaaattatggttctgttggttggtttattatatttaagaatttaggagatttggtctgggtgtggtgccttatgtctgtaattccagcactttgggaggccaaggtgggtggaacacctgaggtcacgagtttgagaccagcctggccaacatggtgaaaccctgtctctactaaaaatataaaaattagccgggcattgtggcgggcacctgtagtcccagctacttgggaggctgagacaggagaattgcttgaacccgggaggcggagctttcggtgagctgagatcacaccactgtactccagcctggcgacagagcgagactctgtatcaaaaaaaaaaaaaaaattataattaaaaaattaaaactaaataataataaataaaaatacaaaaaaaaaaattggcccgccatggtggcgcatgccagctacttggtaggctgaggcaggagaattgcttgaacccggaaggcagaggttgcagtgagccaagatcgcgccactgcactccagcctgggcgacagagtgagactccgtcacacacacacaaaaaatcttagaagaaagaggtgggcctgcccttggagcccctggcctgccttgacttgaggggactagaaaatgcagactatgctttgctatggggaagggagaggagatgggagtagaggtagtgggggtcttaaccagggtagggagaaaccaccagtgtgacctgccttaaaagtgttgctcttgcctgcaagtccacctcggggaggggggtcagcttctgccctgagggcgtgtagtaatctcttcctgaggataaccagctctagaagagcagggatgccttggcacttgaccactggtaggtatgtcctccccccacccccgtttttggtgataatctgtttaatttttctctgaggtaatggtgtctcagttatggaagagtcccttcccgcctcttcacacgtgccagctttgatgcaaggagtgttccatatacctgagcactggttcattcctgcgggctgccatggggggctcactttcctgatgccagggctcctccaggatgccccctctgacggcctatgaaaccttgcacatcaggcagcttcttcctaaggcctgcctgactccggcgagacttcccgggagatccggaccgaccgcggaaccgagctccaagaatgcctgcgaggaggctgtgggtcctaccctatcgccgcttacgcagtcccagcctccgcggcgcccccaaatgccgcactgttgagtcatctcagcgctgcctcctccgcgctgcgctccccacccccgctcctggagcaagaagatgcagacgatacttttcccggaggcaagagggcgtcttcacgcaggcaccgagaagctcccactagtgtatgccttaatggtgccgctcttgtccgcgtctacgcttgggaccttggcttctgacttggagagtgtacagctctgcccgacggcaacccagcttgggaagagaagccccagcgtgggctggggctcaaggcgcaggaaggccgagcccggcgcggacgcaggcggctccgggcgggctcagcacccccaggcaccgtctcctagtgaccgcggcgctcgcgggcctggcggccgttgtccgggcgactgcgcagcgcgggcacccccgcggcccctcccctgggcgcgcgcgcgacctgggtgccatggcggcagcggcggtgacaggccagcggcctgagaccgcggcggccgaggaggcctcgaggccgcagtgggcgccgccagaccactgccaggctcaggcggcggccgggctgggcgacggcgaggacgcaccggtgcgtccgctgtgcaagccccgcggcatctgctcgcgcgcctacttcctggtgctgatggtgttcgtgcacctgtacctgggtaacgtgctggcgctgctgctcttcgtgcactacagcaacggcgacgaaagcagcgatcccgggccccaacaccgtgcccagggccccgggcccgagcccaccttaggtcccctcacccggctggagggcatcaaggtgaggacctccctgccccgccgcgctccaggccctgcacggctgagcccgagaggaccggcgctcagcccgggtccccacgctgcccccggcgctgctctgcgtcggtcccgcgcgctcccactcactcgcctgctgtcgctctccgggccggggcgacttggcccttcttgggcagcgcggtctggcgccccagctgcccgctgtgcgccttttccttaggtggggcacgagcgtaaggtccagctggtcaccgacagggatcacttcatccgaaccctcagcctcaagccgctgctcttcggtaagtccgccagatactcctgggaagggccaggggctgcggtttggtggccaccttgaggctcgttgtgaccacgtgacctctattttgaaaatggctgcttcagagcagcccttccagaggattaccaaagtgaaggaccttccccgtcctcgaaatagggtaacactccctcttatcccaactccctgcagtccattcttccatcacagggctggcagggtgagcctgaggctggtgtctaaacgtttcattgcacctgtcttccgtgccaccattaattctgtcaccttctagaactgggaggaaggtgggagactgataaccagctttctgccgacctcaggacctctggggaaaatcccactgccgaagtgggccttgtggtctgatgagaagcaggccgtccaaatgtagataaactggtacccccccagcctcctccactggagtaccagtcagaggctcagcttttgctgccagcactctgagattcttcttaaggtgaagtctttgttcagccatcatgggcaaagctttctagggtgactccagttggagccacaacatagctcatcgtttctgagctctagttatgtgcttgccttcatatgatt

SEQ ID NO: 9665 - DNA, 6000 bp, Homo sapiens
aggttgcagtgagattgtgccactgcactccagcctgggcgacagagggagactgtctaaaatatatatatatatatttggccaggtgcggtggctcacgcctgtaatcccagcactttgggaggccaaggcgggcggatcacgaggtcaggagatcaagaccatcctggctaacacagtgaaaccccgtctctactaaaaatacaaaaaattagccaggcgtggtggcgggtgcctgtggtcccagctacttgggaggctgaggcaggagaatggcgtgaacccgggaggcggagcttgcagtgagccaagatcgtgccactgcactccagcctgggcgacagaacaagactccgtctcaaaaaaaaaaaaaaaagaaaagaaaaaagaaaaaaagaaaagaaaaaagaaagaaaaaaaaagaaaaaatatatatatatttttttcattaaaacatgtatataggggcacatatttttcctggaaccagtgtgagtgtggaggaggagaggagtgtggctcgggtccccatgaggcataggttatgtctccgttatctgacaaaaccaagggctacaaggcaaggggctcagtgacaggggttggggtctgagcggttgaccaagcacaggcaacgcccccactaagccagtattgtggaggggtgttggatgggctgaatttgcaggacctgtagtgcttgggggagatgtccaggaggccgactgatactcagtgctgggcagaaagctaagtgtaggcatcatcctcaatgtccaggtggtggggagctgtgagcctgtcggaggctggaaaggggagcatgagggcacccaggcctgagcacaggaagaacactggttggggttgggagtccagtgcacatgtgggcagtgatattggtgctgctcagaagcctgggcatgggggcgatctagccagtggtgcaagacccctgctgggtgctgttggcctggctgagccagggctgttcatctctactaaggacctgctccccaaacagtttgctagagtgaggtgggatgcgggcagtgacagaaggaggtagtgggcatgggataggaggccctgaggagctggaagtgttaggcttgagagggaggaagctgtcaggagaggtgacttagtggggtcttctgcacagccaccttgtcttggcagaaaggtaaggcgctccccggcattcctgggcaagggacagaagagccccagcaacatgcaggggctggaccctgccctccagggggtcccgccccacatatgcttctgaccctggggtctgggattcagggtcggtactcctggatcctgtgagttggggacgctgcctggcctcaaactgccctgtccatggccagcaagtgtggaggggccctgagtctcccagcctgaaacctgcttagctctgctcaccataccagtgtaattacacgctaaggagcaggatcaatgggtgcctgatgcctgattcacagtccagggcagaggatcagagagcactggcccagagtcagcacagtggccacaccccagtcttgtaggtggtgcatttactgtggtcacctctagccaccaccatccctgcctggcctgcaacctcaaggtgcccctgagggcccccacagccttcagctctggctctggcgggactaacctggcccggccaccgaccagagattagacaagactggtggatggttaatgccactgacgtcagggcctggccgggtggccactaggggtttgggccctcccctcaggcagtagcatagtccatgtgaccagggttcattaagctgcttcagtggccagagaagctgggggccagatctcaggagagagacagcaggcatgtcatggctgtgggggccaggccttagccacgaggtcaccagctctgggggcccaggccggggaagggctggataagagggttgcctatgggtcccctccatacttctacactgtgttgtgatactaaagccctgttcatgcccaaagaggagcctcccaggcaccaaacagcagggcatagtcagcagctagggtgtggtaatagaccctgaggtgtgggggtgagaaccaccttctcctgaggatttcaaacccctgatcatgagcccagaaggagcgtgctgccctgcacgcaaccctccgcccaccagggctagccctacgtccaggctcctttccctctggccgagctcctttctccatccacagtgcccttcccctcctgacccttgcttgtgcctttcttacccttcgcagagcaagtctgtgggctgctttgccatcaggctctccttgatttgcgccctccaacctcgcaggcattttcccatctagaccacctggagacagcgcttggagacactagggctggggctgtgtgggtggggtgacaagagcagcaagagcagtaagtgtcggactagctggctcttcacagtgactcaggcagggttctcagaggtgctctatgagggtgatgaaggacaagtaggagtctgccaaggaggtggaacagggtagggaaccttcagccctgggaagcacgagggcagaggcacaggagcatgaaagctagcaagttctgtgaacagcaggaacgtgtgcagcgtggccagccaagcccgggggaggtgaagaggcttgctgggagcaggtgggcggatatgagggaggccagccaggtgtgggggcaggagctgcagggggtctgaggagtcaggggacacagatcctgggctctggaagggctaggttggaggcgaagatggggcattgctgttggagatggtcttggggcactgtgtggatagcatgttagcagaggtggtggcatggtgagaagaggcagcctagctagaggctgagagttcatgactagaaaggaagaaggagagccaagggctattggggccctggaaggaggatctgagcggtcctggagccctgagctctgctgcatgggtctggcagtctttcaggcctgggtttacgttttcagagatggggcagtggaggcggaggctgggctgaagcttgggataaagcttcccccattctccatcccaaggggccgcctgcaactctgtggttgcttggatggacattccctctagcctctggaagaaggcgaccggcagctctcagagccacatcctagctgtccagctgtccggtcaccacaggctgggctgggagattcggcaggtggtgggaaaggcctccgagctgtgtttgccctggctggggcccaggcctagcaacaacaaacagtcagcccctcccccagcctggccacaactggtctgacccagggaccccacatcataccctcctctgggcctcccacagcagcccagcccagtcagcccctgcttcctccagtctagattgaggaccccaacacccatatcccaggtgaccttgagccagccctggcccctcaagaactgccagtgggagccaccagccctttgcagatagctcctgtgagcatccagggtgtctgcaagtgggaggttgaggggtgggaggcaggcctgagaccctcgtcagcacctcttctatatggctgtcccatggcagaaccatgcccatttggagggtgggagtcaaagtgagctctgatctaaggatgatatcagccccagaccaggagtgaaaggcagccctttcccattttccagccaccagcaaggcagaagttcgagtggcttgaggttttcaggggttgccaccatcccaatgcctttctctctagccctgccagccagagctgagtcccctgcccggtctcacagcttcccctccactcattcccctcaggagaaaagacagccatttccatgtcacagagggaaaccaaggtacgccagggcttggctgtggtggttctgtgagtcagcaggagaaaatcctggagtcctgactcccagcccagggcaggggagggtcgggtatgtcctctcagggcattccccccgcactgggaagtggggcaggcatgacacagagaagaccagcttgaataggaacagcagaggccatgagattaatcggatcagagccagtgactgagaagcaaggggcacagctgttctgagaacccccccacttcaccccgaaggtcagcatctcccccagcttcctactggtggaacctgggaccttaacacccaccacccgtctctgagcaccaagggcctgtgtggaaagcaggcaggggtgggataaggagcccccagccaagaacggggccatcctaaaacccctgtctgtccccaggacaccaagtcccagcccccttcttgtggacaggctgacagctgtctcctacaccttctaaataaggacgggggtcatggtcggggggccccaggtgaggctcaagcaagccaagccttactccttgcctgacctcactgcccctgccctctgtgttccagcctcagcctcctctgaatatctggggtggagacagaattgatataagaagccctcccaccctcgcccccaccccacccctggttgggaagggggaggcaggtagaagaggtattttgttgcctgagtgtcgcctgaaagtcccccattcaagcatctctcactgaggctatgcattgccagtcctcttggcggaagctccccttctggctttggggggtgtgggcaaagcatttcaggggttaatgtgacacccacagacctcagagagaatctgctttggactgaagcattccccccacaagactcaacggagtccctctggcagctctgctctcccacctaggggctccctaacgctcaggccgcccctttgctcccggcctgccccggcccccgccattcccccgaccagcccctcctcccgcgggccgccagggattggcgggcggggggcgggccgggggcggggccgggcgcccttcatcccgcgtcgctgttgtcgctgttgcagccgagttcagccgggagcagagcgaaccgcaccggcccgagcggagcgccgcacgttcccaaccgcgaggccaggtaccgcttcgggagttcatcccacccgcacaggggaatcgggtgggccgagccctactgtccaccctcctgtccgtagccgggctctgggcagctctcctctaccgtcctgacccgggcaggcgccccagcctccggcgagccaaagccccgcgcgctccaggcgctggtcttggggacctgccagtcgggactcagcgccgagcttaagcagggccctgggggtaccgggagggacacgtcgtcgccttagggcctctcggcggggctgcgaggtacagcaggaggtcggcggcacccggggctgggaccacaggacgccttgttgggggctcgggcggcacaccacaggcttcctgaggcagggcccatggggcaggctggagagggcccgaggggaggacccaagaggggcctggagcagtccctggagcgctgccccgacgggcgcctgacaggcagagcagcccggctggcacgatgggaatccgggtatatttatctcggctgctccggacaagggcttgagggcagatcgggccgggccgcctgaggggccgcggggtacatgctggtcccagagccggtgccatttgcagaggagccagcgggcacagcgggcgcagggcgcgagtggctccctgacctgaggccggggcgccgtgcgagctcctccccacctggcgctgggtagggtgtaagttagagcccgcgcagcgcacggcggagagaaggaaccaagacttggtttgcaagagcccgcccccgcccggttggccccttcgattggccacagcaaatgcgtgcgtttgtttacacccaggcagggggaggccaggggagggacctgcggggacccgcccttttccccccacggggacctgagtcctgagtccaggtatgggctctcaaacaggtctgagaaaggctaagtca

SEQ ID NO: 9666 - DNA, 6000 bp, Homo sapiens
ctggtgatcttggctgggagaaaaatcagagtttgacatctcatcccactgccttctgctttctgaccttactgaggtcagggtcatcaaggcctgggggactgggacagggttaaggggtgtcctttctccatccgtcttccaaccccgtggagactcagcatgcctaggaaggtggaagggcttcctgcgggcacaccatctcccgcctccctgtgcctgtcctctgctgggtcctgggttctccagtgattatagcccttgctgcttcccccacagtggggaacacagagccctgcccagaggcttgaacctggcaccacaggggtctggaattacacagaagacgggtgacagccaaggtggatcatgaacggtgagaagtccagcaggtgacaaggggaagggtctaaagggtggagggcacagcgcaagcaaagtcttggcaacaaaagagctaatgcatcccagaaatggggcaggtggagtactggaagctacaccaagcttcagagtggtcctgtggcctcggtgtggtagctcaggcctataattccaacactttgggaggctgaggcaggaggaggataacttgaacccaggagttcaagatcagcctgggcaacatagtgagacctccatttttacaaaaaatacaaaaattaactgtgtgttgtggtgtgtgcctggagtcccagctcctcgggaggctgaggtggggggatcacttgagttctggaggtcaaggctgctgtgggccatgatcttgccactgcactccagcctgggtggcaaagcaagatcctgtctcaaaaaaaaaaaaaaaaaaaaaaaaaaagatgaaaaagagagtggccctgtgaatgccaagctaaaagcctgcaatcccgccaaacttcagcaagctctctgagtcaggggtcagggacacggtcctgcagaggggaggcatggggagagaaatgacagaatgaccccagggatacagcctgggggagggtaaaggggtcagtgcttgtcctaagtaagacaaaaggtaggggctctcaggagggcaggcttggcagtgccaggggtgggttggggacttgggaagggagaagactgaggagtccccacccaggggagggagggaggttaaagtagaaccctgggcacagagggttgaggaccctggggtcaagagaaccctggggtcagagggttgaggaagtaattgtactgaggtggccgggagcggtgactcatgcctctaatcccagcactttgggaggccaaggcaggaggactgcttgagcccaggagttcaagaccagcctgggcaacatgacaaaacctcatctctaccaaaaaaaaataataatacaaaaaaattagctaggcatggtggcacatgcctgtagtcccagctactcaggaggttgaggtgggaggatcacttgagctcggcaggttgaggctgccatgagccatgatcccaccactgcactccaccctgggtgacaaagcaagatcctgtctcaaaaaaaagaagaaaaaaaaaagtactggggtgaggggcacagcaaaaggggacaagagaggagctgagcccgagaaggggccttgttcagctgggatggaagaggcagcagtggagggtttctctgaggccctcataggcctgggtgcccaagatgcccagagctaaggtggcagcaagagtgcatacctgtggtacccccactgtgtgccagacctgcctggccactgtctgcagctgcagggaaaatgagaggtgcagactccagctagggccacggggtcggctaagcggcagggtagggattcagccccacctcctgctggactaacaagggggttgatccttggggctggctccagactcctcagccctcccccagagcattcagagccccatacccagtactcctgggaggctctcccctagccagttaggagaatgtagtatttatgtaaatgtctgttcatgagtgcagtgtgccctcagagtccactttccagcattcctggcatagccccctccaccctgccgggctccagaggagggagggagagggaggccccgcccccagccccctctcctcccactcctccctgctgggcaatgaggaaaacaggagtgagggaagagctgtgatgtggctggttgggggggctcccgcatcccagaagggctgacctcagcctgggaggaatgtgcaggaggggagggcaggggtggggcaggcgggggtagggccacagccaaaggcccagggttcttggtagcccctccctcagcacctccatctcagttctgacagggccctcagaagggaaggggaacaggcaaggaggggaggagctaatctttcaaaaaaggtgggccagggttccctgggaatgtggagaccaggctggggtgaggacatgcctgcagacgcttccccaggagatgcccctggggcagggccttagagtgtctgggaagttaggcctcaggtgatgatcctatggccgcccacgcctgcccccactgtgcctaagtcctctgggcagcatgacctggtacctacgtggccagaacaaggaagagttgtgacgttggagccacaagccctgatgactaaagcaggtgtgagtggggcgcccaagatcccatccagtccaggctgcactgggagggttgccacaaccttcctcagatgggtgtcccaccccaaccacaccacccggagtccaggcaggggcaaaggggcaggcccagctggtggccaggggtggggaggcaggtgctgagatttggcacaacaatccaggtttttccagaaggaaaagccaaggccgtggtaggccatgccactgacaggcagccccagagcaaggacccaggcaggtctctgcccatggaagctccctcaaaagagagaggtccagggtaggagtacaggcaggaaaagggaccccagctgccttgcctggtttgccccattctgttgagactcaggctcaggctgcctgattccagaatcctcgaggagttccagcccccagtgtgacccacaggcagtgaccttgctcctggagtgctgacctccatgggggcccctacccatggcctggcacactggacctggggctgaggaacagaaaggggaccatgtggaatcagggacaacttgacctcccatccctggagacctccattcctactcaagggagggtacacatctagaggacagaggacagggcacagcactcaatggggacagagacagtctagtccttttggctgggggttgactcccaggctattggaaagataatggcggtggcgggggggtttctgataccgtttcccagagtgaacacaggtggaggaaggtgcggggtgatgaaacagagacagggcccctgggcctggaaaaacataaggcagtgagggcctatgggggcacagtgggagtggatgggagcctctgaggcacttgctgatcctggctgcttgggtggaaagctgtaaacagccaaagaatgttgtctgcttgcatggagccaggagagcctgcccaggtcctctaaggctagaggcagctactcctggagtaggaaaaggccacatccaggaagcccacgagcccaggcagggatctgtccttccacttgccctcctgaagggccctgcggctcccactggcccctgttatttacctgccagctggccaggccaggccaggtataccaggtcctcaggctcaggaaggaggggcatagccccacttccacttccaggggacttggagatgtgccccccacctctgtccttgcttggctggaggcatccagggctgggcaacagaactgcaacacttgaaatgcccacactgccccatcagccttgggaggtggtaggaaaatgccttttgcggggatggaaggatcaaagcccattctcaagccctggtatattcactcaggtggacttcagggctccactctgccactgtcaacatacagtccctccagagaagtacccctcatgttacaaatggggcacgttcaccagactcagcttcaggacaagaccccaggtcattcccaactgaggctccgaggtgcaggagctccgtcctgtctgtaaaactccctcagttttcggctctgggtttggtgggggttgttcctcccacctccaacctagaaagagaagccagaggaagggaggtcacatggtctgccccccaacctctcagcagagatgcaaagctacctgtccaggatggcggactccagatgggccccgccctgtggtgcagaagtgagatttgctgctcctcctgcgtctgcccctctcctgccctcctctccctcccctatctggctgtcatggtagaagccactgctggccaggccactgaagtactaagtggcccaagtgttgaggaaggatggggactgggtcctgagggcccatccgacctccagttgagagcccctcccctgacctccagctgcccggccaccccagccggtccctgggaactgaggtggcagctgagctccccattatctttccccacagctccccacctgtggagggagaggttgagatattggagtccacgggtggtgcccccactcagtgattccctttgcctgctgagcccctggagctggggtttcttcctcccttgccttggctggccacctggcttctgggaccgccacctggggcacccttctgctttaaggcccaatatgggaggggtcgtccctaccagcccctcccttgtgcccattccactcccgcctggctgccgtctccagctggtcccggctgcctgcccggtcacccgatccgccctctaaactttacggcacggcgggcggtgcgtggggcggtggctggcctggtgggggcgggggctgcttcttaaaggagccgtcagagggtccccagcggccccagggtgggaaggggccagagtggagagatgctgctgcggaagtcctcggtggagtgtgagaaggcagccagtgttggcctggaagacctctagaacctgagaagaggcagcggcaagtgtcagcggagggaaggagggaggtgggggtcctggcctgggatggggccaggagctgggcaggagtgtgggtggaggggcctggaacctgcctcagcagctgctccacttgcttaatcccacctggaaccttgtcccactccctgggctcctgtgtccagcacctgcccagctgacccctgggaaggagggtgggcatagcagccaggtctttgccccagctgagggccagggggaggtgtctggctcctagagtgaaggggctcaaagatggggaagaactcaaggggtgagagaagtgaagggagaggctcagagaggctgtggaggcgttgagagggaaggccagctcagcgaggccaggaggctggggtgcaaatgaagggctgcctcaccttgcccctctttgattcctcaggggtgtggagagagagccctcaagctcaaatgcagaggctgcttcagctgggttgggagcagtccccaagtcagaggctgaggcttctgcccaggtcttgggtctcctgggtagcacttctccctctgaggaatggagtgattgatgctgcagttggatttgctcacttgcatgcccagagacatgtctattcttatgggtgcacacgtttgcacatgcacaaatgtgcaacacatctgtgtgcaaaatatgcacatatcacacatatgtactgcatggattgcacagtgccacatgtgtgtgcacaccaacccatatccacacatgtgcaatatgacacactatatatttgcacatagatgtgcacacacatgcacatacacactacacacatgcgcacatcacaaggggacactcggaaacacattcacaggcacccacacccttggctccagcctcaaaagtgtctctgtgtttttctgcgggactgtgggg

SEQ ID NO: 9667 - DNA, 6000 bp, Homo sapiens; identical to SEQ ID NO: 3812

SEQ ID NO: 9668 - DNA, 6000 bp, Homo sapiens
tgtcatgagggaggggtccatggccagatgtgaacgcagaatgcactgagccagggcctggtgactgcttgggaacagccagtgatgagaaggggttaggcagcctttgcccctggggctgcacaggaagccctagccagcgacctggtgactcccctgagctggaagaggctccgactccagagggcattgcctatggggctttgcacgggtggaagccaggccagccaagaggacctgttcctgctggatgtgctgcacacctaggaaccttgtgcttgcctgccaccgcctccctctgtccctttctccatcacacagatttctggcatcagaaaaacaccgactacaacaacagccctttccacatctcccagtgcttcgtgctaaagcttagtgacctgcagtcagtcaatgtggggcttttcgaccagcatttccggctgacgggtgggtgaccctctgtgctttgtcctatttcgggtgaaggccagcatcaccagtgggcttccaccttccgtacgtgggtgggttatcatagacagttatctctgtgctcaagagccacttcttaaccggggtgggaggaagcagcttcaggaactgctgagagagcagaactcacgctccagggctcagagcaggaggtagggtgtgcggcaagcgctggcccggacagaagcagagtgggccctggtctcgggcaggatgtttctgactcacatttcctgaggagagaaagctaagctctttgcctaatgtctctgtctccccttccagaaaaatgcctcagctcttccggcctgaaggaatggcctcctcccgggccccatgattctttcctgtgtgggccctcctggccctggcctctgggctgaggcttgctagggactcggggtggctctaaggggcagggatagggctggggagcgccggcctgtggccctgaccagccccttctcgtgcaggttccaccccgatgcaggtggtcacgtgcttgacgcgggacagctacctgacgcactgcttcctccagcacctcatggtcgtgctgtcctctctggaacgcacgccctcgccggagcctgttgacaaggacttctactccgagtttgggaacaagaccacaggtacccctgtctagctcaggctgcagacaggctgcctggacagacgtcatgggccccagggtggctctctgtgccccagaaccctctctgcctctatgtctctcttttctcacttagctggccagggttttatgtggggcttttcgatggcagagtctccactccagcagtccctcaaccatctggcagacacatctccagtgcctgctttgggctcctggcctgtgggccccacacttggagcatcctctcctgcctgtctcatgccggggtctctcggttggcttggggcccttggtgctcccagccccaccaggggccggttccaggctatagcccaggtggcatctctctgcagggaagatggagaactacgagctgatccactctagtcgcgtcaagtttacctaccccagtgaggaggagattggggacctgacgttcactgtggcccaaaagatggctgagccagagaaggccccagccctcagcatcctgctgtacgtgcaggccttccaggtgggcatgccaccccctgggtgctgcaggggccccctgcgccccaagacactcctgctcaccagctccgagatcttcctcctggatgaggactgtgtccactacccactgcccgagtttgccaaagagccgccgcagagagacaggtaccggctggacgatggccgccgcgtccgggacctggaccgagtgctcatgggctaccagacctacccgcaggccctcaccctcgtcttcgatgacgtgcaaggtcatgacctcatgggcagtgtcaccctggaccactttggggaggtgccaggtggcccggctagagccagccagggccgtgaagtccagtggcaggtgtttgtccccagtgctgagagcagagagaagctcatctcgctgttggctcgccagtgggaggccctgtgtggccgtgagctgcctgtcgagctcaccggctagcccaggccacagccagcctgtcgtgtccagcctgacgcctactggggcagggcagcaggcttttgtgttctctaaaaatgttttatcctccctttggtaccttaatttgactgtcctcgcagagaatgtgaacatgtgtgtgtgttgtgttaattctttctcatgttgggagtgagaatgccgggcccctcagggctgtcggtgtgctgtcagcctcccacaggtggtacagccgtgcacaccagtgtcgtgtctgctgttgtgggaccgttgttaacacgtgacactgtgggtctgactttctcttctacacgtcctttcctgaagtgtcgagtccagtcctttgttgctgttgctgttgctgttgctgttgctgttgctgttggcatcttgctgctaatcctgaggctggtagcagaatgcacattggaagctcccaccccatattgttcttcaaagtggaggtctcccctgatccagacaagtgggagagcccgtgggggcaggggacctggagctgccagcaccaagcgtgattcctgctgcctgtattctctattccaataaagcagagtttgacaccgtctgcatcttctaaaccaagggtcactgggatcccagcagggcttccgtccagggcgtggtcacatgggggagggagggtgccctggagacaggagggtgaggggttgggggaaaggaaggagcagccctccaggagccagatgcttcttggaacatgggaggcatgacagggccatggcctctctggacagtgccatgctgggctgtggctaaaccatgagcgcagggcaaacaagaaactcctcagggcacccctgacacaccagccgctgcccctctgcctgggtgcggggcatgccaccctcttcaggctgtcctgcaggtcttatgtgtcagtcacccctgggcccaaccccacctgtttcacaacccctgttgagagtgggggaggggcgaggaggacagagagatcccagagtctgaggtggctggtgggggccggggcatctcaccaaggtggcccttgaatggcagcaggggaggtctgtggggaggtggacccaggtggtggacagtggagggaggggcacatacccatctgtgtctgtcttcatgtccctgaaacatgaggctcatgggcccctccctgagggttgcttcagggagcctgctgaggtaggacctgggattttggtagccaaccccatgccacactcttccccaaccccattcctgctgccagagcagggcctatgagccccacataactcatcctggcccagccaggagcctcagtccccaggaccttggggcagccaggccaggcagggctgtggagaggtgggtggcgtggccagcctgggtcccaggcctgcttctgttcccccgtttcccttggtgccagcagagtgggggtcctgcctggaggacccttcacccccaggaagactgtgggtgtggggaatgtggggagggtttccccttgcaacccccatcccagccagatctcaggcctgcctgaaggcccctccaaactgatgggagtggaggtgtgctggggaggagaaactttccccaacctggcctttaccaaagcatttacagatggccaccgggctctggcccactcctgtctccccaactgttacgccgtctgcagttgggggtagtgacaactggaggcaaggcccaccacgtgcagccctggcacgcagaggccctcagcctgggcccactgcacctcttgggggtgctggctgtgcaggcagtggtggcttcagacagtagccctgggattggatatgaaaactgattacctcagacaagctacccagcccctctgagcctcagtttccccaccagtaacagagggatcataaaagtagccacctccattcatttattccttctgcacacgtgtattgagcatccactgtgcgaatcagccagacagcgcccctactcttccacagccaatgttccaggggagacaaatgaaacaagccaatgtcagctggtggctggtgctgccaggtgaaccaggtgcagggccacctgcaggctgagaccagggaggcgctctgaagtggtggcccttgacctgagaccacctgtgagaaggagccagagtgtgacaatctagggtagcagcacatgccgggagagctcactgaaggagcagagaggcctgcgcggctggagcagacctgtctggggagagttcagagagaccagccagctggagaggggtttggaggtgctgcagcaagctggctgagcatgggctgctgagtggagggcagatagggaggcagggagggtggatgggggttggcgggcaggaccagcggctcaggagtggctggggctagtgaggggatgtgggtctggtgggctagcagggtgcctgtagcgagtcagagccccatgagcgccctggagttggaaaggtggaggcaggaacagacagacccattcaggggctgccctgccttccgccgaccagcaccccaggagcctctgaatgaaacacactgggctcgcaggcgggggactcgttcacgtgtgcctttggatttgcttcagaacctctgatagagcccaggtcccggggctcatggtggcctggacttccaggttgtgatgccaggagggtcccagccgggaagccccgagcagggctcaggccgcccatggggggtcagtggccagcaccttcccttccgcctgcaggctgctgatatgcaggaggaaatcctggcgggttcctgtgggggtgagctggcggggcctccgggctgcttttaaggccactgcccgccccgtcccgcctgcctgtgctgtgcctgcctcctagagctcattccctacgccccgactctgtcctggacagcgtgcccaccagccatggcggggccccggggcctcctcccactctgcctcctggccttctgcctggcaggcttcagcttcgtcagggggcaggtaagtgtgagccagtcgcaggggcacacggcgtctgggccctgccggccagcggtgggaacagggagggactgacatggaggggcaggggcctggggagaaaccgcagctggcgcctgtctggcctcttagcaggcctgggggctggctattgtgcccacctccccagtctgaggtctgcgtccagccacccagggttcaggggtgtgtcagcccaccctcctctgactatgcggggccggggctccccagcgtgcagctgaagtgtacagaggcaggcctgtcctgcccttctggcccagacggaggcccaggtcttatgtggccctcacctgggggttgaagatgtgatcacctccaacccccgaggactacagattcacgtggggcaagtgtgtgcacatgtgtgtgcctgtgtccagccccaagagtaccgggaagcagaatgagtcactcacccttagtgtccggggttatgagcagctggcaaggacacacttcagcctcagagctgccacagagcagccacagccccgggcaggtccccttgaatcctcacagcctcggggcaactcctcctgtcctcctcgtgaggaacccgaagccctaggatgatggggacaggccattcccactctaaagccatgctccaaacccctgcctgtgatggccatccgtgtgtgctggcgagcagacagggtcctggtatgcagccacagccagcccctcggtcaggtccctgtgacaggctcctggctgcaggtctgctcaggccccatggtaggggcctctgggagcttctggaagagcctcccaccctggtgatgggggtagtctctctcctgtgaggctgagcgtgtctgcctcctggagcagcaaccactatccccat

SEQ ID NO: 9669 - DNA, 6000 bp, Homo sapiens
gtaacctgaggtcttagcctcatcagtaaaaacatgcctgttcagagttgtatcccattcacctttaacatgagtgtcctcagagaaaagaatattatccaaattcacttgacaaacccacagcacagaaaaagctacaaaaattcacaaaatccaatcgatatcaaaagtgtggagtacatttctagccattgtaactagcaaaaaaaaaaaaaggtttattttagtttattattttttgaaacggagtcttgttctgtcgtccaggctggagtgcagcggcatgatctcagctcactgcaacctctgcctcccgcattcaagcgattctcccgcctcagccttcccaatagttgggattacaggtgtgcgccaccacgcccagctaatttttgtatttttagtagagatggggtttcaccatgttggccagactggtctcgaactcctgacttcgtgatctgcccacctcagcctcccaaagtgctgagattacaggcgtgagccaccacgcccggccaaaaaaacatttaaggtgctattctcaaaaaccatctctgttagctagctattcatctcttaagaaggtggtgtctaattgtcacaatgtcctggttggtcctcctcagctcatctgaccttcactttttcaaaacaattcagtggaaacaagatagtaggtggaactaaatttatttaaaaaataaattccttcaacaagctctggataaaatgtttccttaaagacattttaccaaccaagatatcgtgaacctaccttttaaccctttcttacttcatcttcacccatagtagtacccaacccttacataaggctattaattttacaaagcactttcaaacatagcgtattgcaatgcaagttagttcatttgtttttttagacagggtctcaccatgttgcccaggctggcctctaactcctaggctcaagcaagcctcctgcctcagcctcccaagtagcagggactacagacaaagtaagtttgaattaacttcatcctgggaaaattgtgtgcctaccaggcacttaatttctcaaggcctttgtaaagaagagaaatatgttgaaaaactgtttaaaaaattgggggctgggcactgtggctcatgcctataatcccaaaatgaaaacaacaaggctaacgcgggcagatcacctgagctgaggagttcaagaccagcctgggtaacattgtgaaagctcatctctacaaaatatacaaaaattagccaggcatggtgacgtgcatctgtagtcccaagcatttgggaggctaaggcaggaggatcccctgagccagggaggtcaaggctgcagtaagccatattcatgccactgcactccagcctgggtgacaaagcgacaccctgtctcaaaaaaataaaaaataaaaagcaataaaaactgtggatcagccaggcactgtggctgatacccataatcccaactattcaggtggctggggtgggaggctgcctgagcccaggagttccagaccagcctgagcaacatagtatgaccatcccccaaccccatatctaaaaaaaattttttttaaaaatgggatcacaggccagattacaaattagggggaaaatacacatctttctttctttccttttttttttttttcgagacagagtctggctctgtcagccaggctgcagtgcagtggtgccgtcttggctcactgcaacctctgcctctcagattcaagcaattcttgtgcctcaacctcccgagtagcagggactacaggtgtgcgccaccacgcccagctaattttaatagagagagggtttcaccatgttggccaggctggtctcgaactcctgacctcaggtgatccacctgcctcggccttccaaagtgctgggattacaggcctgagccaccaggcccagcccacacacacctttccaaagcagtatatatgaagtacaacgtgtcagtgaacttcttctcatatacatcagggcgccgtggctcacgtctgtaatcccagcactttgggaggccaaggcaggtggatcaagaggtcaggagttcgagaccagcctgtccaagatggtgaaaccccatctctactaaaaatacaaaaaattagccaggcatggtggcaggtgcctgtaatcccagctatttgagaggctgaggcaagagaatcccttgaacccgggaggcggaggttgcagtgagctgagaccgtgccactgcactccagcctgggcaacagagtaagactctgtctcaaaaaaaaaaaaaaaaaaagagaagtatatacatcagtatataccctaagtcatatgcctctatcacattatgggctgaccttatctacagaagctggcagaggggagctgttcggacaaagccccaacatctgcctgcgatgaggcaacttccaccaccactgagaaaacgatcttgcactcaaataaatcccacttaattaatggtacaagagataatgtttttagtttcttgacttccagttagcagttacgggatcaagaggcacacttggctggaaacaagaaaaacacaattctatcaagtatctgacatacttaagtagactggcaaggcagaaaccagttgctcctaaaacttccacagttacctacatgcaaaacgccagttatcatggagtacgtctaatccatattgtctttcctggggctattcctggtaagagagctttcctgatctggttagaaggaattctcaaaacgaaattgcacacagacgctggatctgtaatagttaactacattttcgtaagagtatataattgtgtacaatttgattagcaacacagttggtcctcagtatcagtcggggattggctccaggactccccatgtatacaaaaattcacggatgctcaagtcccttatgtaaaatggcatattacagtcagccctctgtatctgtaatttcagtccgtggttggttgaatccaaggatacaaaactgtggatacaaaaaaaaaagaccgcactggccgggcgcggtggctcatgcctgtaatcccagcactttggaaggccgaggtgggtggatcacttgaggtcaggcgtttgagactagtctggccaacacagtgaaaccccgtctccactaaaatcacaaaaattagccgggcgtggtggcgcatgcctgtaatcccagctactcagaaggctgaggcaggacaatcccttgaacccaggaggcggaggttgcagtgagccgcgatcgcaccactgcactccagcctgggcaacagagcgagtcttcgcctcaaaaaaaaaaaaaaaaaaaaaaaaagaccacacagagatatatctatttatacacacaacagaaagtctcttcaaacacaccaagaaatacagagcatgagaaggaaacaggaataaactcttgcccatccctctttctgccttctacacgtcctgagtccttctgaggtcagaaaagtgtcaaacgtgtctgcattttactgtttggtctctgccacgtgcaaggatgaaagggcactgaggatatacaaacactttctcctaccctttcatctggctggctcccacttggcattcaaaggtcaaggtagcctcctccaaactccacgttgagctgcacctcccctgagctcccacatctgggcctccctctcccagggctaatccagctgtcatgtatttctggcgtgatgtggctgtctcccttgacacgctctgggctcttccaaggcaacagcctggtcttggtaacaaccgtgtcctcggtctgctgtctggcacaaacaaggtgccgtgaatatttgctggttgcatgaatgaggacagcagtcccaccctgtcccgggagtgcctagaattccactgtttgtggccaacccagaatacataacctgggggccggagagccagctgggacccagaggcccgggttcctcagaacggtttctctccaaaacgtgggcatcccacctggctgacggtaacggaggagggtctaagatttagagatacaccagccttgaaagagaggctgagtgaacctttggctggcctctatcgggagggcccagcctgggtctgtgagggtcagtaaagccggccacaatgtgagagggctgagttcgggagcccccagatgagggactttctacgcggatgagagggacagccgagcaccagggtcccctctccaagggaattctctctgttgtggatgccgcctagggtagcccccctaaattccaagggtcagtagggccccccttacactttgaagtgatcggaaagtgatgtgacgctccggggatcccaccaggctcagagatacccctggttagggctccgacaagtcgttcccctcaaaggctcgccgcggccgcccttactgcaggcgatggaggagatgcggatgcagcccgcgccccgacccgccctgccagctcagcgcccgcgccgcaggccccggagcccagcccgttgtctggccgcccgcgttccctgcacgctgggccgagcacacttgccctctagctccgtggcagccgcgcagccccactacgcccagccagcccgcagcggtaaccgctagagcgtcgcgccaagcaggcgccgcggggcagccctgccgccggggtcctcgcagggaaaaaggccgtcgccatggagacgcgggggcgccggcggccgttgggccgcgcaagtactgtcaaggacagttttcgggacgggggacgcggctccaggcacccaacagcactgacggcgaacacttcacgggcgcgcgatgcctcgacaaggcggccgccaccaccacctcagctgccctcgcgggcagcacggcgcggcaaaagcgcacgtcgcctagcgatggcgcggggcggggacacgggctgtaccggcccgtcggagacttccgcttccggggccgccgccatcgctctcccgggcttagaaggcccggctactgacgcgcagtgccagaccttacccctcacggtccttaagtctcggtcgccctcgcctcgcagcctgccacccgcgctcagctgcccgcctcctcagccagccatgctggagcatctgagctcgctgcccacgcagatggtgagggcgcaacccggggacctctgcacgccgttcttgtgcctggcagcttcgaagcccatgttggagcaccgacccggtgctgcgctgttccgggcccggatggttaccgtccaccctctttcccgaattgcctcctgggtccccttctcttctactccgcgagaatctcctgtccattctccgtgagggtgtttcagttcctcccgggaagcccagaatttaatatcttgcccaggcccttaggagagcgggagaccctgatgttggggttaccctgtgccagagttgtgaggtcagggcaggaattgtatgttctcggcggtggaaccaattctttttttcctctgcttcaccccaggattacaagggccagaagctagctgaacagatgtttcagggaattattcttttttctgcagtaagtattggttttacatttaatctccgcccccgcctccctcccaaccctcagtttgagtgtgtttaatatacttcatttgtctctagatagttggatttatctacgggtacgtggctgaacagttcgggtggactgtctatatagttatggccggatttgctttttcatgtttggtaagaaatttgtgggtattagtggcagcttgggttttgtgagtcgggttggtttggttagacctactcagtagtgagacccaaagccaacgtttccctcatccttccaaacagcgtttccctttgctatcattggaaaagtagaatgccaaaatagtgtcagatggtgcgaactatataaaaggacacagcttatttcctttggcggctactctggctaataatcttaaggtcaaagccagcaggagttttcatggtgctcacgtt

SEQ ID NO: 9670 - DNA, 6000 bp, Homo sapiens
attcaaacccaactacacagtttgtttaaggatatgttctgcatatagccttcaggatctgtttatcttccttaattagaattcctggtgtgcaaaggacccaattttccctctgttttatatttttaccatctaagggccaagtgtgctaccataaactttatgggatttttgtaaatatcagctgacaatttctggtgatctatgtgggcttttatgatcctgtgcagactaatcagagtatttagtgcccgctgtgagcataacacttagcagcagggagagggggttaaggaggtgatccttgcttaaggacccacacggtggttggagagacaggatttatagccaagaagcaatcacacaagacacaagaatgtatgtcatcaaaggggaagccaggtgctgcaggcctttagggaaggggaggtgggggtgggggcacacgagtgtccatagcagcagtagcaatcagagaagtcttctggaggaggcagagacttgaccgaggctttttcaatggagaggggttagtgagaggtcagcaagtcaacaaggtagggattcctggtcagcgaataaacaggagccaaagcagagagtcagaaatgagcacagcatgttcacagtctaatgagactgctgaccacagtttaaagtgaatggtgcgagatgataaggttgaacgctagtcagaggagtttaggttgaatgtggaaggaaggaggaagaaaacattttttggtcagggaagtgacatggtgtgttttgaacaagatggattatttgtgggaggaaaaatggagaatgggcatcttgtgcatgacctggggtgtgagatggtgaggttctggactgggccatcagcaaggttttttgaaatgcagtgcacgcaggtaatcatgtctggcatgccagctcagtgcgttcaagtgggagtgctttataaataaggtcatggagattaagaccccacaatagtgtgttagcaacataattgggttgtagcacatgtagctgatttagagctgaaatcttttgttttagcctttcctcatgtcttgttggctcagctactaagtaattgtgtgtggttttgggcgagctacttaactcctcagtgtcttggttttgttgtctgtaaaatgagttttgtttttttttttttttagagttttgctccgttgcccaagctggagtgcagtggcacaatctctgctcactgcaacctccacctcccaggttgaagtgattcttctgcctcagccacccacgtagctgggacttaaggcgcacgccaccatccccagctaatttttgtaattttagtagagatggggtttcaccatgttggccaggctggtctcaaattcatggactcaagcccgccttggccttccaaagtgctgggattataggcatgagccactgagcctggccaaaatgagggttttatagtacctcgtaggcttgttacgagaattaaatgagttagtacatataaagtgcctaccctagaacctggcacacaggaagcctttaaaagatcttattatttatttattcagtagtttgcattatcatgggaatataaatatttaaattacccaatgggccaacgcatctagagctgtgctgaatcaaggccctcaaaaaaaaaaaatgcttgctggagacatcgccaagatgagactcattcagaaactgggatggaatgtcaaaaactccaattcaaggctgagcagtggctcatgcccgtaatcccagcacgctgggaggctgaggcagaactgcttgaagccagggcttgcagcttacagtgaactatgatcacaccactgcactccaatctgggcaacatagtgagaccctgtttctaaaaataattatttaaaaaaaaaaccccaaaccctcctgcaataccataaacttgttaagatctaacgcacaaaacctggagaccgaaaccacaatttaatcatgtcacttttgagctaaaacaacttcactggctctcactgccaagaaattgaatctggtcttcttagccagccagccttcctccacagatttgggttggcctttccagcctcctcctcctctagcccagggggtctttgcctcagccacactgtgctcctgctcatttttaaacacacccaccttgcacttcagtctcccctgtgcctttgctcttacccccaaagctcattcctcatacatcatttatgccctgtaaaagtagtcacctgtttttaatagactttattttttttaagagcagttttaggtttacagaaaaattttgcagcaaggacagaattcccatatattctctcccccaacagtttctcctattaacatcttgcattagtgagctacactatatacacagttataacactggtacaccccagtgttataattgatgaaccaatattgtggtactactattaacaaaagtctatagtttgcattagggtttatgctttgtggtgtacagtccaacgggtttttgacaaacgcataatgtcctacgtccatcatggcagtatcataaagaatagcttcactgccctagaattccctgtatgccacctattcatccctctttctcccggtcagtttttaagaatcagttcaaatgccctctcttctgtgaaaacatctcagttccctcagttacaattaatctgtctgatgcttgtatagcgctttttcatacttgttatagctgctatgtttgcatggtatgaaagaagtatacacggccgggcgcgcggtggctcacggctgtaatcccagcactttgggaggccgaggcaggtgtatcacctgaggtcaggagtttgagaccagcctggccaacacggtgaaaccccgtctctactaaaaatacaaaaattacctgagggtggtggcgcgcgcctgtagtcccacctattcaggaggctgaggcaggagaatctctcttgaactcaacaggcagaggttacagtgagctgaaactgcatcactgcattccagcctggacaacagagtgagcaagactccgtctcaaaaaaaaaaaaagtatacaaacttttcttctgtcattaggttgtccttgaggaaggaactgtgccatagatttgtcctgacatctagaccagacccttattcttaaccggtgccttatgaatgctggctgcactgaactgaacaatgagcaaatatggttcggctcagtcatccactagatacagtatttttccctctagacaggagctgctgtttgcaaatctcccccattccaaatctgagccagcaaaggtatcataaaacaaacttgctcagggaattttgtagaaaaggcctcaagaggcaaggctttagaccaggagttctgaaagtgacatgtgtacttgtgaatttcatacatgctccttggatgggctagtttctttggagggaaccgtcttctattcccttcagattttggatcagaagcagccataggagaggtggcccaggccagctttatattgttactagaccgtagggcgatttctcgcctctccagtctccaaaaacaaagcacaaaaaaggacaagagcctggttgttttcatcctcacggaccagacaccccctcaggaaggcctctggagagtcttctgtctggtccccagtctctctgcccaggtgccccccaacaattgaggatgactagtgtgttctctttgggtaaggagcaccttcccataaacacttatttttcttaattcacgctgagcttttactttattttcgctttaaagtcactgttctgaaacgttctaaaacgccgtaggaacatgcagataggaacaaaagcaaataaatcgaatcctgtgaagtaacaaagcagacgcccttctcctaacaggcagcacaaagctaaatgaaaaatatcagtcatccactagataaagtattttcccctttagacaggagctgccgtttgcaaatctcccccaccctaaatccaagccagcgaaggtatcaaaaaataaactactcccttcagctcccagactggaggcaacagtttcagcagcaccgtctatttccttgaacaacacgagcggtttgaaagaccttggctttgacttccctgtacctgcctccaaacacacgtgggggcggggtggggtggggggagatattgccccccatccccgttgccttccgcgacgccaggccaggcgcagggcaggggagaagatggggggcgccctggattcgcggttccagctgcaggcagttacctggggtagtgagtgctctctacagacccgggctaccccaacccccccgattccagaaagggccggagaaaagcagggggcgcctgccccgctccggagcagccagggagcccggccgagccttgacgaggatgagctcggagaccgcagcagctaccgcccgctagcacctgagctcccagggggcggggcctcctccaggtgtgcgcagaggaggccggcgcggagtcggggccggcgcgggagcccgagctgtcccccagcccagaaatgcgcggggaggagcggttcatccgcaccccagcgccgcgggagacactggcgccgcctgcctcctccgggtcccggggggagagcgcaccgtgcggcgcggagggggttaaccgggcagcccgccgctggagcgcgcttaaccctttggagcccgcaggtcagccgggccaggctggggtggcggcaccccgagtcccacgcgacggccaccccgagcgcgcaagtggtgccgggcagaaccgcgcgccgggctgcagacccgccggggcgcggcgcggcgcgggccgtgggcggctcggggcgggcggagggcgggggacggcggcgggcgcgcagcgtcgccagggcgaagccggcgtgcggcgcggcgcggcgggcgcggagcgagcgggcgggcgagcgcctccgtccccggatgtgagctccggctgcccgcggtcccgagccagcggcggcgcgggcggcggcggcgggcaccgggcaccgcggcgggcgggcagacgggcgggcatggggggagcgccgagcggccccggcggccgggccggcatcaccgcggcgtctctccgctagaggaggggacaagccagttctcctttgcagcaaaaaattacatgtatatattattaagataatatatacattggattttatttttttaaaaagtttattttgctccatttttgaaaaagagagagcttgggtggcgagcggttttttttttaaatcaattatccttattttctgttatttgtccccgtccctccccacccccctgctgaagcgagaataagggcagggaccgcggctcctacctcttggtgatccccttccccattccgcccccgcctcaacgcccagcacagtgccctgcacacagtagtcgctcaataaatgttcgtggatgatgatgatgatgatgatgaaaaaaatgcagcatcaacggcagcagcaagcggaccacgcgaacggtgagcagccagagcccgggcacccgctgccaaatccgatcctgtcatggtcctccagccccctcccccttccccgcggcgctggatgggttgagggggttggagagggtgctgccagctcggtgtcgtctacacagagaggggacatgcgtgacagccactccgcgctcccctccaggccctgaatgtcagagttaattctgcatttgtggggtgggggcggccgtggagtgtgtggagcgcggtgcagccggaggggcggcgagtcggggtgattcgggttcagtgtcctcgggctcaactttccttcaacgcccccgagcgatggcaggagggccgcaagtcttcagccggagcccccttgccagcctcttctcgccttccactcctcccccgccccctcgttgactaggaagaaggtccctggtggcatccggaaaattctaggattgcccggtttcgccctcc

SEQ ID NO: 9671 - DNA, 6000 bp, Homo sapiens
ctcttcagacttctgggtgggtttaaccgcagagggtcctaagattgcaaggtgagtgtttgaaaaactgactgcttctttgtatcaactggaaatcactctatcactaaagtactgaaattaatcaggagctgggactagtgtaagacatcaacctgcacccatggccctaggtttctagtgtgctcctgaaaatggtatcgctgttctaactatgatacacacacacacacaaatcacaaatataaagttataaaataaactcacaggctgggcgcagtggctcacgcctgtaatcccagcactttgggaggccaaggcaggaggattgcttgaggccagaagttcaatatcagcctcagtaacatagcaagaccccatttctaaacaataaaaaaagaaagaaaaaattagtcaggcatggtggtgtgcacctgtagtcccagctacttcagagggttgcttgagcccagtgagcggattgcaccactgcactccagccttggcaacaggacaacactctgtctcaaaaaaaaaaaagaaaaaagaaaaaaagaaaagcgcaaagctaaaaccaaaccacatagtgattttatcaagttcacagctggcctgagtttcatcctccctcttcttacatagcctcactcatcttgtttcttcctccataaagtgtggaatgtgatgctacatctacgacccatatattattaataacaaataaattcaagtatcatggatcaaaaaatataccaccgatcctgttgcatgtgcccaacatacggcccaacgtagggtgacagggtgatcctccctgcagccctatgaggctaacttcatcacccctgtttacagatggagctttgagagaacgacaacagtacctgtctcctctgcatccgaggctttctttgagaccccagtgtgataacaacaatgtaaaaatcaatgcaagtacccaggagacaaggcacagggaccacagccatgaacagaacacatgtatgtgacctcaaggggtttctcctaggaaccaggaggagtgggattaacgctgagttaacacctagcctgagtctgcgggctttcctgggccagcccctcctactagagcagagaaaatgtgttttgtagccctgctgggaacagtggggtgcaagccctcagtgtggcttcagggtctttccctcaaagcaggcattaaaattgaccctgccaagcttaaccagctggagcagaacatggggttgagggagcaccgaggccaggagtgctcccaacagttcctctcccagctccggctcaccaccaggggccctgggagacagccagtatgtgccagaaacggctcactcttcacgagacaatgaatccactgttgaccagccagggccttgattaatatttgcaaaagaacgaactggaaaattccacctgtgtgggtggaggctggacccgcaggacttgtcaacaaccctgatggccttgttctcccagggatggatcaggcaaagaagcaaaggtcggaataacaatgacagaatctggggattaccgtgactcttgggtcctagggaatttccccccccaccttttttttttttttttggttctgcctctcctgcccctaaatttacacagcactcttaaatccttcaacttgctttcctatctgctgttttgctgtttcttctgcgtttcctaacagccctgctggggaggcagaactgatgtcagccccatgttacagatggagaaacaggttccaaaagactaagagcctcactcaaggccaacagatggtgaatgagccgcagaaccaggtggtctggaagccaggcatctcaccgcgctgtggctgcacagagtctgtgcagaccctagggtctgggtcagggccataggtacttgacccagtgatcttccaggctctggcagaggccctgacctttgctctgcttgtgaagaaagaggaggaagttcaaaccagctcccctgggtgggcaggctcaggcactggccttggatgaaggtaggtgttaatttattcatccattcaagcatttaatgagcaccccctacaaagcccccccggacaggaaggcacactggctggtagctctttcagaaacccagacctagcagaatttatgactgaagggagaaggtcagaaaatgtccaaaggtcgcttctctcatagactcaaatcacttcatcgcccctatcaccaccccattttacagaaaaggaaactgctctgagaagagcagtgacttgccagagcctccagttcaaaaagccacaaagtcatcaggcttaggcagccaaataaattgtgtgccttccggcaggccacctgggacctctcatgcagggccacttgaggcatggccttctgagctaggggggaaaacccccgaggggacaggcagacacacctgtttgcccacctcaacctccagttgtggctacagggcccttcacaccctctcctccactccacagccccaactacgaaactgaaccaggtatcaccccatccctaagccccagggggccagggcagtgtcattctgaacccagaacagcaggaaagccacttggcctgggtcttgggtctctgcctggcagcccctgcctgagtactcctccttcttacagctcagccacctccagaccaccctcacctgacacttcttcccctggggggagaaagaacctcagcccttctctttttacaaaaccccctcccctatccttttgccaaggcttcctgtgactgccaccaaccagcctcagtgcccttggtctctctgccccatctgaccccatgagctcctccctcactactgggctttcctgctgcagccccttagacctccccacctcctcaggcaagctctcctccccagggctctatcctcctctcctctccactgccccctgagaaagtctgactcatgaaccctgtctccaggcctaacctccgcaccctggttgtctcaaagcctgtgtgccgaacaacaccaagctcacagcagggcctgccctggcacacaactgaaaagccagcacagcccagagcctggcccacagcacagaatcagatactcacggaatgaacgcatgttagtgaatggctgcctgctcgctcgtctcagagggactagccctctattttgccctgcagagccaaccaggtggcctttctaaaaccaaaaatggatgaccatttaagcctgtaccattgttcctcagcaccatgggacaaagttcacaatcttgagcttgcagacgaggctgttttcatctgggcttccgcagcaaggcgggtacttgtgtccttgaaaataattctcactgcactcatcctcactccaggagtacccatcagccagcacccatgtgtggttcacctttgcacccagcaggtatttgctgaacaggaagatgactattagagctgaaaatgttctcaagggccacagggcccaaagcaactcagagaggtggaatgaggggctcagggtggcccagtcccaggcaggggtgcggccacaacctcaactgagttccttggtcaggaaacagagcaattctctgaaaatgctacctgcaactccacacgtatgcatgccagagcccaaacccctggctgatccccagtccatgcaagccttaatcaagctggcaggtgggccaggcctggcacacaagtagggcctcagctaaaacagctgcttgacttagtacagcctctcaccagctgacaacacacccctaagttccatacccctctctaggcctccgtcttctcatctgtagaatggagctaattctgcctacaagtttaaatggccctgagttggtcaccacaaccctgtcgtttgcaaaccgagggggctgaagcagcagttccagcctctgtgactccactgttagcccagctgatttttgtgaactttcccccaaacccactgtgtctcaaaggatggtccctgggccacccacccacgaattacgggggcgtgggtggaggctcgttaaatgcagatcccgggcctgacccggacctgccgtctggatctcattttaggcggcgctagagatcccgggccagggaaacttgagaaccgcagctccaaatcgccagtgctgacggcttccgctttgggagccccaggtgttgctgtccgaactcacttggtggaaacagacatttaccagaaagcctggggtcgggcagcgggcactcctaccgctctaaccccgcgtagctgaaagaattcgctccctcaaaggagtcagtgagcttcggcagtctgcgttccacccgtttcgcttcgcgcggcggggcgattgtgtaaagcgggcccgggtctcggcgtccagcccggccccaaacctccggcccccaggcctctccgggctagcggccgggcggcgctgctgcggggtggtcggggcgcctccgcggctactcacccggggcgactcggccgagagcccgacagtcgggaccggagcgggaggagcgggtggccgcggcccggcccctgccccgcggcactttaaccggcggcgccggcgccccgcgcgctctctgcgtccggaatggggacgcagcagttccgacccggtcggccccggagccgcgaggctagctgggctccagcggaggcgcgcgaagcccgagggcgggtgcagctgatgcacctggctcactgcatgcacgtgtgcgcgggggtaggcgcgcgccgcggcggcccgtgctccgccagcgctcggacacggcccatccctccgagccccagcaggcgagggcgctgcgacctgccccagcctgggagggggccagcgggcccgccctctgttcgggtggcgggaatgggtcggcgctgcgagaggcggagccgagaaggggcggcccggcggcgccgggataaaagcgcagcgtgcgggtggcctggatcccgcgcagtggcccggcgatgtcgctcgtgctgctaagcctggccgcgctgtgcaggagcgccgtaccccgagagccggtaagcccccgccagcacctcttccctcatctcccggccctcgagcccagatcctgacgtcgtctgatccgccagtccaggctgccccgaaggcgtgcgcggactgccggctcaaggggcatgcctgcaccctcagggcagccccggacatcggcgtcaggttgcttgagtcaggggcgtgggaatcagacagacccggtctcagatgccaccctgtactgttggttctgtcatttatgctcaccaagttccaagtcccgaacggtaaaacgaagggcagtaccgaacccaccagggtctcttaaggtataacgacatggcctgcaattagcggcgaagggcctggcacgtagttattgttacttggggtctgctcacctgttggggcacaagaactgtttctccattagtaccccctccctttttggccatattgattgccatgttcactcgtgaaggcagttgcctttcttccccagtaccctgaatgatcgagggaatcttctgggtcactgaagagaaaatagctcatcccccaaataacctttgaaatgataccgctgccctcttagaatagcatatagcatcaagctccgtagtcacctgctggtggacaaaccccattcactgtttcctgatgtcttcagctcctatccttcccctctgtgtcagttcagaagccctcttggctctttgcactaaagggaagaattcatcccttttgctgtagttgctgcaaggccaacaatttgagcttggtagcatttagggttgttgcttggcctctcaccggccgtttgataagaactcagctcctggtatgatggctcatttgttaaaaaaaaaaaaaaaaagtcaagtctggccgggctcggtggctcacgcctgtaatcccagcactttgggaggctgaggcggccggattgcctgaggtcaggagtttgggaa

SEQ ID NO: 9672 - DNA, 6000 bp, Homo sapiens
gaaattttttttttttttttttgaaacggagtttcgctcttgttgcccaggctggagtgcaatggcacagtctcggctcaccacaacctccaccacccaggttcaagcaattctcctgcctcagcctcctgagtagctgggattataggcacccaccaccacgcccggctaaatttgtatttttagtagagacaaggtttctccatgttggtcagtctggtctcgaactcccgacctcaggtgatgcccgccttggcctcccaaagtgctgagattacaggcgtgagccactgcacccagccagcttgtttgttgttgttgttgttttgttttgttttgttgttgttgtttttgtgttttttttttttttgagacagagtcttgttctgtcgcccaggctagagtgcagtggtgcgatctcggctcaccacaacctccaccacccgggttcaagcgattctcctgcgtcagcctaccgagtagctgggattacaggcacccaccaccacgactggctaaatttgtgtttttagtagagacagggtttctccacgttggtcaggctggtctcaaactcccgacctcaggtgatccgcccgcctgggcctcccaaagtgctgggattacaggcatgagctaccgcgcccggccatcttgtttttgttgttgttgttattgttgttttgcttttcggtttttggttcttttttttttttttttttttttttttttttgagacagagtcttgctctgtcgcccaggctggagtgcagtggtgcgatcttggctcactgtaaactctgcctcccagattcaagcgattcttctgcctcagcctcctgagtagctgggattacaggcgtgcatcaccatgcccagctaatttttgtatttttagtagagacggggtttcaccatgttggtcaggctggtctcgaactcctgacctcgtgatccacccaccttggcctcccaaagtgctggaattacaggcatgagccaatgcgcccaagaagcagaaacttttttaaagatataatttttttttttttttgagatggagtctcgctctgttgcccaggctggagtgcagtggcatgatctcagctcactgcaacctctgccacccaggttgaagcaattctcctgcctcagcctcctgagtagctgggattacaggtgcccgccacctggctaatttttgtatttttagtagaaccgggttttcaccatgttggccaggctggtctcgaactcctgacctcaggttatctacccactttggcctcccaatgtgctgggattacaggcatgagccactgcacccagcttaaaagtataatttttgaagttttatggatgaagcaagataaagatggtattttttaaaggagcaaaatgcaaatagaatttttgaaagctaaaaatatgataccagatttttaaaaactgtaggaagattgaggagaaggtagaggaaatgtcccagaaaatataagaaaaaggcaagaggtttttttttttttcaagagggaaaattaaagaaaatttgaggtttaatcctagagatctaatatattaataatgaattccagagggggagaataagggggagagagagaatggaataatttaccaattaagtagaatacaagataattccccagaagtgacagatacgagcttataaactgaaaaaaaaaatgcaccgagtacttagcacaatatattttaaatgaccacacactaagccagacacagaatgtcatgtgttatattgttttatttatatgaaatatctagaacgggtaaatccatagagatagcaagcagatgtgggactgccagggaccggtgaggtggaggtggggaataaatgcttaatgggtatagggtttttgttgggtaatgaaaatgttttggaactaggcacaacatagtgaatatactaaattctacagcattgttcatatagttgttttatgttatgtgaatttcacctcatttaaggaaaaaaaagagaaaaaagagactacacactgaggaatatgaaatttaagagcaccaggaataaagagaagattccgaaaccttctagagagaaacaaaggatatcatatagtcataataagctaaatttataatatagtaataaataagccatgagatttttttttttttttttgagtttcactcttgttgcccaggctgaagtgcaatggtgtcatctcagctcacctcaatctccgcttcctgggttcaaacggttctcctgcctcagcctcctgagtagctgggattacagacatgcgccaccacatccagctaattttggggtttctccatgttggtcaggctggtctcgaactcctgacctcaggtgatccgccaacctcggcctcccaaagtgctggcattacaggcatgagccaccatgcccagccaagccatgaaatcttaatggctcaactaaacaaacatttatttctcattcacactacatgtccatggtgaggaagaccactctgctccatattgtcactcagagatctagacagatggagtctttactatcttatgatgttgctgtctcaacacacagcttctagagttcctgtggtgggataaggtgtaaaaaacttaaactttctcttaaatgctttggccctggctagcatcagtcctatgaatcttcctcagtgctagggagttgggatgtgcagtcctccctgatgcccaaacagaacaggcaaaccagatattactgagtgcaagaaatccctactatgtgtactgaggaacaggattcaagctgtattagactcaccttctggttggaagctagaagacagtggaataatgctttcaaaattctgatgcaaaagtatttcctgtagatttgtgtatctagtcaaagcatcaatcacatgtgaaggtagaatgctaacattttcagagaagcaaaatcacaaagtatttaccttctgtccaccccttttcaggaaattataagaggatatgttataagaaaacagaaagaggaaggtggggatatatgatgtgataaattacttggtgtgtttgacaatattgaaagttgtatggttctgtgagaacttgggctatgtttgagatatataaaaattaataaaacaaaaaaatgaagcattataaattctgagtataccgaaggccatacaagaaaggaaatataattatagcatactatatgactcattatataaaataatttttcaatataaatactgattataggccaggcgcagtggctcatgcctgtaatcctagcactttgggaggctgaggcgggtggaggtcaagagatcaagatcatcctggccaacatggtgaaaccccgtctctactaaaaatacaaaaattagctgggtgtggtggtgcgcactcatagtcccagctacttgggaggccgaggcaggagaatcatttgaacccgggaggcagaggttgcagtgagctgagattgtgtcactgcactccagcctggtgacagagtgagactgtctcaaaaaaaaaaaaatagtgattatagattgacaaaatgcaactcttgaggatggtagtagaaaatggcaaaatttaaccgtgtaaaatagattctcaataaatatctaaaatggaaaaataaaatcaatgtattatttagaaatataaatgtaagtatcagaagaaatggctaaaagttgtaggaagtgaattttaggaatggagtgaagtaggacagaggacaggtaggacagcttacattatacatcttaatcaaaatctgttactttctgtttttttttctttttttctgtttttttttgagatggaatctcgctctgtcatacagtggcgccatctctgctcactgcaagctccgcctcctgggttcacaccattctcctgcctcagcctcccgagtagctgggactacaggcacccgccaccatgcccagctaattttttgtgtttccagtagagacagggtttcatcatgttagccaggatggtctctgtctcctgacctcgtgatccacccgccttggcctcccaaagtgctgggattacaggcgtgagccactgcgcacggcccctctttctgattttaaaaagtcagagacaaagtgccacatactgcaaagagcctatgagaaatgaaaattaagaaaaggagccatgggcattgggagactagaggctataatgatattggagcagtttcaatggttgagtggtggatgtagaccaagttgcagttggttgtaaagcaagagaatagaaaattttcttcacatatattacaaatgaataaattgaaggagaccaactgacatacaggagtaaataaggggacacagaatagatatatcctcttcaatgaaacgtggaatatgaaaatatgactttaaattataaaaaagtagcattatacatttacagaaaatcccccataaaacaaaacaaaatttttttatttctttgaatagcttttctaaaatgattcatttactgaaatacattatataggcatctctgctgaattatgtcagcagagaacagtaaactatcgatataacttaatttttattacttcttcatttgaataaataccttttcataaatcttttattttaacttaatagccttgatctaaagaggattgctttatttcttctgagccctttttataaaaatatctaggcttttaaaataaggtgaaaataaaaggcaaattgtctgcctgcccctagttttctgcattaacgtgattgctccgtcatagttccagttctcttagttccccttccagattcaagtttttattcaagcttggtcataggagtaatgttatcatctttaaatttggtcatggaatgtgttacactgcccagctcagggaaatgctgctcagtttgggcttggatggtaacgtttattttccttggcagagaagctgatcgtcgaagggcatctaaccaaagcggtagaagaaacaaagctttcaaaaggtttgttttctgtttttctatgttttttgacagttcttttggataatgaaggttagtgtatattttcaaggttatagtattttaaccatcagtttacttcttatagctcacaaaatagcaagccagtaacagtatcagataatatataaaataatcagacttctgttttaagaagggtatcgtaactggaatgtgtctttttaagtggatgtatatttatggttttttgaatgttagtacttgatataggtttctttaggtattaaagatttgttgcaatctctgtcattcccagcattaatttcagctttgatctcaaattttaatcaaacacaatgtaagtcgtttgtgatacaacttaagtgaaacatgcttgcacttctattttgggggttacagtacctttaaaatctcttatgatgtttaatatttccttaatttttggcatctcagtttgatttaaacaaaattaatgacttttgtgaatgtagaatcttcttatattttatgagtagtccagtaattgcccaaagtagtttattgtgttaattctgttacagttgtcagagaagaaaagtgagttttaaagcaccatattgtcaagtcacttttatacatagggaaattaggcaaataaatttggtggcatgtgtttatcatagtagaactttcattagactataccagtataaaatttaaaactagattcacagtccttttggccaattaaaacattgagttacaaaagtttgagatacttaattttagtacattctattttattaaagtaactggattcatttgacttttttaaccatgtaagaggatggtgttatttcaaatatctcgtggtttccattctgaattttgtgcacggcagatgccatatttggggaaaaaatgcatagaatatgcatcattaatattgttttggcaaacaggcattgagtttcagaacagtgaacta

SEQ ID NO: 9673 - DNA, 6000 bp, Homo sapiens
tgaccagtcaaatgaaatggaagtaatttcacacaactactaagtctaggtctccaggtgccttgcaattttcactctcactctcctacctgagatctttttgtaaataagtctgagacaggctgctatagagattagtgggtgaggtctgagatgctccaaccaacagccagcacgaattgccaggcatttgagtcagggaatcttagactacgaagccccagctgagcatctggattctggtgctatagatgcatgagtgacctcacacagaaccaacagaagaactactcagctgagcccaccccaaacttctgtcctactgttttaagctactacgttttgaagtgatttgttacacaacaataaatgattgatacagaagaatgttaaaagcttgagtcttctgttgtttacagtctgaattgcctcaactaaatcacttaattctaacagcccctgcttccttttttgtaaaatgtagatattttactcatctgtcaccactggttccaggtttcaggttttcagttttaatgaataaaaacgtaagggataggaataagaggaaattattagctcaagtaactgacaagtcaaggagttggtttggcttcaggtatgacttgattcaaggactcaaatgaaggtatcagggatttgttggcccccacctctgtattctttttttcttcttgtgtcagattctcagatgggcttgccccaagtgagggccctccttgcagtatgaggtttaagttgatctggcctggcaaacctaaaaggaagtttgactttcattggacctactagaaatatgtgcccatccctagaccagtctggtcagagggatgaaatgctccatttggtcaggactagggcacgtgtccacctaacccagtgaagtggagaggtggaggtagggataggggaagaaagggttaggctcaccaagaccatctggggagactggcacaaaggaaaactgggacactattactagaagaaaagaaatggacgctgagcaggtagaaaataacagatgttcacttcttattacataggctgggtaaacagataacagtaatagcttatacttattaaatgcttattaggttcccagcactgatctgaatagtttatgtatattaattcctcttattcttctctatttaggaagatgtatggttattatagtattcctactttacaaatgaggaagccaaggcataaagtgattaagttgcctatggtcatgcatatatgagtagcatcagaatctaactagactggcttgaaagctactgcctttaacctccagtctatattcaaaataggtcaccagcactatggtaggcaggattctaacatggtccccaagatccccaacccttggcatataattccttcttcttgaaagtgggtgggacctgtgaacatgacaggatagccactcccttgactaggttacattatatgacaaaagtgatgaaacggtcactctctagactcctgtaggaggattctcctgctgactttcaaggagtaagctgccatgttgtgagggcgccgtgtggcttagaccactagttgaaagcagcccttggccaacagccatcaagaaaatagtaatctcagtcctacaaccacaaggatctgaattctgtcaataacctgaatgtgcttgaaggaggagcccaagctccagatgagaaagcctggcccatcccttgatttcagcctgatgagcccttgagcagaggacccagccatactgtgccccagcttctcacctctaaaagtgacaggcaatgagtatatatttttttaagctgctaaatttgagggtcatttgttactaacgtcagcatcttctctttgtagcctttttatcttccatcagggtagctaggctctccctcctttggcactcccagggcttttcacaccaacttgctcactgttatcatagagctcccatatcacctgggttaggattgtaattaccaggtaggagcatggcagggctactgctaggtcattattgtgtgactagcacttgaaagtgtctattatatatgaatcgctctgtaattggttgcagaataaatgaaaaggcatctgtgatgtatgtttgcaaaattttatcttttgtaggaactggtggggcctggattgtgcttccaagggtagtttgggggtaaccttcagcctggggtcctaggacagtcaccagtccataccgaattggatgtgaagttttagcatggggcctcctacactactaaggtagtggtaattcactctgcaaacccatatgaggttttccccgactctgaagctctttttttacattccacattttggtgccttctcaagccattattctgttgccttgaatcacagctgtggaggcaaacaggcctgggttgagaatctcagctctgctgcccactagctgaggatccatcattgtactcttctgagcatgtttccttgtctattaaatggggaaaataattctcacagctggcagtattttaagaactccatgagagaacggagcatggacttaggaaggtatgctcccataaggcatgggggcttgccctttttgttcgaggctgtgttcccagtgtgtccctcaaacagtaggtgctcaatacatttgttgaatgagcaagcagtttatggcatgaattcagcacaatgcctggtagacagtaagcattccacaaaggacagcttttactgtccatttcacagaggaggaaacctcacctgaggacgctgacacaagtatttgacgagtttttcctattttatcactcgacattaagaaggtagtcagggatgctggggtaatctaacttgaggaacgaatatccctcattacaacacttccaagaaaaatggccctcgcaatcctttataaagaagtcaggattccaataaaaccaggaaggaccacattccaaagcaaacaaactcgcctcattccccaccctgggggagggtgttcacccccgttctgctaaagatagagctagggccctccccaggaacttcctggcttttattagtttgtaatcccatacgtaacttttcaaaggtttttcttttggaagtgtgggtgtgaaaatgcttccttaatcacatcgaacgggaggatctccgaccatctgtactttatttgaaaacctagcatccggttgggatgtttgggtgggtggaggaccctgccgtgttgggatgaaacagcagggacacgtttaaaacacaagaaccatgcgcggtggctcacgcctgtaatctcagcactttgggaggctgaggcaggcggatcacaaggtcaggagttcgagaccagccttgccaaaacggtgaaaccccgcctctacaaaaaaaaccaaaataaaacaaaaaacaaacaaaaaaaaccaccaaaaaaataatcagccgggcgtggtggcgggcgcctgtagtcccagctactcgggaggctgaggcaggagaatcgcccgaacccgggaggcgaaggttgtagtgagccgaaatcgagccactgtactccagcctgggcgacggagcgagactccgtctcaaaacaaaacaaaacaatcccacgtcaagatcgctttgaaacacaggcagaaaaattaggcaaaaaatgtcaaacggctaattaccttggctcagttacacatttactcgaaagcccgcctcccccacttttagccccagcgttaagaatgtaaaatagggcgcttagaagtctaagcgataaagatcttcttaccgagagccaagggacaaaactcattacagataagcctagtcctcccatttcccccggacgcctctccccgattgctaaagaagcagccgctccccgggtagctgccaggaaatcagtccggccccgcggcgctgctttcaccctgcagggtgtaagaggcgcacttcctgcgccctccccgcggccaaaccggggtgcgggaaccttctccagagaagctgcgagttggggaaactccgccaccgatccatcgtggcgccgggaaaggggatgcggggctcggaagggctagatttcgcaatcctgggatcgacattcctcccctcccccactttccccagccttggactgggccaatgaaagcccgaaaaagaaaaaaaaaaaaaattaaatctcaatgtagccggagtgcaaaggccgctcggctttgtttcccggcgggggaatgcgctgtgttggaggcgcgaacaggagccgcagacggtgagcctcaccgctgcaaatgccagggcagtgaagccgaacagaaaaccccatcgctttaaaaaggcagctgtccgccctccccctttcccctcgccagggcgaggggcccctcaagtccgggatccgcgagctgcgcggaggatctcgccaaacccgagcaccgtgcggcgtcttttaagagctcgaacaacgggaatccagcaaaaaacaagccggccccagaaggcagcctccctcctctctccgcgcacgggctacaatcgcccccagtccccaaactgtcccagtagaggccgcgcggagagagcagagccgagggacccagcgcaaggcgggagccaagcgcggctgctttaagaacgcggagagcgcgcgcccgccgccagctggcccgggctgcgcgcccccgccgccaccgcgcgccccctgttcgctcgctccttcgctcgccggctttaaagtctctgccaggatccatgctcacatgttacttcctgtatggaggcatggccagtttccagccccgcgctcttcgttccttcccagcctgcgccggagccacaactttcaggagcatggactgaaggcgccctcgccccagcgcccctctgagatcctttgtgttttcctccgtttcctccggccgtttctattttggggggctctccgctccccctgcctctcccctccccttcccctctcgcaaacatgcctccttccttcccggggccctggaaggagctgcctgcctgaagcccggagacgccgcgccgcgctcagccccgccgccgcccgccggctctcgggctgtgctgcgctgccgactcaagttggggatcctcggctgctcgccgccgccgcccgcggtccctgcctgccccaggcccggggcatcgccgccggccgccgactccgcgccctgcccgatcggctctctcctttttaaacggaaagcagcctttctccgccgagaggatcgtccccagcgtggctctgcgttcccggtcactttttgagattttccggggggcgctcggcggcttcccggattccaaggggactcgggccgccgagcgcggggggcccgtggagcgggcgagccggggaagcgccccggcttagcggaggctcgcacggaggcaagaacttattcaacaagtttacctccctgctttcctcttttcgatgtgcgttttcggacatgcggaggttactggaaccgtgttggtggattttgttcctgaaaatcaccagttccgtgctccattatgtcgtgtgcttccccggtgagtgccggccgccgaggggatgcggccccggccggcgcgcgttggggatgcggagttgtcgcctgggcgcggagctccggcgcccgtccgggagaccctggagagggtggagggtggcccggcgcccggataggagaaaaggattgctccgctggcttggatgatgtttagggaggcaggctagtggtcgaggaaggtggaggcaggggctggccggggagggggctgggggacgcgggggtctgctcccgctcccttttgggggtcctggggagctggaatcgggagaaagggggacttgctttgctgactcgtcgccgatcgggagaactcgagttgtggggcggttggggagactgaggccatggaaaggatgcttctgtgggtttggggggcccgggatgagccccctcgctctggcgggta

SEQ ID NO: 9674 - DNA, 6000 bp, Homo sapiens
taccttatgctccagtaccacaggcctgagctactgtacctctcagcttcagtttagaattctttcagacagatttgaagcctactgaggaaagctaatgatctaataaatcttcaagtgatattaatattatttttatctcgttagtatttgaaaaagaatagagacagtgttggagaaaacaactttctcttacaaggaaaataaaagataagaggtctagaaagttctgctctgattctatatacctgctcacatcacaatacattgcattttacccatgctaggagctgtgctcagtcagagaaaggaaggcaccattaaagatttcaaggttgttccataagtgaattggatgtaagtgctctcactgctatagcttgaaagagctgaaattgttcctgaagcaaaatggaagaggcttggctaactctcttggtcatttattagtatggccaaagtagccttatctttgattgcctcctttctcctactgcaatgaagaaatcctctggctctggattttcctctctgtgtttgctaaatgcttagaaagctaggcctcccactggccagcagacaggcctgaaaggaccccttttgagaggccagatgtttagaaatagaagctataaggcaaaggaactgttgcatttaccagaaggtgtgtccaccaaaggggagagaagcttttccattcagaggaaaaaaaaattcttttgaagttgtctgaaggccattgctcaactgaaagatcacagttgaagctctgaccatattagaaattagcattgctaatgaggtttttagagaatcacagattattttaatctacttaaccttctctataaatacttgacttagaaaacattgtacttctatttctgataatctaataatggataaatgttattttaaaggcagtagcaacaatgtgaatatcatttttcaaacaagaactatcaaatattggcatatcactttatttttgtcagttccaattctatgatagagagtggtagccgactgtctgagctatctgataaattggaaggttaggacagtctaagtggctagctgacaagattatttctctaatgacaaatatatgggcaagtatcaaaaaatcagctactgtatgtgggcctagctaagcaaaaccctgggaacccaagcttctaaaaaagcaactgatcaatatagtttacaaaaggagctttccaccatcttttacatgccttccaattaaatcaatatgacactgaaatttgcaacccttccagaatgttctttgaatgaagaggtaaaaataatctgtatctgctatgaatatgaatgaatcaattgcccttattcatctgttctgtatttcaaggctaacctcctttgaaaaaattaggtttcttcaccaccatctcaaacctaaattgttctcaagttgattcactgatttcatcattcattcatttatccaccaaatctttattgaacacctactatgtggcaggtactctctgaaacaccaaggatatggtattaagcaaaacaaacaagtttcctgcttttgtggacgtcttagtaaatggagatagtcaataataaatgaacaaataaataagcaagaaggtatcaggcaataaagtgcaaaaactaaaaagaggaattactggagaaagtgaaagatgtttttaggttaggtggttggggaagaaagaccctctaagaaacagaaagtagaactaacaactgagtggcaaaggaagagagggcaggaaaagatctgaggaaagaatgttccaagcaggcagaatagctagcgcaaaggcatggaaggtgagtgtggctgaagagtaggaaaggagagggttgaaattaaataaaacaaaaagatagatgagaggtagactgcataacactttaaatgcatgggaaagggtttgggttttacttactgtaaacttactggacaactattgaacttttctcagatgagtgatatgatctaatttatgctttaaatggctcaacatgggtaatagagatttctaggggtaagagtgaaagcagtgagacctaaagggagcctgttgcagtggtccacagggaggtgacagaagggtggtagcaggggagacttagaaaatgttaatgctctatctggaaaaaaatacgaggcagaaagagctaacccaaccagcagattagaatctgcctattagccttagaaccttatttagtgaaagttgacccagaaagccctttagagataattcagtagaaacccttcaatttaaacttgagaaaaacagagacgtggacaaattctgggacacagccagggtcacagagcaaaccgctagcaaacccaagactgagcctcatacctcctatcttcccaaatgttaaagtgcccaaggccatacagaaaccagcagggcctgagcgtggatttcatgggctctttctacaccagcaagttccaatctctggtgcaaatctgcataatggggacagccgagaagttactgcagggtccatgcatccaaatgtggatttgtcataccctgtacactgaataaacaaaagtataagtgccatcacgttgcatccaaagcagagtggttaatagcttagacaatggcatacaattaggctcaaattttagctttaccaggtattgactctgtactttcagataagttacttaactctttgggtcttggttttttcacctataccctggaataaaaattgtaactcgtagttttgtaaggctcaaataaaatgatataccaaaaacacccacatagaatagtatctggcaaggagtaaatattcaagaaatcttcactattattatgtagaagacagaacttttttccttttacttgcaatgggactcttaatattcagagccaatgagaattactcactgggctccgtgaagaaacaattaagtatggttctaccctacaggtgcattgctggaaactgctgcctctttgaccctactctgactctgccccttatcagccacctggaggaactgtggccttcagcacagagacactattctttcagtcaatccttcatttatttattctgtaaatgtttactgagtgctcacttaaatgccgggtgattctaaggctttttttccctgcttcagatgtgttcacttgcttaatttactcccctgagtaacttctctcattgaagtgcagagatttgtcaataagcaggtgaggggtggccacaggggagtggggaggaaaaggttcctatcagaatttcaaaggggccatggggcatgtacagtttgaagaattggtaagcaccccaaaagctcaggcataggcaacaagcggatcgaaagagatggaggagagagggagctggactccctgagcccagtttgcaggtgtgtagtgtaggtgaaagcactgccttgcccgttgttcatttcttccccacaccttcccactcacagctctatgaggcataagtgtagccattttacaaaggggaaaccaaggctcaggcgcaggccacatgactagtaagtgggagaccaggactagaacccaagttgcctgactcctcgttatggttttttggttggttggtttggtcccccaacctccccctatccaccaagttgttactgtgtgtataagaaaaggaagaaagggagtaagagagatgatggtggtggctatgatatggtagtgatagtgtgtgtgtgtgtgtgtgtgtgcacgcatgaaagagagagagagaaggagacagagatacaaagagacagagataggaaggaaagcgagagagagagagacagagagagggacctcaaaaaaagactttggacaactccaaattaacaacaaattaatacctataaaaaatgtggccagcctatgtgcatttcaacattcccgcaccgagtggggacccaaagtagggggcgggaaggagaggcacacagacttcctctccctgtgctgcggtatctgccttggggaaacattgtccacgatgccagtgtgagaacatgtcacctgtggcagcctctccaagaatttgatacaaatgcccccaacacacattgcctcaaggtgctatgatttcggcccttcgaagtagtcgagctgaactccttcctacagaggtttatttgaagaagaaagcagatccatgtcgcacttaagcctctgaaaccattttaattttgaggttttgcaggagacgtctttaagtaacactcctgtgacgagtgagcaaccaagttgtaatctgtcccttctacagttgccagagccttaaaagcctgtcttccagtacatcaccttaatgattatttatggacagtgtacgagtttcccaaatggggattatgcataacagctatgcatttacattaaaatgagggcaatttatttaacaaacataacaacatttacttaatctatgcaaatctattcgtaagattttataaaaccaccatttttccccatacccttaaaacacaaaattctggctttaaaaaaatctcctagtttgtttttaagcactgtgcttgcaggaggagggggctggcagagtaaaggggagatggtgcctctgttggtgatgcagcctgctcgtgcaaagcagtcctgcacttccagttgtgagccaagagccaagtgtgggagctcaccatggtggcagccacctccccaccaagcaggcagcgttcaccagaggggagtatcaggttcctgtactcagctgtgggttgtcactgtctaataatatgaccgttttgccatctctctgcaaatgaggctgaagctgctatctgattggtataacatctcactttccctctgcattgattttcttcttctcctcctttgcttcataaaaagagggacaagtggctggtgctgtggacagagaagctttatttttagtatgagacaacctctattttctttcaggagagggaagttggattatcaattcttttgtaaatgtgtatggtgatatttgctccggtaagtttacagctatcttgatttacagctggctgtggggatatgtgtgtgcatgtatgtgtctccataggcacatttggattgtacacttttctttccaagtatcagtttttaagtctctagtaataatctctatttttcttgactttgctttcttgtaatttgtatgtttaaaccaaagaggctgtgttgatactgaaatgcttactttagctgtttaagtatgtgctgggtttctttgaacatagtaaggaaactatttaagcaaacttatatttgctttataaaactgtaatgtcattctaccctacccctccttccttggagtgtttaatatcctaaatacattcattgtgctgcaacctgcttaccattttaattaaagtttcttcatcagtgtcagagtgaaaattacttaaactccatatacagctaccaaatattatatgttgtgctgaaaggtgctagttttataaggtcttatagcagtatgtagaaagaatgagtttcccctacgattggatgcatgcacctttaaaaggactgaatttagaaaaagtattcagatcactaaatgaagtcctagcatgccatgaaaagctacaatcacaagtggctgttgcttctctttcgtctttctttgcactgtgtatttctgccaccatctgtcagatgcccagtccgggctcctgtgtttctatatgtgaagctaatcaggagaaaagttgctgttattaaatttaactactgcaaaatgactgtccggtcaccgttgctggaaatgatttttaaatgcattacctggttagctgcgttctttttgttcgagagtaaaagatgctctgaattcttcattgttaattcagaagtctggggaaaagtattttaatataattattctagacagggatgagaagatgattaaataattgctttaatggaaacaaactgatgctttaat

SEQ ID NO: 9675 - DNA, 6000 bp, Homo sapiens
cggagagggccccggcctcccggcagcactaacttctcagccagcagctcctctattctccttcttttcttctccctaaaagagagaataaaagaagggtcagcatcgcgctacacactgggcgccgcgaggggaggggggcgaggggacggggcggggggtgtggggaccccgggtggcggcggcaaccgcccaccgccgcgctctctcacaacccagcccagcccggcgcgtctgcagagccccggtacttacggctcctcgccatccgccatattgttctccgcctcttcccaggtgcccacgcgcggcagggcggggaggagcgggactggcaaagcggggaggggcggggctggcgaagcggggaggggcgaggccagaaacacaaccggcagggaggtgcgaggttgactgcggctgggctcccatgggctttaaagtcttgccctgtaattataatcttaattacctacgcttaattaggtgaatcttataccgtgcataatgttgctctgcagcgtgaaaatgtagacaatacattatgcgtttacacaaactatatgttaatacgtaattatacaaaatattggtatattctatgaaaaattcgtgaagaaccctcccagtatgccagagctttcctctgggggcaaagatcaaggaaattttcactttctgcttttcaggatggttccaaagtctttgcctttataagtactcacttgaataataaatttatctaaatccgtttacattggtggggtgggagattattattttctttgaacaaatcagcattaatattttcatgtcacattctgttagataagttcagcggaaacaaaatgattaaaacttttcctgagataaatgtgtatatttagatacaaagaaaaaagtataaaggaaaacaatcacaaaaatcaaagaataactgagaacacccataatcctatcacctaaagataaattgtgataaaagtttcaattattttcttctagagtcagaaatacaaatatacactgtgaatctggatggctggatagagggaaatgatcatgttcaaaaatgtatgtatatacacgtacacacacatctccttctatggagtgggacaagaatgatatttggaatcaaaagtaactgattttaaattcttctcagttgtgagctacgaaacccttagacacttctatttcttcatttataaagtgggcataacactattcaccttgtaagactgataattaagtaaaatccagagtggctctcaaaatacagttcctgatcaacatcacttgggaagttttttttaacacaaattttcacccctcaccgcccccaccacgctccccaccgcccccccgccaccccacccttcagccttctgcaaagcctggggtgattctccactggtaaagtttgagggccactgaaatggagtacataaagcctgatgggtactcagtaaatgtagctgctgttactacactgtgatatttaacctcctcttgtcctagttttcagtgaaccttaaggaaagcttgtcctttatggtcccccaattaggttcagttcaatagcattcactgagctgaaagtcaatgccaggcagtgagcgtgggaatagagttcacagtccctatcaagagataccagcctccttctgcatcacatgtctcagcgtcaactatgaaactactttttcttgcccagacaactccacagatggtttcactgaggatttaacctcagtgcttatcaaaatgggctcctgtagcctgaacccccaacaatactggataccctttgattagtggtagtgagcattgcaaccctctcagatagtgaaaagcagcagtcaccttaaaggccacctagtccagtctcacccatttcacaggggaggaaactgaggcctagggatagagtacagctagccgatgaagaagtctgcaaaggtatctggccctgcatctgcttgctttgagactaacagcctgactcaccatggtggtattttgataaacgacaccaggcactctcactggcttagattgattgacggattagaaatagccatctgcccttgccaggaatgaaagcaacagagacatgcaagcaaaaccttcaacagatttattttacttcaaatggaacatatcataaacaattagactatctgctatggtttttaaacagacagatagtctgaatggtcctatctagacacaccagtcccattataaaagccccatcaagcagggctcggcttcccacacctgtagtcccggctacttgggaggctgaggtgggaggactgtttgagcccaggagtttaaaaccagcctgggcaacatagtgagaccctgtctctaaaaataataataaattaaagctccagaaagacctctacagtgaatctgacccctccctccccggaatgaacactaacaaagagctgctactaatagcatttcaaacagttactggaaaaaagtaatgactcattacatgttcatttttatttaaaataatttaacaaaggtagaaatatttagagaaaaaaaaaatctcccataccccaaagagagagacagggttaacattttgggagggagacagaagggaatcatgctataaacagctttctctgtcttttcagaatttatttatttatgtttaaacctctaaagaggtttaattctttcttgggtatcaattgcctgtgatcaaggagtaatcatattgttactaatacactcttgacagcttttggtcatgcagttctgagcagttggaagataaagttcttagttacagcttctaatactcataaatctcaccaacagtgtggggccccactggagttcccactctcatcttgaccaagatgatttactcagcttgcccacagtgctgcctcttgacattctgaagccctggggaattcctccacaccctctgacttcctgtaactgagcactgaggctcagtgcatctctatttagcactcctcttactgtctcatatttaactagtgtttccactggattgcagaagttttgaaggcagagcaggattacatttttctcctctttaaaaaaaaaaagaaaagaaaagaaaaaaaacccacagtgctttcacagagcctcaaaagaactcgaaatacttgctggcattgtactgaatattctcaaccttttccccctacccagatacatccacaacaataaagttggagcaaggtagagaaaagttagtagatgtttataatgaaagcatagaaaacaaatcagattaaagcactattaatagcaaacaagaatcgtgggctatcctattgctaataacaataatagtaacatataactgtgaacctttattatacactaagcatttcctatacattccttcacttagcctcgtctatatggcagatgttccattatccccactttacacatgaagacaccgaggctgggagagattaagtagtttctccaaagtcacctgccagagaggaaggagctgcgactctaattttgctttctctgacttcacaccatcccatttttccagaatcaagaaaacatgagcactcaggaatattttcacattttaaactttattcaaaaagcagcacataagatatatcttagcactaattccatgcaatcaccaaattttcctaaacaacagtagtagtagtaatttcttagagtcgctgtaagctccttaactgtcttctgaattaataaggaaaattaaattatgttttctagactttgcattagtatatttcattactttccaagttttcaaaaattggtgatctgagtagagtgaattcaccttgtctaagccacttaggggcttagagactctgttatcttagaaatcttcaccttagaattctacctattacattatacaattaaacaaactactttttttctcatgcattgtaccaatcagccccttaactgaaaaaagatgacccttggaagcttagaagagaattgacaacgaatacttcttttgccaggtctttgggctgggatacaaaacatcacgttatctatgaatatattgtggtccctcagtgaaagctgtcaccaaatattgcaataaaactaagaaaacttttgaagtggaatgcatatttctgcccagaaaatgctggatgcagaacaactagttcactgcagacaactgtttgctttaaaatgtaagcaacatgcccagctcaggactgaagtggccagagtgcctactttatcagaatggcatagcagtccaacaatttagcctagagagaacagaggtggagaacaaagaagagaagtgaaaaaaacagaccagcccttctgttctacatgaccttctttcccgttttgccaatctgatttcacacatagtgactcatggtgaaacagagaaaacatgggaattgcattcagatgtgtagaggttagtaagacttagttttcaaaagcagctcattctccattaacactgtagtcgccttccatttcatttcacttagattggcatctgcacagctgccaaaatttttctctaagtcagagaacacactcctaggtaaaccttcaaaaaaggtatttcgaaggaggcagcttctctgctgctagagaaggcattgccacctcccttcagacaggggatttccgctagttgctttctgtcatttcgtctctattctgcactcagtcccttgttctgtctggaggttcctgttttcctgtacccaaccaagagccaatgaagaagtaaagaggagcaaacacgcccgcccactcccaatttcctttgctctgctgtctgccaaccgcaaagccgaccgagacggagccgctgtcaactctccaactcagctcagctgatcggttgccgccgccgccgccgccagattctggaggcgaagaacgcaaagctgagaacatggacgttaatatcgccccactccgcgcctgggacgatttcttcccgggttccgatcgctttgcccggccggacttcagggacatttccaaatggaacaaccgcgtagtgagcaacctgctctattaccagaccaactacctggtggtggctgccatgatgatttccattgtggggtaagtggggtccccctacccgggacaccgatccggggcgagcacggaggggcctcggggtgcaagatcccgggatgtagagacgctctctgaccacgctcagcgcctgccctggcaattctgcaagcggccaagccagtggaaacttgtttgcagggcgaggccgcagtaacctggggccccattttctgcaccaagggctgagacttgaggggggccctaggggaaagaggacggggaaaatttgccagccgcagggaagaaaaatgagagttcccccacccccctgcccccgcccgcgtgccaggatcgggctcttgctggaaagatatttgtagcgccctcgtcttttaaaaataagaagaaaaaggaaagtggtgtaaccctaccctggagctggctggggcggcagggtgtggacccgggctagtgtaaaaagggcaaccaagtggcgacgcactttgctgctttctctgcctaatgcctgccacactgtacagtaaagctgagcttgggatcaaaagggggggtgtctcctggtggcgcatctcccattgtggggtaaaggctgccatgactgtgggaagatggccttctggcattttcttccagcagtggccaggcgtggtcactttctctgtcttcgcttcctagcctgaggtttcaatgtatcagaaggccttttcaatacctgatacttaacaaagtatcctgtgttgagactgcatgtacacctgctttcctagaaaccacctttccttctagttcaccctttaagaaatgcttctctcgcttatgcaggatgggtggtgatattctcaatcttgctgattatctcctacacatctttaaaga

SEQ ID NO: 9676 - DNA, 6000 bp, Homo sapiens
gcaaatgagccgtctctctgtgatcaggatttttaatgcttcacttactttagttgtcctgtgtccttttgtagataataacacatacgtgtcatttaatgtgatgtttctgtatagtataataagacaatcttatatagaaaaattcgagctgagcaatggctttaaagaggttcttaaattttgaagaaaaattgattacatatttctgtatattttggtacactgcggttttcttaaattgatcagagtaatatattatactcttatactatttctgcaatgtggtagatgtcttaaatcaatctcaagttcttgataacatagactttgtattcaggtctggatttaaagcaagattgtgcctttcattaacttgggttgattatctaatcttcatttttctcatctgtacaatgggaatagtatcaaccacataagcctcttataggaatttaacaatatgatgaatttttaaaaactagaagaattccctgacacgtggttagtgctcactacatggcagtatatgttaaaattactatcatggatcaaacctttgatttttatatatatgctgccttacaattataacaagagcacgttgaaaagagtaaaaaagtggattagggttttgcagtttttaccacatccttggggaatctggtatgaaaaaagaaatatttaatatgttacactctgcagatttccttcatatggttattttatacttctgctggaataccaactcagaaattcaatcacaaagaaggccattggataaccttacccaaattagggataatgacagtttcttacaatctttagatgtattaaaatatataggcacattttgaatatataatacctttccaggttttacataaaagaagcctagatttccatctacatttatctattcagctgcttgtttggaaaagaaaaaaacaatttatatttagaaagacattgaagccagatccccatttgatttttctgtatcttaagctctctgatgtggtggtcatggggcttcattgttctaagccattgctgtttctttttggcttaaggaaaaccttaatttttttttttttttgctaaagcactgctaaaatttaatttccaacttctactagaagcttcagattttaaagactttcctttaattaaacatttggagtgagaaatccattttttatataggcagtgctcactaaaactgtcttaagtgtaattgaaatatgcacatttttctagtatagatcttatcatatatctcagaaggtaatgtctttgttcttttggaattaatgttgtccataacaaatttctgtctggcgactcgttactgttgctaatttagtgtgagatgtttggtcataatcctaaactatcatttgggatgagattgttataaaataatggttttttagtcacatttcatatcaaatgagacactgacagagcattcttttaaaaaaccagttatgaacttgactacaagaaaagcagaaaacatggattccaaaatgttttggtgaagacattattccataaggtagctagtgtatggcaaacaacaacaaccacaacaacaaaagccatttaaaaaatggcaccagtctaaaatcactggcttgctttgtcacttttaataggtaaagtagttaagaatgcaaaatgttgatgcttggtaaaaaaaatgccaatataaccaaagcgatttcccttatacaaagctcttctctgtatgatgtaatttgtcataccctacacaaggataactttctatgaatagggcaacattttctgccctaaaggaccatggcaattggtggtaggctgatctcgcccaatctatcccttctgtttcccacacacactctttctgcctctgagtgattttatagtttacttaaggaaaggcatttacagatggtgagtctatcaagtataaaatagaatctatattttgcctgataaataaatagtcatgagaaaacacttctagttgaaatcctccaatgtcttcctttctgtgaaccatcttaaaattaagggtcttataagtctatatgatgtgttaattcctgcattattgtattaggaagactattttccgaatatcttaaaaatttcacccgcgtaaggaaatttgcccgagataagctggtggtgtgtattatttggagacatgagctagacattgtaatcctgaactgggtaaaccaagcccaagtgtttaaaatgaaagttttcaagaattttaattactttccttttccagagataaaagagatgttaatagcgcacttttggatgtttctaaaccacagtgttatccaatttagacgtattggacctttggggtgggtttctccttaacggttaagccttttttcacggggtgctaaaacaatagcacattcagaattattatagtgagaattcaagtgattcaactttaacaaccgaatgcacttttttcttcacaagtaaatactgtagattaaaagtgtgcagaaattactcttaatgctttacaagaagagtggttgttttattctttcgcaagactatttcattaccgtaattttcaagcatgccgaggtgtcctaatgtctcttctaattgcttgaatgtcgctgacctttttttaaaagaacacacagcgcccataatatgcaagggagacctaagttaagtagcagcaccaaaacgtatccaccaaacaaaggctcttcctcagacggccccttctggagagaacctttcctaatattttccagtagggggaactaaagactcaccatccagcatttagctcggctcggggacctgcgtgagttcctataagccgccttctcatcatctgaacaagcatcaaacggctaccagcgagcctgtgatcacacgtgggcccggccgcaccggggcaccgccgacaccggcacccctttgatctaacgtgaccttccttcatcatccccggtcctgaatggcatcctttggtagtcttggtcttaattttcagagttttgtcgtctttgggctgaaattcggcttctttttgagcttccatgagctcagctgggctttcggctttccacacccagagcctatgtttaccgaatttccttctggaggtgctggtccctggagggtaaagacttcggggatccccctcccccaagctctgtgatccccgcttccccgtccttagcatcttctgtggaactccctcgccctgcgcgatcgcgcatcaaactcatcgtggaggggtcaaaaggcaactgagtaacataagaggggctgcctccccttcctccttcccttggggatgccgcagggggccatagatcttggctaaaatgagccgctggaggttagagaattctgccccctcctttttctcccccttgtgcttttgaatcatataggaagcatctacacacaacctttccagtccaaaaggtgcttctatttcctttcctttcctttccttcctcctactcggcttctcatctggctaaaaggtgaagagtgagtgagtgtgtgattttaacgcgtaatgaggctgcgccctgggtcctggaggctgatctttttcaagaaagcgcgtgcagctccggcagacggagggatgaataattaggaagggcttccatgaaatcactcacggagaaaattacctgcccattaaacgggacgcggcgaggagcaggagcctggagcccacctatcccctcccgaggcgggaaggagtgggcacccgggggcgcggagaaggggaaggagtcgcccggtggcctcggccctcggcagccggcggggctctccgaatttgttcatctccgtccccccggggactctcggctctccaggacccctccccactccccagcgggcgggtggccgagtccggaggttcagggctccgcgcgcccctcctcgcccccgcccctccccgggccgactccaggcagctctcattcctcccctcccctcccgcctcctcgccttccctcctagaagtccttccacccgcggcagctgccggaggaagcggacgctctgctgcgaggctgcgggggctggacccgggcgaggggcctcagcgcgcctggcgctggactgagcgctccctttctccgccgcgcccgggctgggctctcacgcccgtctctgctcgcgcccgcagccgcctggtgcactatcctcagaggcggcaccgcgggggtgtctgcagcctcggcctccgcccggcccctccctccctccctccctccctcgctccttccctgcctccctcaccacgtaggagttcggattctccacccgaatcgtcctgatttcccttctcctctcttttggaaaccggagaggtggagggagggcaacaccgctgcaaaggagaggcccgccaagtctgcccgcctgcaaagtgttgctttgacacattcttattatggaagttaagtaaaaatatagacatattaaaaaataactccggacgtggagctgctacggagaaggaaaccgggggaaagaaaaccagtaggcaggccaatggtttttcggcagcgcgctggcaagtttgtggaacactttctaggaattaggtcttttcctcccccttcatcatcttgacttctgaaggaagaacttggctttggattgcagtggagcctaaggagagagggttagacacactcgaataatccctctggctgggctgaatttgtgggaatttaggaagccagagtgctggaaatacagcagcctttgaagtaccctctgttaatttggatggatctcagtgtgccccgttcgagacctctccaccaaccccttctgatcttgcgatttgctcttcttgactttaattagtatctaggaaagtctaaactttggacctacctctttttttgatactcatttttgtacttttgctctctgggattggtttcttaaagaatctggatcctttttaatatgtcaaaatgagtctgctgatgtttacacaactactgctctgtggatttttatatgttcgggttgatggtaagttaaaaatgctttcatctttttttgcgccccccaccccccaatcccccaaaaccatttctttttgaatttgatgtgggttataaatgaaatgacattatgtctgttagtccgttttggcccggcacgggctccttgggggcagaggttttatttaagtcttttgtttctaaactgctgtaagtggaatgtgttggtagtcacctattgttgttattgttgtaatttacttcactaattaaggagttggataataaatgattgggctcccagttttgttagaaaaagaaatattacagtcaatctcctgcaagagcctaatactattgtgcctgctctctatttgatgtttgctcttgtgtctgaactttggctgagacattcaagtgaagaaatacagtaatagacactctaaggaaggttcagtgggttaggaatttgagactgagatcaatgtgtatcacctgtgtgccagtgaatgctctcctagcgttaaatcgaatgaagaatttagatcctagggagaaaactgtcaaaagtgagactgggcgaggctccacgaagggggaagcatcagctatgggctggccacaggagtagaacacttagctcagtccccagtgggcaaacacaatggggaccttaaacaggtgctggaggtgtctccctctaggttgagtcagtctgtcaagcccacagcattctgcctctgattctcttgtcttttgttccgatttggtttactgggatattttcacaggatgtcaatttcttgtgcgactattgcaaaatccttttttgtggttcttttgaatgaagagtggaaataatcattaacatgctttttggtttgtattcaaaagaaaaaagttaaaagaatatttgctgttaaccttctagaggctttaatttttatatcgatggaaacaa

SEQ ID NO: 9677 - DNA, 6000 bp, Homo sapiens
catcccaggctatttacaatataaaatgaattaaactatgcggctaggagctaataatttaatcttgaggacaatataattggatatcaagatcaaacaaacacctgaatataaataagcattagattttaaaaactgagtaagcagaggagtaaatgcttcatgcagctaaatcaacaaattggcaaacattcatgttgaataaaacctggggaagttttctttctctgttattatcaagaaggctgtatataacacatgagactgcaggctctacttacagactaatcttgatttttttcccagtgaagacattcaaatacagaatgcagtctatgttctaagagtaggagggacatatgtagcatactctatgtccagtaacccagagatggtccctagcaccatgaagatgcacagcaggaacttaagatataaaggaacagaaaaacacctggtcagaggccatgtctaaattaataaaggtagatggtttattacatttctcattgtaaatagcaagagaaataggagaaaaataaaaataaaacccaacgccattggttgcctttgtttttctattttctttgttgtctataaatacaactagcagaagattaattacagttctaaatttaacattaaaaagatttctggaaagctgcaatataagttatgtgacagataaattttgtcatataattctagaatataacccaaaatttttatttttttcttggcattaggtaccattttattgagcttaatttaaatgctacaacttgatgcttagggaaatccattgaattatcaaccaattcaccttctaattttaagcttgtcaattttgctacataattaacttttattatggaaacccacataactctttctgacactttctcctgtttaaaattgtattcaaaaggtaatttcagaataatctctggaagatctcttatgccaaaattgtttatcaggcaaattaaaatggaaagctatttttgctcatattatgaaaactgtcagcacttttaaatgaattcccataacactaaataaacaccattgcaggccgggcatggtggctcacacctgtaatcccagcacgttgggaggccgtggtgagcagatcaccagaggccaggagttctgaaccaccctggccaacatggtgaaactccgtctctactaaaaatatagaaaattagccgggtgtggtgacacgtgcctgtaattccagctacttgggaggctgaggcacaagaattgcttgaacctgggaggcagaagtttcagtgagccaagatcatgccactgtactccagcctggggtacagagtgagactctgtctcaaaaaaataaaataaaaataaaataaaataaaataaaatagataaacaaataaacaccattccaaaggaattaacccattaagaaattattcagttttttaaatttaatatttagtgcaaattttatgataagggaataggggagatattggaagtaaagtagaaattaattaatttaccatgttactaatacatcttgttggttttgaagtaagcattttacctgtaatcattgaccttctacaaatgtttcaagggaaaatagctaaagactgtgaggttcactgatactaaaaacatatatcaagaattttaatggcagtcctgatggtgcctaagcacaccattacatcataggtcctgtgatccaatactgattttaggaaatatggtcatagcataactttcatatcaactgaaaagaatagaaacaatatgagagaaggggagttaaaagacccagaacacaaagtccaagagctggatgaagatagcaataaaaatacggaaatatatatatatataatatatgtattttatatatatatatataaaaatatatgtattatatatatattttatatatataaaatatatgtattatatatatgtattttatatatgtattttatatatataaaatatatgtattatatatatgtattttatatatgtattttatatatataaaatatatgtattatatatgtattatatatatataaaatatatgtattatatgtatatatgtattttatatatatatgccagtgtaaaataatttaagaaactccaagaaataagaatgtaaaaatgagagacactgaaaaaattgtatagcatgaaattcagaggacaaaagtcaagagagagaaactcatagatgtggcagcattgaaaaaaaattagacagatgagaaacagcctgttgattatgcccagaaccctaactccctggaccaacagcatcagtatcacccgggaacttgctaggaatgtagattttagagccccaagctcaccagacttgctgagtcaccagctcgagagggtgggacacagcaatctgctttaacaagccatccaagtgattctgaggcactccaaattcaagaaccacttttttagagtttctaagactttagcctccattctttaccaggagttgccttagttgccctttataactggctaaatgttgacataaaaaaaaaaaacagaaaggcaactacttctcaaatacacaatagacaatcactctttttcaggtattcaaataccagaaaggtattcaaatttcttctgccactcaatttgcttaacagcacttgccttcagtgaatgtctgaagagaaaaattaaatttagtactgttaacccaagcagttactaaaaattaaatttagtactggtacccaaagtagaacagaatagaaaatacgctgcatttcaaagttttttgttttggtttgttgttgttcttgttgttgttgtttgagatggtgtatcgctctgttgcccaggctgaggtgcagtggcacgattttggctcactgcaacctccacttcccgagttcaagcacctccgaagtagctgggactacaggcgtgtgccaccaagccccaataatttttttttttttttgtatttttagtagagacagggtttcaccatgttggccaggatggtcttgaactcctgacctcaagtgatccccctgcctcagcctcccaaagtgctggtattacaggaatgagctaccgggcctggttcaaggtgttttataatatacctaaccacattatatgtatgattactcatattcttatgaagtacttgatataaaaattaagtattttaaagtattaatttatcagttccaacaaataaaacagaactacgttaacattaatttaaggaatatgaaaatatagtaatagctctacctaagaatatcaggtctccatattgtcctttcctaaaatattagtaactactaaaaagttattagagagaagaggattgatttaaaaaaatgctatttatcaaagatattaattctattttattatactccaaatgttcttaattgacttgtaattaatataatggactaaagcaaaacttataagccatgaatggagagtcctttttcagaagcaaggtaacccggtcattacaatggtgacttatacagaagaataatttccatttcagagtgagtgccattaggggctgtccttactagtaagtttctttggtaacggacttgtttgatcatagctgtcattattataatgggcagtgttgtacgattatttgattccaactaatcttattctatctttttaaaccaaattaactacttatatccacaaagacaagtaagcactctgacattttcctaatttcatacaatgatcatggaatgctaaggatatactaattttttttgctatttctctttatataacctccatagcttgacataaaatatactaaaagttcctttagtctccataagcctaatgataatgttctcaatgtaactttcaattaagtacaaaattattattttgaatagtttttaatataatattttcttatattgcatcatacagtgcacaaatggtgtgtgcttttgttcccagaccaaaccgagggtcaggctgctatttttcgcagcccaataacgagatgcagatgaactggggagaaagagagtttttatttctgtaaccagttacagggagaaggcctggaaattacaaagttttccagagcttaaataccttctaagctatatgtcttcatgtaagtgtgcattcatctaaagacaaagaagattaacttcttttaatttataactgaggtctgagtcctgaaggccttcttctggagcctcagtaagtttacttaatctaaatgagtctaggtgctggggtgattacccttttcttgtctcctgctaaatcgtaaaggtttggggagttcctttagaccccaataaacttgttcgtggagtttcttcagacccccaataaaacttgttcatcctaaatggatcctgttaagaattcctttgttattttgtcatgcttcaagcctaggaaaagcctaagcaaaactcttggtgggctctttgttacattccagcctttgaataagggcactggctctatcagctttgaatatataactcaactagtcagtcagtagtactgaaacagttgttacggaggcctgcgttattgagatcgggcctgccacacttttaaactttttctgacatggacaaagagaaaaaccaattctataatggcagagatttcactgagtaacaagctagagtattcattaaaaattgttgtatttaacctatattttaagaaatgttttggaagttactggctttttttactgttctcattaaatttcttaaataaaaaggaaaactaaaaccttcaatctgaacctcatttttttaatctatagaatattctgggtaaacataacatacactttttaaaaattattctgaaaggaagagaaaagttcttgaagccttctctgaactgttttttctcttcccttgttacaggtatccatttttcagctatattaatcttttaaaacaaagaaaatggatttcttaaattcatctgatcaaaacttgacctcagaggaactgttaaacagaatgccatccaaaattctggtgtccctcactctgtctgggctggcactgatgacaacaactatcaactcccttgtgatcgctgcaattattgtgacccggaagctgcaccatccagccaattatttaatttgttcccttgcagtcacagattttcttgtggctgtcctggtgatgcccttcagcattgtgtatattgtgagagagagctggattatggggcaagtggtctgtgacatttggctgagtgttgacattacctgctgcacgtgctccatcttgcatctctcagctatagctttggatcggtatcgagcaatcacagatgctgttgagtatgccaggaaaaggactccaaagcatgctggcattatgattacaatagtttggattatatctgtttttatctctatgcctcctctattctggaggcaccaaggaactagcagagatgatgaatgcatcatcaagcacgaccacattgtttccaccatttactcaacatttggagctttctacatcccactggcattgattttgatcctttactacaaaatatatagagcagcaaagacattataccacaagagacaagcaagtaggattgcaaaggaggaggtgaatggccaagtccttttggagagtggtgagaaaagcactaaatcagtttccacatcctatgtactagaaaagtctttatctgacccatcaacagactttgataaaattcatagcacagtgagaagtctcaggtctgaattcaagcatgagaaatcttggagaaggcaaaagatctcaggtacaagagaacggaaagcagccactaccctgggattaatcttgggtgcatttgtaatatgttggcttcctttttttgtaaaagaattagttgttaatgtctgtgacaaatgtaaaatttctgaagaaatgtccaattttttggcat

SEQ ID NO: 9678 - DNA, 6000 bp, Homo sapiens
gttcatagtctttctgggcaattacatttactctcatggattaaactactttcatttaccaataatttcctaacttgcagtttatgcccttctgggtttcttattttctattaaactactggctttattgattgcacttagatctcaccaggttgtaaataaaaaattgatattttccccccttttctctacctcccaaatttgaaccaccatatttcttgtcaattaattgcatcactaatcagctaagcacagcagaaggaaacatgtcagcctcttctattttataatactctcattggatctcacttacctcttttccgggcttctcatctcttctaagcttaccttcttgaaagcacagaatatgtactatttctatatcctcacttaccatttacttctttatcttaattgaacttgtggtcccattactataccaaaagtatcacgaaagtcatcaaaatcttccctgtagaaagaggcattcatgtttgaaggaaacttacacgagtgtcaaaatgagcacaaagcaaaaccaagcctgggaattaacataaacaatataggatattgaaatagtagactctccagattaagatacatcaaacattaagtaaagagtttttataacctgagcaccattctggatagatgtgaaaaagagggatgtcaacagagaagaacaataaatttagctgctatgggagtgggaaggatagaggtaagggcaccaggttcagagaaggcctcatccaaaatgttgtcaaattcaattgtgacttttcagtcacctttttggatttttttttttttttggcttgcaccacagctaagaatgaattatttttcaaaattttcacaagcttgatttctaataagttattttttctagtcctttgctatttatttctacctgccttttaaatacaggtgtatgctagggcttcatccttggccatccagctgatcttcctaccaacactctgtcacccaggctggagtccagtgatgtgatcttggctcactgccacctctgcctccagcgctaaagagatcctaccacctcagacaccccagtagcagggactccaggcatgtgttaccatgcctggctagattttgtagagataggctttctccatgttgcccaggctggtcttgaactcctgtgctcaagcaatccacccacccatctcggcctcccaaagtgctgggattatagggctgagcctccactccaagcctattttcatatactaatgatttccaaagaaataactccacttaggtccttttctcctaatatttcatttaccctctgctttccctcaggtctttccaactagacatatgtaaaacagaaacctttacattccacgtctgttttctatcctcaaacctctcttactcctcactaactcttcattcaagccaggaattgaaaggccttctacgcactaccgtctgcctaatttctcataatcaatctattatgaagtgttgccatttctcccacttatatgtgcctggtttcagttctactgttactgctcagtgtcacactctctagatctctcttttggatcaagattttttaaaaacagtattgaatgcttttaataattcagacactaggctaacactttatctgtaccatcccaaatctgatataatccttacaacattccgatgagataggatctgttattatctggatttcactaagagtgacagagccaggtcagtgacctagattgctctgattcaagagccccactggtaacctctacatggtattggccatcctactggaaagggctcctaatttgtcttttggcttctcattggagttttcactttcattttcccctcctttcttaaatatgtcaaactgatctttctaaaatgcaaattgaactatttctgccttgcccctcagcacccctgtccaagctttttagagcagctaatacaactcttcatgaccctgcttcttcctagccggtgtctcctctttcccatacccgctgacacaatttcgaaatctatactctaataatagagacatttgtcatttcctccagaaatcttgtttttcacttttctttaaaatgccccttttcagtttcctctcaattgccatctcccccagggaactgttaattcctaacttgagttatgtactaaatccagttttccttgggggagtattgtttgtttaacctaaaatggtcttctcattttcccttttatctttcttctttctgagagatcctagttcagttccttatcacttcagtcttacttgaaaaatagcctgaagtctaactggcctacctctaatattccctccttcacattgggcagtggttctccagggaccccaaggattacctgagaagcttttgtgaaattgcagattcctgggttccaacctcggaggtttaggtccagtaagtctgtggtgggaagaaggcatcacttcttaataagcattgcacccaggtggagacatcctgttttatgctattagtaaacttttgtccccagactgagacatgatcaatttactacttgctgaaatgcttttgatgtctctctttagtttaaaatatattgtaaaatcattgacatgtggcatcgaaatctctgtagttttcaaccagtcctttgaagaatatttccctacattttgtctccaatccatacctcctcctattccggccctttacctaccacaaatactctaatatactctgtattccatatgtgccaaatgctttcatttttggctcacttggacactctctggacttgcctgcctgcagttccttctgaatcattttcttactagtgaactcctacccatccttcaagctgcaactcaactaccactttcttaataagggcttccctgcatctgctgcccccacctcatcctttccactcctgctatggttgctcttctctgcttattggcatcactcccttttccccatctgtccagaatggcgcctacataatggaaaccttttacttttcactagagagttgacaatttagagattctatatcatttacattctattttcaggccaggtattgctttgtactcattttgccactcctgtagctttctgcaaacatgaatgccttttttcccagtgacaagcagtttttaagttttcaagtgtgaaaagagaaatagcatgaggggcgccaatggatctgcgtgtcagcacattggcagattctccaaaatgttttcaaattgtcaattccaaataagattttagtttctttcaagtttcagaaaacgtgtatctaactttggaacaatgtaagtgttgtgctggaactttgaaaaaacaccagagtcaccactgtctaagttctctgggcagtatctgctattattttcaattctgacagacttggcacttgaggattgcgcagcctctggtgacacaatgtggaaagaagttagagacacaaagtaacatggcatacacagaaaagtgagaaggatctctcttttcccctggctgcttctatccaccccaattccccaccccagtcatcaaactattatctggcaccattaacttaaattcaagtgaaaattgtgttctctaactaaaaacattgagtttgtggactgaatacattattagcaagggcttttcaaactttcatttaagtttcattatcaagagctctaaaattgatcactgatcttaagattatcaacatacctttattttctgaagttgtgagaggaatataataatcttgttttctttttagtataagaagagatagatgggcggaaggatatctgagtaaccattttctgggagatattttaaagataagtgatgctggttattaaaatataaattacaaaattgtttggctgaactagattgcaataggttgttcagcaatgggattggaaataacagagaccattgatagtcatggtgtaaaataagtgagaaagtacgaggacattattatttagcttttggatttggaatgttaaagaataagaataccccaatattattagactatcagtggttgaaagttgaatggaggagctgtgaattatgcattgtttctcttgcagaacccagagatcctaatgtgagatggtgagggagggggatatgtattattaagaaatttaggtttgatctgtattacttttacaacacagaacgagaaaagaatgtagacctccggctggggttagacttgctcccttccgtaagatgatgaaggtcaacttccctgtttgaaaaaaaacaaagtatgctctatgtgcgcggaaaatcactgtgccagatctagtaaaaagccacgataccattgggtgtggaaatgcagagaccctctgattcaggctgtgtattagtgtctttctgaatcacaaagaactcatggagagttatgatcacattgaacacagtaaaggaataactataatcatttttttcaattatacaaacatgattgactttttaacgaaagactgctattctttcaaaacacacgtttctctcgcatttcagttccttttgcactcacattgccatatgatactcctatcaaggctgtgatttcttcggtgaattaagcaacagagcatggatagcaaacaataaaacagctacttttcatgcaacacaaaagagggagcatttttctcagcaccgcggcctcatcacatcttctgtgtttcctgtcccatgggcgacgcccccactcccacccggtctccttcccgagcagctctgggctgcagagccagctgcgtgccatcccgctctgcttcagcgcacgctgaagacggcactaggacccagggaagtccccgagcggggttcgcggaaaggcagccagactcctccttatctccagtgtcaaacttgacatcagcctgcgagcggagcatggtaacttctccagcaatcagagcgctccccctcacatcagtggcatgcttcatggagatatgctcctctcactgccctctgcaccagcaacatggattgtcagctctccatcctcctccttctcagctgctctgttctcgacagcttcggggaactgattccgcagccttccaatgaaggtaagccaggtaccgcgacgcacggagctctgccccgcggggctcacgctcttcaaagcacgttctcaccgaagccttgcacgtcgggaaggtgcctccgaatagagcagtttgctctgagagtgaaggaaagatgtgccttttttttttccaactgtcttctaaaacacttcaggagataattttagatggtctaaactttgaaaatgtgtttttaatctgacaccatttcgagcaattaccttgtttgccaatttgagcagaaagaaagaaagaaaatcctccagcgttgcaacccagttatgttaattgccaaatagccaaggcagtattttattttctaattatgaccatgtggtactccgagaagtttgaaagaaaattcagccttcctctctagactctttagtatgtttaaaggtaatgacaggttgttcctacttgggatcatggcatttatgaatggactaaagggaaatcagagtttgtcgaagcggaggtgcgtgtttatggtgcaagggctgtgttgaagttgtgtgtatcccgccaggcaatggtttgctctatggtacaggttctaaagagcagcatatgccacattaacgtaagtaatatttgcaagaattacaataagcttaggttggattctctttgtttaaaggcttatatacaaataggagaatgtatttaatgaatagtggatagctcctgggaagatatagtaaataactgaatagtagattaagagagaatgttcatatgcagcaaatggcatttccttgatgttgtgttatttattatccttgtaatgagcattaattccttttcagtgggttaaagtgcaaacctaatgttaa

SEQ ID NO: 9679 - DNA, 6000 bp, Homo sapiens
ctaaacaaccttgtaaatttgataccaatcaccaaattgctctctaaaaaggaagtagcactttacaattccataaacagttttctgacaccttttaacaaaattgtatcgcattcattttttttagtttcagccaatcttatttctcattatttttttaaagtagtattattataaaaggacacaaatttttgcacatggttgtaaactatttgttctttcttttcttttctttttgtttttgaggcagaatctcactttgtcgcccaggctggagtgcagtggcacgatctcggctcactgcaacccctgcctcccaggttcaagcaattctcttgcctcagcctccctagtacctgggattacaggtgcccgccatcatgcctggctaattttcgtatttttagtagagacggggtttcgccatgttggccaggctggtctggaactcctgacctcaggggatctgcccgccttagcctcccaaagtgctgggattacaggcgtgagccactgcacctggcccttgtatttattgtacgaattgcttgtttatggcttgtgttctattttaaaatagggtttttttttggtactgatccataggcattttttttaacatattctggatattctccctttaaaaaaaatacattgcaattattttctgtcagttgccctatttacggtttccactgtacagatgttctacatgttcaggagtttgggatgaacttatcgccagtcacaccatcccacctcccctcaccttccagcctgtggtaaaagagactgagcaatgaagacccctgaaactttgacaaaactggtagaatatgaggatgtcatcatttatgaagctgcaaataagcttcctggtagacttgacttccttttctgtacaatcacaatactggaaaaatcatcacaatggatatttacatatgcaaaaatgtagctgagactctagtctgaaatagagattttggagaagtatgactctgcttaatgcaactaaactgctttttgctaatgtgatacattttctacactgtggacagtcatagctgtaagtcaggatttatactgcttaggcactgtgggtttttttttttttttttttttttttgagatggaatctcgcttgtagcccaggctggagtgcagtgacaggatctcggctcactgcagcctctgcctcccaggctcaagcaattcttcttcctcagcctcctgagtagctgggattacaggcgtgcgccaccacacccagctaatttttgtatttttagtagagccggggtttcatcgtgttggttaggctggtctctaactcctgacctcatgatccaaccacctcggcctcccaaagtgctgggattacaggcgtgagccaccgcgcccgacctactgtggcttattatttttgagatgcacatgttctttaaataattgcttataggagataaaactccaagacagccagaagactgcactggcaggattttctccttgagttggaggaaggattgtatgtaaaaacgattagcttggtcaagctcagtcatgagctagatggtgtttaaaattgaactcaatgttctctgaccaatgtgtcaaattaaaaaaaaaaaaaattgaactcgaccttgaaaactgtttttaaaaagaaaccttttgaacatcatgtactgtaaaagaaaaaaaaatttaaagttttaaaaattattctaagaggatgttgtaagaaagtggcctcatgtcactttataggtatctccagtcctggggttcacttactatgatctgatctgattgtcttgctgagagcacacccttatgagtaggtctctcctacaaggagtagacattcttgccatcagtcatggcagaaaaggctgtacttggcacagaacaggagaatttagaaggcaggccctacaatggggatgaggaggaaatactttggtctattctagactgcacatttagtgctgaatggcctcccatggtaatgtggggaacctggcctctacctgtcactggtgcgcagaggcgacagtctatgaaacaatagcatttattttaaagagactgcaccaccataataaaaaaaacaaacctagtaaaacagggccagccctatatgtacactgcctgaaaattataattttaggggcctttgaaagaccttgcatgtcccaagagtcctctccttctttgtggcttttcccctcccagcttattagaagaaatcttctaccaaaaggccaaattaaatatacatatattgggagggtattttctccaaaacaatgaccaaaaacactaacccagagaggactaaaaacttttaattccatcaccctacttaagcctttgtcagtttccacaggaatataaaatatttatataatagcaatcatgtgcccatacaataatatatcttgaatttttaaaaattaatgttacactgatcaaaagcccctcccatcacagagagttacatagcagtgatatctcagaaagaacaatgattttggcctcaggtgctttcctttgagtcacagctccaatgtaggcagcacagccctagaccacctgactctgttccttcctttctaccatgactggcttgcagggtgagtgagaggaacagatacaatgcatggtgggtggctgactcatggtgggcaatgactggtagttaatatttttagcgttatttttaaagtcaacattttacttcctgaattgatggttttgggggcaagcactgtgccaagccttctttacaacagagactgttttaatcctaatcacccttcaagactagctgtattatctcactttacacctgacaaaaaatgaagcccactgtggtaatgccacttgcccaaagtcacacagcaggtcagcagaagaggtagcttttgaactaggttggggtcaacagtagtcactactggccactaccaaatatgaaatacaaacgtcacctcagaacagcagatagcctctctccttagcacactgctttgcagattcaagaagtccagaaggccagagtggatgaggtgaaatacagttttagtttttaagatcatgaacaaggggtcagtgaagaacccaggagaaattaaaagagcaaagtaaacctcaacaccaattagttcagatagacaaattccctaaaactctttcactatcctgatgtctcaagagccacgtttaaaattacaaaatctgtgtgggttatgtcaaaggcaatctgtagaaagggcaaagaatatgaattatctgaacccattgagttttttgtttgtttgtttgtttgtttgtttgttttgagacagaggctcgctgtgtcgcccaagctggagtgcagtggcgccatctcagctcactgggttcaagcgattcttctgccccagcttcctgagtagctgagattacaggcgcgcaccaccatgcccggctaatttttgtatttttaggagagacggggcttcaccacgttggtcaggctgatctggaactccggacctcgtgatccgcccgcctcggccttcgaaagtgctgggattacaggtgtgagccacggcgcccggccattttttttttaaagtaaggttgggaaaacaacaaatgatacctcctagggctgttattacaattaagacaaataccagagcactttggcaggtggaggcgagcggatcatttgaggtcaggagttcgaaaccagcctggccaacataatgaaacctcatctctactaaaaatacaaaaattagctgggagtggtaatcccagcctgtaatcccagctactcgggaggctgaggcaggagagtcgcttgagcctgggaggcagaggttgcagtgagccaagatcatgcccctgtaccccagcctgggtgacaaagcaagattctgtctcaaaaaaaaaaaaaaaaaaaaggacaaataccagaaagcccatcacagatgaaggactttgttccagttcgtgacacattgccaactttgaattacatccaagtccgtgggtcttctctctggggtcaattgatggcacgtgattacactgctcagggcccaaaggttggagctatgacttgaatgtttctagacaaggaattatttgacaaacacactttaaaaagtattcagagccatccaagtaagaggacattaataacgtagggttttgcctatggagagaaaagaaaacgcaaacagcacgttccaccttcgttctccctaaagtaatttatctccttcaaaagataaaaagtacgaacacatttgcccttgaagggcagagccccggaattcaggagctctctgaacactcctccccttctgatagggaccaaaccttctgctgagccttgtgtcacagtcagtccgcggcgccacaagcctcagtgtttacttctgccgcctgccagccgggcggggaaggggagtacccggccacccctcactttagctcctgcagctttccaaacaaaccagggcgggatgggagtgtcttcttggctgtggaaatcgatcctcctaccttgtcctgaagccacccgccgcctttcctcgtccctcccttcgcggtgattttccggtcccggcgcccggcgagggcgcgcggctggtgtccgccccgcccgaaaggtaggggttcggctgtgctcccgcctggtccccaacgcctcaccctccgggagacccgcagcctcccaccactttgcaccttcctcctcgaatttgggggcggccaccgtgcaactggcgccagccgcggagcaggaggagcttcccgcgactccggaggcgctcggcgcagtcgcccgggattggggctggcgggagcctgagactccgggcagggctgctccctcctctgctcccccgccagatccgcggggaaggaatcgtgcccgcgccgcccctggcccgcgccaccttcctttggtttctgccggcctcgggcttctgcggcccgatgtggcaggcgccgcgagagaggcagcagccggctggagcagcggcccctcaggtctcggagcccggtgcgcctctgcggtcgtcgctcctgggcctcggcgggtcactcttgccggccggcttcgctgcgggtttgcactgcccgggtgagggaaattgggggtgcgggaagaccggtctgggccggggtccgggcggcctggggtctgtgctgccccgaccctccggctttgcagcctctgaggctcagggttgggggtggggacacggagcgctgtttgcccctccacatatcctgccagcaccaaggaggtggcgtgcggaggcgtaaagggaccatgggcgctgggacccgcgagccagccggcgtgcgccgcagccaccgccgagagggcacccggggatcctggagccccagtgaagggcgggagggacgcgcagcctcgcgggtaagcccaggagccgtgggggccgagagaatctgctctgggaccctcttttgtcgaatcgccggcgaggttgtgcaattgggaagccaagaggagtgtccagctcctcgttcactattgttttcttgtaaaagggtctgtacgcgaggagggttgaggggtctggaaggttctggtctcttaccgtataaagtttttcgagaaaccctttttccctccacaatggaactagacctaacaaaacaagctccgaggcagtttaggagaaaggaggacggtgagtaaattgcagtgtttgggctgctgttaattttcaagataagggagaagcaacttgtcattttgaggccgccggctccggagatcccggcaatctcaagcctctttcttgtgtgctgttattttggcttaaaagaaaacctataaaaagcgacgcccagaaaccaaaaacaaacccaaagcaccttcttttaggatttttcagtagcgagggttggcggggacagtggggaggagcaggagggggagaagaggttgctgtt

SEQ ID NO: 9680 - DNA, 6000 bp, Homo sapiens
agctcactgtagccttaacctcctggactcaagcaacccttctgcctcagcctctggaagagttgggactacaggtgaatgccaccatgccaggctaatttttaatttttcgaggagatggggtcttgttatgttgccaaggttggttttgaactcctagcttcaagaaatcctccctcctcagccccccagagtgtagggattataggcatgaacaaccaggcctggcccactatgtttttgggagggaggcaagttaatgccaaacttctcaagaaggatggtactggagatgtgcatggctcccctagaaagaccaggattgtcgacaattgctggggccctcaggggaacccacatcagtggggttggaggaaggactacaaatgacagttcttccagtgtggcttcctggctagttggtaagtcttggggttcttagttaagttagaaaaattgaagctggttgtttttggaaagactgtccgagggtaaccagtcctatctgtcctgtctgtccatgccactggctgagtggcatttgtttacccccaagagtgacttctcagtcctgactctgatgatgatcatcagactccgatgaagacattcagaggtgttgacaggtgcttggtgtgggaagtataggagttggggccatcctttgatgttgccaacagtcttcttggtaaggttaagggaatggttatcaaattgtggtaagaactatcggatggggtggcagaaccacagtcagtaaaatttaaggtgcttgcaacagtttgggagagcgtcattaaggcattttctctggggaggaaggctctaaggcagttctgaaagacaaagtatcactaatgtccctctttcctctgtatatcacagggtctaatgtgtatcttcctcatgtgccaggcttgttgctttcctttcaccccagtcgtcccctattcacaccaagcccttttgtccagagggccaggtgcaggaaggatagtacattttgataagtttatagagatcccttatgtccactccttgggcccacacaggatactataggaggactcggtgagcagtgtactcaactcaactcttaagtgttcattacctttatgatctaggacaaggtctgtccaacaagagattgcaggtggctgaaccagaattaagtttgaatcccctagccttttgtccagcctaactctgaaggtcacaccaacccagctggcctagtgttaccattaagagaaagaatgaaacatcatgcccaagaatggtcaggtcaggatcccaaattttcctaactctctgcttctttcatctggaacatgacccaggaagcagctgagcaagatgatccctttctggagagagttacatccagtgaccaaactaaattgtggtggtcaggaggaggtgagggagatagagtcagaagtatttttttaaactttttctttcgagctaattgtagatgcacatgcaagttgtaagaaataatacagagaaagcctgtgtactcatcacccagtttcccccaatggtaacattctgcagaattacattatctcaatatctcaacaatatcccatggatacagtcaagctattaataaaaatttccatcaccacaaagatccctcatgttgttctttcatagccaagcctacttgcctcctactccaccatctccttaatacctggcaaccacttatctgctctttatttgtataattttgtaacttgaaggatgttgcacaaatagaattacaaagtatgtatggaaagcatccagtctttcacattcagtataaggtcagctgtaggtactttggtaggtgttctttatcaagtgtggaaattcccttctattcttctttttctgagcgtttttatggtgctgaattttgtcaagtgcttgttctacattgattgatatattcatgcgatttttcttttctttagcttgttcatatcaggaattgcattgatcgacatttgtttttttttttttttttgagacagagtttcactctgttgccccatctagagtgcagtggcaactgcagtctcaaccccccaggctcaggtgatcctcccacctcagtcccacctgtacctgagactacaggtgtgtgacaccatgctgggctaattttcatattttgtgtagagatggggttgtgtcctgttgcccaggctggtctcaaacttctgggctcaaaggattcgctggacttggtctcccaaagtgctgggattacaggcatgaggcaccacgcctgggttgattgactttagaattttgattttgcatccctgaaaaaaactccactatgttgtggtgtataattatttttatatattgctgaattctgtttggtaatacgttgttaaagatttctgcatcttcaccttgttacagcctggaaaaggcgggagtctaggatttctactcagcctctgttcatgtaggagtgagtggggccagggtttttcctgtggtgtttggctgaagtagagccattactgcctaaaagtttttctgtctttctaggcttcccatttcctggtccttgactagagagagcagggttcgttgagacttttttgtctgtgcctgttgtcatttttgggttgctggcttcttcagctccaagtttggggcaaagaaacaacagaaagcaagcccagggaactcagcatcatgtcattccttgggttctgagatttctagctcatctgtcttcttctctcaacctcttggagtttccaatgttggaaaatatatgaagtccaggattttttgttgtgcttagcaggagaaatggaatactgatgtccactccatcttcctgagagcagaaggattctttttttttttttttttttttttttttagtgatttttggtcaatatcagatgcctgttgatggtaatgagtgtggagggttaatcaataccttgactatcagcccactgttgagcggcttctgtgataaaaagtgcagcattgtgagattacaaatgattcagaaagctgaacacatgacacattactttcaagggctacattcaaatgttgctcctttgtgggtttccttgactgccagaaggattggagtgttgtggttgcactcatgtagtgccactttacttgctgagcaggctcctgcatttgtgggggtcttacagagttatgataacattgcagtcaggtccattgaaattgaggtgtctgactatccaattgtggcagacagacttgtaggtggcccctgtgatctctattctctggcttttcagaaccgtggatggccattgggagcctaagagcagtctttcggagctaagggcagcctctagctcacatctagaaagaaactggggagtcagtcctagagctgcaaagaaatgaattctgtcaatgacctgagaaagcttggaaatgattcttctccagtagagcctgcagatgacaatgcagcccggctgacaccttgattgcacccttgtgagagcataagcagaggatctagtttggccatgcctggacttccaaccttcagaaactgtgcagtgatatacatgtgttgtacaaagcactaagtttgtgggaatctgttgcgcagcaatagatgacaaatacaccaacaaacaagacattatcattgtagtgaaagctttggacactcataataaattctgacccctgcagggatggcaaattgcagatgagtttatgtatctatgatggagtgctgcaaacatatgtttggagacatctgtggtaggctgggataggtgctgggtcttggagattattttaatatctattttataaggtagttgtaagaattaaatgtgataatgcaggtaaaaactgtttaatgcggggtctggtgccttccctggcgtgcagcccagtgagtgtggctcttgcccacttaatatttcaatgagggaacggttctgtcaatatgcacaaattataatggcaattgatttgcagatctcttctttcctcctctccttctaactcactaatcaaaaaactggttaaccctccaactgctttcccaagttcaaagcaacgtttggcgcagtcctttctcaattctcacacaacaaagcagtatttctcggttccctacaacgaccatcactcaatacaaaaaaccaagcaggtctgccaaaccactctcatacccagtcctggtcatctccgcaggaacaacttcaattctggttaataaggacttcaacgaagggttcattaaggttttccctccaccgaaagaaagaataccgtccccagggagcaggctcttgggccctattatttgctccctggagaaagtgaagagagaggaatcccaaggcgtggcctgaacgccctttgggggcgtgggcagcccggagccccagcctcttccactccaagcaccaggcgcgtcttattttcagcccccaaacggctacaaatcatccgccttattttcagcctccaaacggctacaaatcatcctgtttaaacaaagcggtctgtctaaaaggaggggcataacagggccggggcaggggcaagacctgggagtaggcaacctccctctctgccccgagccgtcccggccgcgcagccgccgagtgccacatcagcgacggcgctgcacttccacattcccttaggatgcagccagcgggcctgagagaggggcgggcccgaggccctccggagtggcgggccgcccggccaatcggcagcaagtgaagagctgcggccaccaatgagctggggcttgtgccagccgcggccgccgaggcccgtgccccgcggggggaacagatgaagcacatctggacagctgtgcggcctcctcgcgggccgacgtcagccgagcacgtcccccacgtcctctccttctcgccacttattatttattcgttttcccaaagaagcgactagggacccaagtttaaaaattcctccccccacccaatgcgagacgtggccagatcccatccaacacacggtttaattttcatggggctctgggatcaaaagaacagaaacagcaacaacaaaagcccagccgctgtctgattttaagctggcaaagtgggaaaaataaagtgttgagtaaacagaccaagttgggtaagttttggatacgtgctggatatcatatttctcttgccgtgatctctatcctgtgtctttttactgttctcaccagctttctcttcatcaaggggagaaaagtaacacttgctgcgacaaactggacccttcgctcccttctcttccgtttcactaacattttaatttaatttttttggtttgctattcttttttttttttttttttttttggtgagctagttttaaatatcctgggagcagcaatgtgactgatattctgttgtaaacctctaactccaaaattgaatctattgataaatttatttctctattttctttctgtgaaaatactgtgggtatttgtaaagccaaaatcgttttttatccccaactctgggactgttttgatgggagattgagaaaattatctgatcttttcagaattaacacgtttgcttctgttaataggatgtctaatataaattacgtaaaacctgggttatgcaggtagttgctggatttttcacttaaatctggaggtagttgcaagccaaatatatatcttttcggtattctcctatccatagtgggagacctgaattcctttataattgttaaaaacaaacaaacatgtgacagaccacttgtgtgttcataaacttataattgtatatatatactatatagtatatatgcactatatagtatggtatatatactatatacatgctatgtatacactatgctatatggtgtatatgctctatgtatgctatatagtatactctatatacgctatatattttgttgttgttgtagtttgtttgtttgtttttgagacagagtctcactcttg

SEQ ID NO: 9681 - DNA, 6000 bp, Homo sapiens
tactcaaaactaaaagacctgcttatttcagttgaaagtgggaaaactttgaagagaaatcctcaagttaaggggtaaacccagactcttacactttttgtatgtaaatttatacacttactgaaatcacccacaaattatgagtttttaatacactgagagtttttgaaattcatttaatatagtgtaagtttcatagtcaaatagcgtagctaaattctttcttcattcctcatgtctgagacaggaaggaaaatgactaagtggatttctagttcaactgaaatagctatgtatttctttttgtacccagactgaacattctgtgaaataagaacataatgtttatcatagactttgaaagtttttactctcctgagcttcagtgatatgtctttattagctggcattattgaaaaggtgagttgcagaattgtattaattcattgacagatgatactgttaacaactgaaattaaacaataaaattcaatggacttgggaagagatatacccagaggtcctccatgtgtatttaatacaataactttggaaatcatttacttaaaaacaacttggagtctagaataaaacagaattttatattatacagatgtaatctctgtgcctctttaagattgtgtttcttcctagacttaatataaatcccacttaggcccttatttcaatctttgtcatcagtatattagcctaagccctagcttgatcacctagaacctttactaatcaggtttctgtgctcagcatgggccactttgttttattctaattgatggcatataattttagtacagcctttcttctgtagattgtttcctcactttatacttcatagttatcaccttgttgactaggacttgactcattctttttgcctttcctaaaccttagtctgcctagaccaatcattgaagacccaatggaaacccctttcatcttctcatatcatgaacccttgtaagatggtttgaaggcttatattccattaggtatttttctcaccacttatcatccattcacaaaaatttatcaagtgtccaatctatttttaagtatggctgaacatgcattcaccgtaggtgacgcttgaaggagagaagagtgaatcagatttgttgcatgctctggaactgcatacaattttgttcaaggagtaggaaggcaaacaaaacacaatggtatacagtggtaggaacaaatgttctcagcttccaaaactatctttgttgaaatttcatctccagtggaaattttggcggtgctaatcaggggagaaaaactacttccattcttcaaaggcacacacaattgactcggctatgttgtcacatactgatgggattaatattttagtacagggaaggggtcctggcctgagccttgggaatcctgagtccttatctcaacagaccgtaagtaggaaacttgcctccggtaccatgtcactgcttttgagcatatcatcctgattgatgatgaattcctttatacttaaaatacaaagctcttctcatgtcccaggtaacgtgaaattttttccccctggataaatgttattcatttttccctttcagcaagatgtacccttatgattctctgatgcatgactaaactatacaataaatattattggaatactatgtattctcaattgtaacaaaagtgactgtgatctacatgtagctggaaacactcttcctctcaagaattaggtaagatggatccaatcccacattgactagattttgaaagattaattcgattacattactttgtggagcttacatttttatgtttatttctaactctgagctcttgcttatgctacattatttcagtttagaagtggtcttgtcatctcatatgcactgtatctggcctacgcagatagggtgcgctgctttattaataaatttccttaatgaaaatgtgtgtgaaaggatgagagaacttatgtttaaatcaatcgccccaccaaaaaaaccatacatttattgctacgcattcttgataagcaaagtggatagtgatgagcaaagtagataggaattcagttcaagaatcagaatgcctgggtagaaccctggctttaccattgctatgaatcattgtgtgaccttggaaaagttgcttcgagtctctgggtttcagtttcttcatgagtaaaatgaggatgaaaatagcaactccttcaataaatttttatgaggggaatacatctattaattcatataaattgcttagaatattctaacatgtaagtgttgctaattaatagatctaaagacctttgaacatttctaaactcatgctttgtattgttgccttcgtccccactcccaggccaaatttctattttcatggttattattttgtttaatatagagccgtttcaccatttttttttaatgaccaatagcctttggagttactagtccaagtggcttatcaaggcattttcctaaactaggacacattcctttctaaaaacaattctggaagcagtggactacacattcaaatatatattatacatatgcccatatatatatgcatgtgtttgtgtataagtataatatgtacatatttgtatagtcagttgctcccagaattccacgtgtgtgtttgtgtgtttgatctcatttgatcttcacagcaatcccatgaggctagcactattatcactttttacaagaaaggagactgaagcttaaagaggttaagtgagttgaccaagatcatacagttagtgtcagagcccaaatcagtcttccttttgcaaatctacctttaagcaattatgctgtattaactcccatcgtaaaatagaggagatcagatagagcgttcgcggacctaggttaaatatattgtcaggtcgatttattctaatacaccccacttacaaccacagtgaaaaagaaaacaattccctaaagcaattctacaggagtccatggaaatgctagcatttcagccaagcttagctcaaggaatatagagttaaaaggcatttgcctcctagcgatagccttcctgttgattcataagatgcaaatgaaatgttaatgtttaaaccaagtgggagaaactacttattttgagaggaaaaaaatatggtataaaagctctactctagaatattgttaatgtaaggagaactggaagaacaggacaagcaggcttttgagaaaaatcacagctgaagatagggcttaatagtttagagcactaaaagataaacaattttaaaaatcagtgtgtgagtgtgtgtgtgtgtgtgtgtgtctgtgtgttgcgagtctccaatctcgctggtaactcgcagttttctgatgaaagtgcagtatgtaacgattactagttggcatcctctgctggagaccagtctcacaaaagggtgaccctgtgatgcacgaaaggctatttaatgccccagcgaagtgcttcagggaccaagattttattattctttggtgatgagagttgtgatcctgcatccctgatttagagccacttagggctccgacagctccaccccggtgttctagaggaaaatcttccttcatgctctctgcctgatttgaaagcaacacagcttcccgatgttcctcctgggaggtggttcaatctttagaaattgcctaagaagcctgtccatctgctggagtgcctggctttcgggaacggaccaagacggacttggcttttaatctgaaataatttgaggattttctgtctataacttaaaatcaccgcttaactcaaagtaaaaaagtgacacgctctctagagggcttttgtagacattgggaaaatccgtatgacgaagtacggtttagaaattccggatttaatttcccccgggaaaagcaaatatcttctgttggtaccgggcagtcgactcacgtagtcttcctttaaaaccaagtctatgccagccgggtgtgaggggagtggtgggggtgagcagggggaggagagagattcgaaaagtacaggaggaatcagtccagtacaggggttgcccctgccaacaagtagctattcctgttaactcccaagaagcaagtttccacctttgccacttcctcctgccctttcctttccttttcccttcactcccgctcttggacccaaggttcgctccccaccgccaccgccctgccccactattctctttacaggacagaaggctgcagcagcacggcggagaaaaatctctgaggaatgagtcagtgggatgggcgtatgggtggagggagagggcagtcgatttttaaacctcagcgagggtgggtgggcagttggaagccagaggccttatcactggggcgctgcaacatcacagaaagtgttagtcccagggctctccctggcgcgcgcggctcctgtgcttgcttcttattggcggacctggccctgggggcggagccgcggtgaagcaccgctcatccgggctccaggaccggggcacgcggttctccctgatcccggagctgggctcagggctcggactcagtcctgcagcgcctctaggctgcggatccgcgcttcaaccacctgctttgcgctgcgtccggggaagtggggaggagacgggagggagggaggaggcggggagaggaggaaagaggcagcttacacacgccttccagtccctctactcagagcagcccggagaccgctgccgccgctgccgctgctaccaccgctgccacctgaggagacccgccgcccccccgtcgccgcctcctgcgagtccttcttagcacctggcgtttcatgcacattgccactgccattattattatcattccaatacaaggaaaataaaagaagataccagcgaaaagaaccgcttacacctttccgaattactcaagtgtctcctggaaacagagggtcgttgtccccggaggagcagccgaagggcccgtgggctggtgttgaccgggagggaggaggagttgggggcattgcgtggtggaaagttgcgtgcggcagagaaccgaaggtgcagcgccacagcccaggggacggtgtgtctgggagaagacgctgcccctgcgtcgggacccgccagcgcgcgggcaccgcggggcccgggacgacgccccctcctgcggcgtggactccgtcagtggcccaccaagaaggaggaggaatatggaatccaagggggccagttcctgccgtctgctcttctgcctcttgatctccgccaccgtcttcaggccaggtgagcaagggcctgggagcagccccagacagacgtgggcctggagcagtttcctaggtccccgtcccagcctcgcacccccgaggcagtgcgcccaggcgcgtggtggaggtaaggggaccgctgtcctggcacagagctgtccccgggctcggtcacctgtgccgcacgtttgggcttggctggttagctcaagtttgggcatcaagctggggaaactgggtgaatctccaggaacttggtgctccggggtgggcaggattcgcctgacgctctccccttgtccctgcggctcccagctaggcggcggactcttgccctctgacagttcctcctgtctctgggtatccaagtccacgtcactgcgccccgagcagtttttctttcgcttagttctcggatgaaataactgccggcactttttcgtgataaatcccctagtaacttccccttggtgagccgaggaagggatgggaggggtagagaaggagaggactttaatcacctccccccgccccccttgcgaaacctgctaaagcttaaaatcgtggtttcaacgttaccccctgcggtccccgtccattgtctgggcgggtggtgagtgaaagggtgaccgcaggcagataacacagccagaacaggaattagtaggtaggcctgggagacacctcagtgagaggtttgtgaatttccaggacctgctcatagagcctcagttctcagttctgtactgagtc

SEQ ID NO: 9682 - DNA, 6000 bp, Homo sapiens
aatttagattcatcaaatactaaccatttacaatattgaccttattgttttttcattctctctgtctctgagtcttcttactttaaaaattcaaacactgggaaatttttgtatatagttttcattattatatcccttctaccagaatttttgtacaatctatggacaaattttattcttagctttgttctactatgcagaaccaactgaatgttaattaagacatctcaggtattcttctaagatcagtaaaattgtcctgatgaatctagttcaatatataaaaataagttgctcttatttactcttctgtgctctggaaaatgagtgtacctataacattttgaattccatgttaggcagaacagatggtaattatctaaacttacgctcattctctgcacatcttactcacatgtttatcactccaagtccactctctcttcttctttacccacctttgagccttgcaaggacaacttctatggactgcatcatcaaggctgccttttcctctgactgttgggtttggccaatgaggaaaatgggtggaagaatggaaggcagaggagggcaaaactgagatttttttttttctcacagttctcttgccaggttgtaacatggcaatggctggtttttgttgttgttgtttcacttttgtttttgtttttgtttttctgaaaaccatagctcctgtcagcagctcttccatagctacttactggtttccagttactgataactccttcaagactttcaagcccaggggtggtcattggctccctctattgttaacccagaggtgcttcactttcccttgtgcttcctgctagccctgcctgcaccgttgtacatgtattctcttcatttaactcattctaccacccccttgactgttagtgtctgttgccggccagaaccctgactggtgcctcacttcttagtgttcctgcttccactcaatgctcctattccctggggtccttcaactaaaatttcccttctcctaaaaatagtttagcaccaagtctcttattttaatcaaaattaatctatcacatatctcatttggtagaggactcactagagctaaactcattgtgtaagctattctgaggatgctaattgtgtcctagggcatttgagttgtaaggactcattcttttttaatcttaagaaaactatctccaacgataaaaattgacattcagttgttacagttgatattatcatggtgtcctcaagtaagccagtccctaaatgtcagaggaggccagaaggtaagagccagttcaacaggaagaaaaagttgcctgatcccatgttttctaaaacatatgctttataacagtaatcttgtaaaatgctttaaaaataaaggatatttttagtgtttaatttttaagacttcttgttctgtaaggcatgatacttgtaataaaaagagaaaaatctgatgctaagtctatgcattgttctattgcttttaatttgcttttaccttttttgtctgaatagtcatgctttctggaggaccttatagtctaaactcaatgaaaatataaatactaatatagcctaatcagaatcaattgcaacctcataatcaattttgaataatttcactgttgaaaatagcataattgatagcccaggtggcccctccactcctttctctcatcaagctgtttgcttactttgtactagcttcagtatgactaaacagcaattcaccagaataaataaaaattacagagaagtaagtagtgtttcaataaaacaaatattataaagagcctttaaaataagggcacagcttttattccaattataacactagtgcatgttattgtaagtaatttaaacaatagctaaatacatttgtaaatacaatatctattcaacagcttggaaaccctctctctctctctctctctctctctctctctctctctctctctatatatatatatatatatatatatgaatatatatgtgtatatatatatctatatatgtatacatatatacatatatacacacacacgcagatataagaaaatacattatagtgatgaaaattaattataaaaatgatagatgatcatcaaaaaagaagtttgaaaaactgggcctctttctacactctgacccatttttctgaaactctgaatggcagctgccattttgacatgtttttcattttcttttggcaacaaaacatcaattttgttggccttaatatttttatttcttggcaggtgcccatcaaaacctccccccaaaatttcctacaacatctctaactgctttaagcttgtcgagacatttctgcttagtctagctttctttgaaattccattttgataacccatctcattaaaaagtactacagaggcctcatgtttatttatgatttaaacatggctcatgaagccatcattcaaatctctgaatgcactttctaatatattttataacaaataaatatccatatgcttttttatattctgataatgtttccatgtgctcagccatctatatttaatgaaaagctattttttttttcctggcaaatttcaaacatctatggagctaactaatgtgcaggcacggacttcctgtgtgaccttggacaatcttgttacatctccgtagattatttaaatctatggaatggaacattgtaatgaagatcacttttcaaaaatattgtaataattagaaactgtgaagtggttcagatttattagcctaagtttttaccatttagagatgtcaatcatgcataggaggtacattaacccttttaagccataaggtaatcactcaacaggtacttcaggctctttctgaagcaggacatatccttcctaatgtctcttctgctcttgccttccccagcttcctgcagctgtatgggtaaagtcatacccttgaggcagggaagcccttagacagctgctctcccaacaggtgggtttgctttgggtctctcttcctgttgggctgctctgagagatacttctgagcaaaccacagagttcctgcatttttgcctgagtcattcttgctgagttgaccttctctccattcacagccaataataattaaacaccgttttttctggaattgcactttatggatcagctgggatgaaagcatcttccttccttctttccccatcctctgcgataattttgttctaacaaaggaatgctagcaccaaaatttccagtcctgaaaccctttctctttccaatgtcctctgtaagctcgagttgtgggcatctactttgcccatattccaaggtcttgcttaggtaacctctgtagtcctttcttgagcctaggacttctacttttcttaccagttaccctctttcaggaccaaagctcaactcctcaaggccataactaggccctctcctctcaaactgatttatcaggtgcccgaatcttcctgaatgtctgggattcaacttttcagcagtcttcctccctacgttccatctaattctaagatgaaaccttctgattctttgttgtcctctgatccctacatgaacctgaggctgctgttccctgaagtcttgttctgtcagcatccaggcctgcttcataaaacctgtcactctgctaatggttagcggctgaacaaagagtcctctggccaaataagtttagaaaaactctgataaaaatattatttgggtttccttttcgcaggacttacctaagcctttaatatgcatctacggaggtaaaaataaagctatatattttttccaaagatatttgttgaagaaacatttgtcttctgcgtttcttaaaggccgagtgttctatggaacatactttaaaaatcccttttaaagaagcttagaccagagaatctccaaggtctctttcagttttacagcctctgagtcaacgattcaccaaaaaatattttgggggggagtgattgaagtggaaaaatgtgttagtgtttagccagctttgtccaaaggataagatgcactgtattttgcttactagggagttattttctataatggaagacaaagaaagcacaagacacccatggttttgtttgttcaatcactgagagtaagtctcaattattgagacttacgatgtgccggtgtgcttaattctagttatgaaattttaataatgaataatatagattctattccttatatgagtttccaaaagcattgtccagaacatctatattaaaatatcttatcatatacaatatatgtaatttaaaatgcactcagaaaatctgcttgttaaaatgcagattctagtgcttcaccctaaatagtctaatttagacgggcccaggattttaaactagcatcttatagcatacttatgtacaccaacatgtaagaactgctgctattaagattctgggatggtggttgagaacaggagcttgttgtcaggtggctctagattggacagagaaactcatactgataaggtgaggattgtcaggaaataaggcaggcatctagcctcgcattaagatgaggtatagaaggcaactgatacatactaagtgctcaaaaaatattaactccctgtcctccatcatggctcaagaaaatacaacagctgagcacacccacgggttgcttactatttactcatcagtttagtgtatcttattttgtttccatgtgaatttacttgtgaagagatgactggattctctccagagataggaagatccctcctggtttaattcctacctttatttatttatttttcaattagactcaggtattgataaaaattcaaatgtcagattacaaaggtgtgtgggatttttcttcccacgttacacaatttaagtcgactgttttcagatcaaaactcaagacaactccttcaccacatttcctgtttgtaactgaaacaaagtacacacaaaagattttaagaaacagaagagaaaagaatccgaggcacagataaagataagttttactgtcatgctgcttttaacataacagagcaacatcacctaggaaaaaagtttgtaggaggatttttaatccatatatttgtcttatggctagataaagatttctctgaaaaaaagaagcatgtcaggtaagtggcattttaaactttttgttccatttgtgtgtctaaaaattcacttaatttctaagtcctaacgagaagacccttagtatttagaaagtagttattttaaaaatgttggataacttttagtgtaattaaaatatattttgaaacatgttaatgagtataagttgacatttttcttttgaaagaaaaatgtggacagcattttagaacgtaaatctaattacagctgttcagtaagtgttcactgataattatgccatgtgaagtacttgttatttttaaagaagcttttgttgactatgtgtattcctctttagtttagtttagctattaaacaggataagtgtaattctaattcctcagagattaggcactatagtattttctagaaagcaatgcaattgtcaacattcagagagacaacaattttgaaaaggccagtgaaaattcaattgctgtgagattaatcatgagggttagatccatattcactcgctgttgtgaaagggttggatccatattgactcactgttatgaatccatgttgatggttcattcctcctgtattattttatgtacttttaatttattaaataaacatctttttgttgcaaaaggaaacatgcatattatgtaatgtgggagaactgtgaaatatatatattaaaaattcatacgtattttccatcaccttaaaaacacaaaatatgttttatttcctttcaaattttatttatatacattctatatagtttgcttttcataactgaaataataatgtacataatatatccagcttttttcactaacataaccatgtcccttttaatataacttctgcataatcattttaaatgaatg

SEQ ID NO: 9683 - DNA, 6000 bp, Homo sapiens
tacaaaagtgtgctttctgtcctctctctgtctctctgtctctctgtctctctctctctctctctctgtctccctccctctcttgcacttctgcatgccctatttctttcactcttgtcctcaaatgcaggactccatttaaaaggaaattactgggggaaataacagggaacagaggggtgattcagtccttggttgaccttacctagtctattgttttcaccaagtacagaaacacgacagtttctatgtgaactatagttgtaaaaatacaatgtgattaagaatattattgtagcagtctatcaaagaaccacagtatatgattttgctccacactatctatttttaagctataaaatcaattgcaacccttctcatttttcaaggtgttctttctttcttcattgactatgaagagacattttaataaattttaatgttttgaagccaggtagaatgtagaacttaaaatatttcttctaattctggctatgctaacttaaccttggaaatattaatggtttcttcaatgtatttctgaaaaaatcaacattttgattactgagttattaaattgccagggctttggcaatttcaaaatatctctgtctctgtctctttctccatctctctctctctctccttgtttcagtttgctactcaaaataaatattcaaagattacttattataattatctaattgaattatataattttatttctgaaagtaaaatgccaggtggaaattttatatatatcttacctaaaattattttttgtacatctataaaatgaatttttaacatgcatgtggtaaaaattcattttctttatatgtacatgtttatgaagaaatctagacaaatatacaccatataggtcttggtagtctttgggcagttagaattctttcttatccatttaaattttctttcttatccatttaaaatggtttcatgtaatgagcagatattgatgttgtaactgaaaaagaagtattaaactaaaattagtctttcatggatggaattcggcatggtgaaaatggtgataaaacagattgctatgctgaaagtctcatgaaattctttttcattacatgctaactcataaaactcataaaatttgagtgaaaaccaaaagaactctactctgatgaaggcaggactgctagctgtgccataataggttatctttcacatccatcaaaaatctattgatcatttaataactgctccttgattagggtggttcttccagcaagaatccaactctgtttgttttccctttttcctaattctgaggcatgaaactttataggatattttgattccatgcccaatcgtacatctcaccttacagcctctttattggtaatgaccttgctttcatcatgcttcgccatgccagtcagcccattctcatcctaaagtgcccaaagaaacataaactcctaacaagtcttctgtttctctgttctcctttcttccattcatttcacacacgcccacccaatttatccttttaaaatgttactttaaatatatgactcatatgctgaaatatctttagggagtctctctgacatgaggaaaaaacccacaccctttagcctagaattcaaagctcttggacagctttgtctgctccaagtcccctaatacagcctctgctaaaccggaatagcccactcactaaatggccttgaacttcaacactgtcaagtgttggctcttcctgtttcttctgcctggaatgacttagcttgcggtttctaccagtctgacgcctatagggccaagtttagattccatacttcatatgctcttggcccactctacccctaagataactccccctttgctaaaatcctgccctaccttctcatttgggctgtgctttatgctgcttgacttttttggtgcacatggatgcttcctcccagctaaatggtaactgccttaaaactgagggttgtgttttatctttggtattttaaaattatctagaactatgcctcttcagtaatctcttaagaattgacatacagcaagtattttttaattaactgaaaccttaaccatcatgttttctaagcattttggaaaacatgcaaaagtatagcactcccatttttatttttagtaagtgtttaaagataagtaagtaatatttgagttaaccattatgaaaaccacaaaagtaagtttaccttttgctcaacttcctgtttctgaaaatgtccttttctcactgagtgtgtttagctagagcatttaaaaagtttgtccaaaacacacaatcatggcttgcctttagcagaaataatgtgtgttcctgcttctctttgtaaataattgaatttgcctctgcagttcaagaagatcacgatttctttttgtgtgtgaaactgacttgcttctgttttctccttatgtgcagcagactataaggcagaagaaaccctgtgcaatcgggatatggtgggtagggaggataatagaagagattgacatgacttccatagaagagttatttttaagtatagagaacgcctgtctatccccatgctgaaagagcctttagaaaatattaccaggattgaaaggcggtgggggcaattcccatcacctgggatagccgtgccagtctgcggagtgttgctgccacctgctgcatgcaaacagccatggaggggctgttgcctgggtcttgcagctgcaggacacccgaagtgtaagcgttcagttaatattctgtggccatgcatctgaaattgttatactttcagaacctgtgtggatcccaaagaaaaattaatcaaatctgatggcttcaggccatagaagtttctagatataagaatcattaactaagccctgaacaatacacagaagacagatttgccgtatagccactaaatgcatggctcaggtagcccaaccccaatgagaggcaagaattctactgaaagtaagtctgtagcactggaaaataaacgaccatttccatgtttctgagtttacagacttttttggaacaactgtttcactttaatacaataaaagataggagaagtctaaataccccaaagagggtattgttcttagagaattcaataaatgtatatttgaattggtttctacttaggtaaattcctcttaatatgaaaaatggaacgagatcatagaatcccttctccaggcttgtaatgtgtcctgatttaatagggacaccaacgtgcaaatcaggatcttcatagtgcatctccaggactatttttgctgctatgcttcataaaactttgatttactagaatttccaggggcaatgggaagagatgaagctacccagagcagttatgtctcttcctgaccttctataaaggactttgagttcccaggccttccctggaaaatcactgtcagtactacctgacccaatatccccagtgacctgaaactcatgggaagttgggaaggggtgataataaaggtttggggagcactggactaggcaagcagtaactacatctaaattctgcaagaaatcattagctgaggaatactgaataagtatggcaattatcatggcaagtatttgcagtggtggtatagggggtgatctggacgtccaggaagacagtcgcccttgtttatttacatgaaaacctctcttctcccatctaaatttaatctcctgaatggcaaaagcatttccttctgtcttagcatcgtccatattcaccacgagtccttgcataggagagattggtgtatacatgatgacaacctgacgaaaattatctccacctcacctgaaaagaattcccatctcaggattacaactggccttttcatttgtctttggtcttgctaggtggtacgtatattctagtaatgagattagggtcacaggatattttaatcattcatacggttgtatgaagacacacatgtttatttgtagttattctttgtccatcaaacttacagtagtcctcagtctaatgcttgttttcttaatgttggagggtgatgacagcctattttatctcaggctgaaaaactaatacaattaaatcagagaatcatagcagggaacagtcatcgtgttctacgaatagccagacatttttaccaaggggtcactttcctgaaacctgtttgcggttctctgtaaatagaagtaactaggcagatgtaataagcctaatagctcactgaggtgggaattctctgcctttggattctgattgttactgccttgctttggcttaggcatggataaactcttctgtggtgaacaaaaatggcctccagccaacctggtgggagacttccctatctgacctccaaccttccctcgtcttcccagacgaggggtagaaaagtagccctcactcctccactcccaggaaatgtgcatttccctgcaagaggagagacaataaaatttggtttgatagctgacactattccctgttacttttcagattttattaaaattaaatgtgttaattctttgttctttcaccccagggcaattctggaaagaaaacatatcttaagattgaacagaaaaactattatgaaaaacaccaagctcacatttgttaaatgactttgtgctcttgaaaaaaatgtataaaaagcacattgccaactgctctgcgtgatatcctttgtttggattttagacgcagcttgactgacacagagatcctgaataagagactctttggatactgaaaagtctcttaaataaggtgatacacaaatttcagagaacaatttcaacattgttctgtcgaacgttatactcagtcctgaaccacattactttcctgtctacgtttcatttcctgggggcttgccaagtgataaacagacccaggcgtgtgtggtagagttcgggttttttagcacgaagtgggtggctggagtttgcttgaaaacatcaattgactttgtgatcattacagaaatgctggtgtaaggtgttcagaagacaatggagaaaaaatggaaatactgtgctgtctattacatcatccagatacattttgtcaagggtaagacttccagttgtcccttcttgtcggatgggccgctttaggggcggatggggcctctgttcatttaaaatgccttgtgactgctgctgaaattgatcaccaaaggacaaatcattactaagggtttcagttatgtatttaagcggcaggtataagagagatgctagaatctagaaatgattactaatgaacactaaaaataagaagggaatgggtcatttgtgccactgctctgaggcattttcacccatttcctttctaacaggatctctggagtaattggcaaattgtgtttcttggaaatgaaatgctctccaaatggtagccaaaacaactgcggaaaaattaaaaattacaaagccatcaacgctcagagatccttgtttaacttttttctctctcaagtactctctttcttttggatataacaagtatttctcatccaaatactaaggtctttgggagttgaaaacacgttgaattttaatgaggcatgtgtaggtatgaacctgggagacaaagtggaatccttatgacagtgggaacgagagcctaatgggcctatttaaaaagagaaggaagcaagattagttctgtattccacagtatgagagtatcatagtaagcctgagtgtcttaagaattaactgtgcttttcagacatagctatgaaaatattaaggagaatttctaaatcaaaagagatttggaatataatgctgtagataggatcagagccatattttcaggcaaaggatagctcacaggaagttacattaaactgtactaacctctgcctaccaaacttttgcatccacagaagtatgataattcccatttgtcaagtacttttacttttaagaggcttgtttcttctcagttgcttgtcatctttttatcttttccttttgtgagcttc

SEQ ID NO: 9684 - DNA, 6000 bp, Homo sapiens
aaataaataaataaataaataaataaataaataaataaaatgatgcaataattactaataaaatgagtcccttacatttttttaactagaaatgtcaaattgcatacatttaataataaaattagtcccttactttttttcaactggaagtgtcaaattacatacatttaatacttattgaaagacaggttaatatgtgttccataaaaagttttcccaaggaaataactatattcattcttaagtacaaaaggctattgattcagagatggaagaaacctaaagtaatgttatgaaccaagcctctaaaataaaataaaaaaataagggagatgttcaggcatccctattttatgtccctattcatgttcagatacttataaaaattacagcaaatttgacttattaaaataagaaattccagtaaaaaacatacctgaccttcagcattttcaagaaactaaatgcacaaaatatctcctttgcaaatgcaaatgaagcaaaactcagttatcgacagaataagtacctatattgttgctttacaaaccaattttatctaaacatatcatagtggaccatcttcagccatggcacatggtaatgttgtgtacagagaaaccaatcaaccaaccaacaaaactgacagcaaccattactaaatggcagaataaagcatcatggtaattgaatcgaaagcatgtatatgagattcaaagaaattgttgtaatgctggtcagcaaaaaaaaggcaaagaaatttttgaatgattgttgcaaaagtgaaatttttcagaaatattatcatctggcttttggttctttttaaaaccccagtggatgagactttcttttactttcagactcttataataccttacatagttgtaagcctatagcacactctcaatgtatcttagttcttgatttattttatcttgatttagaaggtttcatacttgatctcagaatattcttttcattaacagaagccagaattgatagtaccaccaaatgagtgaaaacaacagaaaaaagagtgatattatttgttttcctgttataaagtcaaagaagtaataaaaatactaacatcaggtagtgtctattaatagaataatgcacagaaccttagaaaatcttaatgtaacagcaaaaggagagagagcaaaaggtgtcatctcccaggccagataaatttttcagttcatagaatatactttgatttgttaaaagactgttccctcagattaaggataaagcatcttaataatacctctatgaatgggccccaaaggtttcagtaaactggctatacgatagtgcaattcagagggccaagtgtaccactaattcaaaagggaggactttgctactgaatccactggatagaagagcgaattaggctgatagttcttataatctacattattttgtctggatggctgtgacctatatacaaggtgagttgtactttttactttatggtcatttctagggcatagaattgctcttcacaaaatacatgaaaacctttgcataagtctgtgatctcggttaggggatggaggagggctggcatgatccatcagattcatcagagggagtttttgaaagcacatgtatgtactacctctataggccctcactggtattaaagtgagtacacgatatgctgtagcagtgctggggcagggaaaaggttgaaaaacaaacataacttgcttggatattgcatgttaagatgcatttagaacctgaatgatgtgggaatatccacttcattcttgcaaaggtgtgaagtaaggcaagtcccaagaatggttttgttagcagagcaaaatggccttcataaattaagacagaagcatttcacgtgccatattatcagggagaacttgtagggactcatgccttctttcacagtgccttgaaaatagcacagtgaagcaccacaagcaaccatttctcaattgttttctacttgattagcttgagtggctgacccagttgctgacgttcggagtagtattgcttgccatctgacaacacacaggaacaaactgttgcgtattccagagtcacagacctatttgaagggaatgagatgcctttggtgtattggtgatatcactctgatgatgttactttgtttttcagtttatatgataaccatttagaaaattatttgcttctaaaaaggatttaaaaagaagagcaagtactattaaaaaaaagcaacatcaaaaatcttatattggtcagcaaatataagtatgttttaattttttaatgttacttaaattagacacttcaaacaaactaaagcaattgagtcaataataattttaaattatattaaagaaatctatttttgaaataatagtatatttaaaaagccacccttatgtaaatgaattctgaaggaattacaaaaacaaatctaggtagagtttggttcctcattcacaaattcttgactttcatcagactcgtttaatctaaacttggttgtacctctagggagaaacacctcttcctaacttattctgaatccttagtgtggagtgaaactggcaggatgaagaaagtcttcaggtagggttgggactctcatctgcattctaggtcagctgtctggagattaagaaatttgcagttaacaggaacaggaacaggttgcaaataagaatttagttcaggtaatatgggaggtgtcagcaagtgtcagtgatcaggaaaataggacagcacaggaagaaaaaccaatatcaaaagaaaacatattgaatcaagggttagtgctgggtgctaagggtcgggggagagtgggtattagccacaaagacacagtcagggaatgtaatggagcatttactgagatcctttcatttttcaggcacaggaataaattctttaccttaatcttcctgactctgctaggtaggaatcattttataagaaaacaagcagacattgaacagcttgcccaagaacacacagatagtgagagtctaaatttgatcctagttctgtctgccttcagaacttatattccttccactgtaacatgagaacaagggttaggcatatggaattatagaaatgcatttaaatctaattacagagtatataaaccttgcttaacagtactcaaaaggcattagaagatgtggtttagggtgtgcttgagacaggaacagttgctttttgattctctgggggagtgagggaggctttaggtatctgtgcatggagaaatcaggcatggagatagctactatccatctgaagtgagaaaaaaatctcacatttaggatgaacttctgcaatcaaataagggaactatgagaaaagttttctggaccctgggtaaggatgggggtggggagaatcagaagtttgagaggtgtcagtgcttccagtcaggtctgcatgttttcgtgactacagatcctatcaagacctccctgcaaattcccacacccttcaatggctctagttctttatcagtctccagtcccttttaggcctaggagtgttaacagcttctcgctattgctagtccctgggtacgtcaccatgccttgttgattcccttaacccttgctccttggttaaaaaacctgttcaaaaatcccagctgagaatgcagcctgattcttgcaagatccacctgttggagcagaagtcagtgcaggtcagcagatgagtcactgcagactccccttagcaggcagatggatccaaagttcaggggatctggtagcaggcatcagactgctggagacaggatatctaggctgtgtctcaacatcaggtactgaagatgccagacttttggactcaagtcaacatatttggagtggagctgatttatatgcttcttgttaatggtctggtcttaatgtgtgtgtgtgtgtgtgtgtgtgtgtgtgtgttgcgtggagggtgagaagtaaggagcaagactattcggaacagaagcttgagagttgaggcccttggcccaacccatgctgtgcttaacaaacataattccatgctaactaaaccggaagttctgaactacagatagggtgtcaaggagattgtgtgtgcgcgtgcattgtgtgtgtgtgtgtgtgtgtgtgtgtgtaaggcccctcctctcaaagataaataataatggtcatttatgagtgcttgctgtgtcaatcactgttctgagtgctttgcttacaacaacccttgtaatcctggtaacaactacatttaggagggtacaaatattacaccaactttccagatgaggacgttggcacagagagatgaagaccgaggtctcacagtgaggaaccctctgggtggagaataacccaggtacactggttttagagtccgctgtccccagcaccacacaatactgtctctgtgcctgactctggacttgcgaggaagtgtgttggtgtatattattcaccttcatgcactcagaacctagcaccatgctggcacgaggcatggttatttgttgattgaatgaatgcacttttgctaggccgcgaggactgtggcaaaccccaacaaccaacagttcgtagggttagatcgcaaacttttctccgttggacggtgctgccgggcccaccctttccttaccacagcccggcacccaggcagcccctaaacggagatggtctgcatctgcaggcgcggggaaaggcatagcaggcagcgccctgaacaaatcagaaaaacagccttcggctctggagcccactccggcacggcctcaggtgctctaccccgcgggatccagggagtggccgccactcacagttgcccctcctgtccgctccggtccgctcccgccgcccgaggtccgcgacgccccgcccagtgggtggagtgtgaggcggggaggtcgctcgactcgccggcgctgtggcctcccgcggagccgctcagactttccctgccggcacatggacctggcccaaccctcacagccagtagacgagctggagctctcggtgctcgagcggcagccagaagagaacacgcctctcaatggtgccgacaaggtcttcccttctttggacgaggaggtccccccggccgaggtaaggtccccttggcgctggccctaacttgccggcggcgggacagtagtaggacccgggcctggcacccgcgagtttcgggtttccagtcaggcggggcgtcgacggcgccgagcgagggtggggcgcgctcgagtgctctgaatggagccgagtcaccgcgacacctttcggcccgagcagtcccctccccagcccctggggtcctccaacccctctgacccccgaggcgctttaggaatcctagtggtgaggtgtggccgctgctgtcttcagagaggtattccggagatggaagtagttttttaaagttatgtaacttttaattcagtttttcttttttccagtagggagaatgagaatgacaaattgagtatcctccttctctcagaatctcttctgtcctcctcttaccttcactgccttgccacttctctccctcccctccacccacctcgccgcagcccccagccttcttccatgcctaccatccgccaagcactttctgccttctcccagcctggccattggattctgccggaagagagataggggagagcacagaggagagaaagcggtcagaaggggagaaggggtagggctggcgtagagatggggcgggcgggttagggggtcggcgcgggggaggtgaacttgccctgctcaattgaaagaaaataatttcaaagttcttgtctcgaaggttgagacttcgcccaccttgcttttacctcctctcaatccctaaggaagtccctggctatttttaggccaagctcttttctgattcatccctagcaatgatgggaacattattcactctcatcaaagacttgtaaaacatcagagctttgacttcccagccatccaccttctgattaactcctaagattgg

SEQ ID NO: 9685 - DNA, 6000 bp, Homo sapiens
tgattctcctgcctcagcctcccaggtagctgggattacaggtgcccaccaccatgcccagctaattttttgtattttctttttttttgagacggagtttcactcttgttgcccaggctggagtgcaatggtgagatctcggctcactgcaacctccgcctcctgggttcaagtgattctcctgcctcagcctcccaagtcactaggattgcaggtgtccaccaccacgcccagctaatttttgttattttttagtagagaaggggtttcatcatattttgaggctggtcttgaactcctgacctcaggtgatccacctgctttggcctcccaaagtgctgggattacaggcgtgagccacagcgcccctttttgtatttttagtagagacagggtttcaccatgttggctaagctggtttcgaactcctgacctcaaatgatcctcctgcctcggcctcccaaagtgctggaattacaggggtgagccaccgcacccagccagaaattttttatatcttagatcctttacatactagatatagattacttctccctgtttggcatcactctattacatttttcagttatactgttaggggaacagaagtatttaatggaaaaccaaaagtccactttttgtggataaaaagtagatggatttaacaatgttaagtcaaactataagttgttaataagtttgagtttggggcattgatgtctttatagtggaatttccttcagccataaatatattatccatttattcaagtctttctaaatgtcttttaggaaggctttacaattttctcaatgtaggtgtaatttttgctaggttaattctttggtacttttaatttattcactataattaatgatattttaaaaaatttctagctggttattattagtggtttaggaacatttttggattttttaagttaaccaatatttggaaactgtgctaaactctgtatttaagtttttctgttgattttgattgtttttcatgaagttgattctctctcttacaactaatgacagttttgcttctttctttccaatcgacacctctttttatatttaatacctgcaataacagttatctttttcttgtttccgatttaaaagaccatgtctaaaatttccttacagttgaatatgacatttactgcagtttgatcactaagcataaggttaggaaatattttcttattcttatctcctttgcttttatgataaatatgttgttgaacttaagaaaaaatttattggtacttgttgagataatcatgaatttttcatagcaatttactaatataataaattatactgacagttttctaatgttaagccattttggaaattgttctgctttatatttataagtaaaagaggactataattttattttcttggattatcctttcctggctttaaaattaaaataacactagcctcaaagaaagatcttagtaattttataattctcccttttgaacatgaataagatagatctattcctcaacaatcctctaggtctgttatttatttatttattttgcaaaacaagtctttgattttgatttacttgcttactaatttattggcctatttaatttttaaatttttatggccaatttgccactttcagaaatttattcattttgtgtaagttttcatattactgttcacaatattgttttgttatttttgctatttgttgcatcagtattaattctcccttttcattctatattgttactctgtattacagtaataattttctgagtattacagaaataattttctgagtattacatgccacccgtttgatcaattaatctctaaaaaaattatatttattctatttgtgttcgtttttattgatttctgcctttagttttattattttttttcttctcattttgttgagttccttgtttgcttcttttgctcaatattgacatctgatatagttaaggtgatatattaattctgaatgctcctttaaatctgtccaataattttaaatgtcatttttttctttttcctgcagacctttctttaaaaaaaattatgtaagcaaatttcttctttttcaaagggtttttaatacaatgtttatgcttcattatggctgggagtttttccccttttgttcactcttctgtgtcccaagtctcttttaacctaaaaatgttgtttttaagctatttttttttttgaaatagtgtttcactgcatcacccaggctagagtgcagtgtctccatcatggctcacttcagcctcaacctcccgagcttaagcaatcctcccatctcagcctcctgattagctgggactacagacatgtgccaccatgttcaggtaatttatttttattttttggtagagacaggggtctcactatgttgcccagtatgatcttgaactcctggcctcaatcattatgaaactggttgcttaactatataatttgaatctggattttaaaataataaatgtaagattttatttttaaaaaattagaaaataagattatgagaggtgaggagaattatgctaaggtatacgtgttgggaaatttaagaaattgacttaaaaaaataaatatatgcattgtccttagtaagttaggagaaaacagcagaataataaaatataactcttaatgtagcaagataatatttagcttaatgaaagataagacagaagaaaatatactaaaataaaatataaaaaaattaaaagtcctattatatcagtaattacaacatacaaataggttaaggccgggtgcagtggctcacaactgtaatcccagtagtttgggaggccaaggtgggagaattttttttccaagtgtgcagttaatatttctctaatagaggaaggttaaaaataaagtgataggaaaatatatgggaaaaataaatgtaatagaatgatgtacatatgcttgtgaaaagacaggtataagaatgtttatagcaccactatgaaaaatgcttccaatttgaaaaacaaagaaatgttaattaatagaagaatagataaataaattgtaatagacagtatttacagaataggatactatacatcagtgagaatgaataagccacactacaggcaataacatggatggatttttaaaatctactgttgagtaaaaaacccagaaacaagtgaagacatatgctacgatgccattcatataaaattcaaaatcaggtgagcctagtctatggtgttagaagtaggagaataggggccgggcgcggtggctcacgcctgtaattcccacaactttgggaggctgagacgggcgaatcatgaagtcaggagatcgagaccatcctggctaaacggtgaaaccccgtctctactaaaaatacaaaaaaaattagccgggcgtggtggcgggcgcctgtagtcccagctacttcggaggctgaggcaggagaatggcgtgaacccaggaggcagagcttgcagtgagccgagatcgcgccactgcactccagcctggacgacagagcgagactccgcccccgtctcccaccgccccccccccaaaaaaagaagtgggagaataggtcaggtgcagtggttcatgcctgtaatcccactgctttgggaggcaaaggtagaaggagcatttgaggctaggaatttcaggccagcctgggcaacacaagaccccgtgtctggaaaaaaaaaaaaagctggacatagtggctgcacaactatcattctagctactctagaggctgaggtgagaggatcccttgagcccaggagtgagttatgatcgcaccactgcattccagcttggacaacagagcgagactttgtctgtaaaaagaagcaaaaacaaaaccccaaagctttgtcccagctccttatgagagggtggtagtagtaaaacacaaaagccttcaggaggtgaacacttgatgatttctttgtccttttttttttttttttaagagccaagaactctggaacaagaagaagaagacgaaggaggaggaggagggggagggggaggaggagaaggagaaggaggagaaggagaaggagaaggagacggagaaggaggaagaggaggaggagggccgggcgcagtggctcacgcctgtaatcccagcattttgggaggccgaggcgggcggatcacgaggtcaagagaccgagaccatcctggctaacatggtgaaaccccgtctctactaaaaatacaaaaaattagccgggcatggtggcgggcgtctgtagtcccagctactcgggaggctgaggcaggagaatggcgggaacccgggaggcggagcttgtagtgagccaagatagcgccactgcactccagcctggaccacagagcgagactccgtctcaagaagaagaagaaggagaagaaggagaaggagaagggaaaaaagaatcctcatcattaatgcaagtggaaggaaactcttcaccaaagaattgatcacatcatgaaaggtgaaatcattacggaattgcttaaatatataatttgaatctggatttaaaaataataaatgtaagttttttctttaaaaaaaaaaaaaagtccattggttaaattcagcttgaatcctttgccactacatcaagagctaacaggtcaacaactgatctccacaacctcccacctcatttcctttctcagtccaggtagcaggaaaatggaaaaaaaaaaatgattttttttttccaaacactttgtcagtttccccagcggtcacctttgaaaagggaaaaatgtctgaaaatagacaaagctgaatataaacatcatttaattccccccacacagacagcctccgctcctgtgagggcgtggggaaaacggagtgggagaagggggctagcgaggaggaagaggcgggaggtgcggcaggggcacaggtgacgctcctcccgcctgcctagcagagctccaggcgcacatccgcagtcagccacctcgcgcgcgcctccaggagcaaggatggagaggctggtgagcggggccggggcttgggaaggagggcgcagggcaggcgatgttgagccggtggccctggggcgggcggcgagtggaaggcgcggagcttcggctcttgccacaatctggtccggggactagatcagcggtgttgatggcagcgcttttctctaagcgctttctcttgctgagaaacggattttgccttccaaagggtggtttacaggcagctgctggcgtccagattctccattccaattgcctgaaaaaaagatgcaccaggccggggctccgggggctcttgatccgcgctgacgaagctggcgcatcctccgggcaggctcggctcggctcactggctccagctcccaaaactggggaggcacagcctattttaaactgcccccaaaagggaaagagaaatgctgtattggttccatattggcaccaaaagctgcggcggagatacagatttccaggctcgctttctccgggagagctcctgcgtctcctctttgttatgcagcccctttctccctcctagcccttgcctgggggaagccatgaaggatcagttaaagctgaagctacacttgagagagctgaaatgctctgtgatcataatgctttgaagggttaaccccgggtatctagagaaacagacattttgtttattcggaaccagcttacaagacaaaaaacggagaaggttttcatatatcccattggtatatgaaatccaaatacaatggtattggtataagaatccaaatacagtgaatgcctcaagataattttttcatgtatggtttgttggcaagaccacatagccaatgatttcactgtctttcttaacaaaggagaatggtggtctgtgagctacggtctactgcaagctagatgctgttaatcttctttgtaactatccttctaaaaatgaattattacctcgttttacacataaacaggcggaaaggctgat

SEQ ID NO: 9686 - DNA, 6000 bp, Homo sapiens
tgaaactttgatctactttactggtttttgtcttttgttttgggattttttgactctcaggtttattgtagagagagaaatcctgcaggtctctttctgcatcagttcaatcagtctttgctatccaatatctgatgtttcaaccaacatatgcacaaattgatataggtcaggtactcctgggtcataggcacccaaaaaaattccaaattattctacaactatttgctcttctttttgggtttagggaaatcttcagtgatagctcttaattcatcttgggttcaaggtttaaattctacagttgcctacatacctagctcatggaagggatgcatccttagaagcaaatggcattttgagttttaagaggactgttggggaagaaggtggtctgcatgagaggaaggcaaggaaggagatgcagaaaaagaaatatcagaaaaataaagacgaagaaggaaaactgaacatagagtgataactggaaaccaaaaaggagtagaatttaccaaggaaataattctactttgttgttgtttaagtcatcagattgctcattcactttaaccaaagaatcttatagtgaagcaattttagaactgagttttatttgtagacttttgcataccaattagaaaattatccattacatctgataaatcattttctctttcttttctaaggtgcttctcagataattgtttaagtccagtgtttcccagcatggccattgaaagcccaaataatctttggtgaaattatgctatttagagaggtgggcactagaattagaattagaataagtatatatatataggaaaaaggagtttttcctgtaggagtggaaaaatctgacttaaatggtcccataagagctggcaaaagttaaaagtaaagcttgtgtactttgtatcttgagcccccaaccttgaggatgagttgcctctaaatgcacacctgacaatgtgtctccccaggcaagtataacaccagagagaatgctctttctggatcaaaaccaaattctcagaacaaaaatctagatgagaggataatcttatctagttttattggtaacccacagcaaagtttgtccaaatgaatgccagtcaaatgaaaactacattggtctgggaggacagctcaaattaaaggcttatagggcctatgcctgtgttctactctatgacaacacttccagattgcacaatgcaaaacagaagcagaaaagagagaaaacagagatgaaaaggaatagcctgactccaccaaagatgccaatcaaatgggaagtgataacaaatcctaggtaccaaagtgagactaaatagccaaagaactcaaaatcaaagagcagagttcagaaccagtgctgacccaatgtgtcaatgcagactcaactgtgtgcagtgaggcacaagaagccttggtgggtactgcacctggcagagaactgggatccatggtgacatgcagtgcagacagtatctctgtggaaacttcaagaaaactacagaaacaagtgaagctcacacaaatgaaaacaaacagaggctaattattcagagcttgctctagcaagggagttgaccaccatcacttctgcttagtagagactcaaaggcaggaaggggagtgagaaaacttcatagttataaaaggggaaggtttcaggtatgctctgactggatcttgctgttggaagctggaggcaggctaagtaggagcagggcattttgtggtttgggaagcatatttaactttctctgattgatcctaagttggaagcaggggcaaaaattggggaaattgactcattgagcaagacctaattcttttgggccatttgctgcagcagttgtagtttgatttcttggactggttgctgctaaagtgtttttgtttcctgagctgattgctgcagaaactgtgggtcagagttagttgtattgctatttatggtctggccattgcccacttgcatatttagtctctcacagtagaatcctgacattgtagatattaaaaaaaaaaaactgcctttaaaatcaaaacaattgaactcatggagaaagagagtagaaggatggttaccagaggctgggaagggtagtgggagagctgggggaggaaggtggggatggataatggataccaaaaaatggaatgaataaggtgtagtatttgattgcacaacaggctatagtcaataataatttaattgtaaatttaaaaatcactaaaagagtataattgggttgtttgtaacattatggataaatgcttgaggtgatggatatctcgttttccatgatgtgattattatgcattgcatgcctgtatcaaaatatctcatatactccatacatatatacacctactaagtacccacaaaaatttaaaataaaattccttttaaaaataaagaaaaaaaccacctacctaatggaccacattttattttttagctattgaactagcagtcacaccataacagtatttgttcattcaacactttaaactttttaatgtactttcaaatacatcattctcccttttatccttacaacaaccttgtgatcctgagaggttaattacttgaggtcactgaatgacttttggctagaataaggattagataatattacagagtgacttgtaatatataactcaaattgttaggtatagataatccatacaaatggctttaaaataaatattttgggtttcatgctatgatgaaggatctgttccatttgcttccaatttagttgcgtaaagttgagataaaatcttgaaggaagggtcatagcaccatttaaatacccacaggtctgtcatgtggaagaagtattaggtttattcctatgactccagagggcagaactagtacaagtgagtagaagacaggcagatttcaactaagaatatgaaatgtctttctaataatgagacacttgcccccaaaagaaggtgttgacttgtgaaagaaccagttcctcatctcttatagtgtttaaaaagaacgccataatagaactccataatcctagagactcctttaactggtcacaccagctaacctccaggaccttcgtagatttcaagtttatgaaatgttgttgaactttgaaaagaggcacagatattttgaatacaacagtttaaagtcattcaaattctggatgaaattatttcgttatgctcctcaaaaacagtgagttctatttgaagttttacccccagactctcctttgaattagtatttttgcccatatacccatatattttcaagaaatttctttctttccttccttccttccttccttcctttcttccttccttcttccttccttcctttcttccttttgagatagggtcctgctctgtcatccaagctggggtgcagtggggtgttcacggctcattgcagcctcgacctcccggactcaagcagtcctcccaactcaactcccaagtagctaggacgacaggcatgcaccaccacgcccagctatttttgtattttttgtagagatggggtttcatcatgttgcccagacttgtcatgaacacatggcctcaagctagcccacctcccacttcagcctcccaaagtgctgggattacaggcatgagccactgcacctggccaagaacattcaaaactttaaaactgaaaattgtcctaataaggagtctactaacttaatcttccatcagcattgttttctgatttcacagaaaactttacaacaaatgtattgcattcattcttgatgttttaagaaattaaaggaattagacaaggtaaaaacaaaaacaaatctatctctttaaagatggcaaggactaggattttaatctgtaatcttaaatttttgaaaaagatcttttccttcttaatgacttctttttaaatggtccttcaggttgaacacaattacattcttttatagtatacagtaatgaagctgaaataaaacagtgagttctcttccacacgtaaattgtgattgttcaatgttctgcaaggtcttctgatggccccattctcaccctgctccttacctgcctctttaactctttaaatctaatcccctaatttttatcagaaaagtatttcctttttacgataggctgtggtttctgcctttaaaaaaacaatcctggggtttctctcagaatctggaagaagtcattgcaatggtaaagtaggtaagaggctggggtggaaagaaatgccttctgcataaatctagttagtctgagtcgttttttgacaacttccgggaccagacttcaggcagtgctggaaattgttctctttaccatatctttttttttttaactgtacatatttacatacatacacatatggtgagggagagaacgtgatgacgtgagactctccatggagagtaggaggtaataaagaaataaaacaggtgtctgaggagaggttctattagagaggggagaatagagagtaattatcgttcagacaggcaagagttctctgcaggtagcagcctgggaaagcgaactcgcgcaccctcttgggggacgggctcttttgctttctatttcttctcctgcagccagggtgcacacgtatttgaaacagaccgaatttcctcctcgatgtggcgtcaggttgacttttcgagactagcgggtatttctttttaatgactccaatgcctttttattattgctgttattgaggttgagggagaagagatcggtctaaattctggctgggtaagtggggggattctcggcgatgagaaacgggggacttagaagccggaggaaaatcagcagccccacatctccacttctccagtccgccctactctccacccgtgacctccagtggagaccccaggcggcagcatcagtatttgatcggcccttcgtcagcacgctgccagccctggccggctgggttcgccaggcatcacccgctcggctctgaagcggacgcctggccctgcaccgggctttggaaggaccctctctgcgctcgccccctccccagggtggctccgctttcgagcccgggcgcggtgcccaccatgcgcggctgcctgcggctcgcgctgctctgcgcgctgccctggctcctgctggcggcgtcgcccgggcacccggcgaaatcccccaggcagcccccggcaccgcgccgcgaccccttcgacgctgccaggggcgccgatttcgatcatgtctacagcggggtggtgaacctcagcaccgagaacatctactctttcaactacaccagccagcccgaccaggtaagacactcgctcccctcgctcgactcctagaacttgccagatctcagagccccgtcgctgctttggagtcccctgggaattgaccttgggagacttcggggaccaggggactttctttccctttctcctccgaagcaatcgctgccctgccctagctgcctcaacacgcctcggggacaactctgcttcgcctcgcgcctctcctggcctggtcaagggcattgctgggctttgcagaggcaccagttccccgcaccgtctgcgggtcctgggtccctgctgggtctttctccaggaaagtcctgatttctagggttgcggggtgtggtgtggagtgcgaagaagaaccgcacctcggttcctaatcccctgcagggaagaaacctaatttcaagtggctgattcagccagacccttctatttcatagcgcatggggagggagaactgctcagaatctaaaatggaaattgtgtgaaaatggacggaagctgcagaacctctgtgcattcaacagtcacttcctgcgtttttgtgccattgtcacacgttgtgcttcagagacgccagaagacctgggcaaagacgtgagaactgcagccatcagctgatcaatccaggttttgattttaaataaggatggataattgtgtgaaagttctagacctatttttgacaaaagttgagggaaga

SEQ ID NO: 9687 - DNA, 6000 bp, Homo sapiens
aagggcacattacaaagtatttgttaaaattcactatctcaatcaacaaaccacaaattgtttcacagaaggaagaagtataaactgtaggtttataaaaggtgtcaaatgctacgtcagcctgactagcttttggttttgctgaaaaacaaaacagcaataaacctttaaaaaaagttttgttttgttttgttttttaagaccagttttcgctctgttgcccaggctgaaatatagtgacaagatcatggctctctgcagccttgaactcctgggctcaagtgatcctcctgcctcagcctcccaagtagctggaactacagacttgcaccagcatgcctggcttttttttttttttttttgagacagagtctcactctgtcgcccaggcaggaatgcagtggcacgatctcagctcactacaacctccacctgccaggttcaggtgattctcctggctgctttattgtttgtagagacaaggtctcactatgctgagatgcaaaaagcattccttttgccccttcccagtccatatgctgtcagaggtaaccactgttcggagtttttaaagttttgtttctgactgcagaatcttacattttaattttatttggtaaaatggctccctttactattccaattagtagtcaacattgttccatatttatattactgctacctactttcccatcttagtcacgtattcacattttgttaaagacattttttattagaactaatttgcacctctttactacaattgaaggctaaatgatttggttttattatactttccattacactgcctaattacattgccacctcagtcatggttatctgtggcataccttcttgcttgaaatcgccttccctagagaagaacagataaaaatatcacccacaaattcaaactacaatgtccctggttcataaaaacagccaacctcaaaagtaagcaacatttcctagtatatctcaaacttctacatgtgcatataaattacattcagtagttaataaccggaaatttatcttctatggaggaaagacatgccaatacaatggaaagtcctactgctactactaataaaaatactcatggtaaaaatatgaagaaaaaccagctaagttttaagtttcaatatgataggcaacataggcaacagtgtacaattttaaatatttgactggcttcgtgttgggacttccgcagtttccaattttagatatttcaatttactgtttacttacctcaatatacaatagaatacttagcaaataaaatttcatacaaaagccacataaccaggaccactgtttcgtttttacaggccattccaaattaagagtcaggactttaaaatcgaccacactgtgcactgtggtacaagttttggaactcaaggcgcttaacttattttaaacctatactgttgtaggttcagtatccgaacaagcacaagtaagattcacacaactcatttgttgagtgtcttaaatacagacttagaagcaaaaaaaattaaaaagtttcatctcatctgggagttagttcatttgttaagttaaagggattattcctgtgaaatcatcttaaaggtttacagtaaagaacacaattctaagctcccaatcataagaagtaataggaacttcactggcatagttactggcataaaggtacagattcaatagttgtaagtttcctctaaattcggccagttatttctagggatctgccttcatcaggttacatgtaaatacccattttaaacagagataattgctccatgaatatattaattcaaggtagattgtgaataatatgactgttcagcttcatttctatcgccaagttatgtatcagaaagaacatcacagcctatggagactgaactagattgaagattttggatctaaacatacagaataatttcctggcaaccccttcgtaaatccatggcaatttcaacactgggaactcttcagcctcatttttcttacttaacagaacatgacaaacaagtactgagtgcctgacaatgagtacaaaaatgagtaagagtcagcaaccatgttcaagaagtgcagtatatgccgcgttcagtggctcacacctgtaatcccagcactttgggaggcagaggtgggtggatcgcttgagctcaggagtttgagaccagcctggccaacatagtcagacccccgtctctacaaaatatacaaaaaattagcaaggcgtggtggtgcgcgcctgaggtcccaccgactcggaaggctgaggcgggaggattgcttgagctggggaggcaaaggttgcagtgggccgagatagcgccactgcactccagcctgggcaacagagccagaccctgcctcattaaaaaaaaaaaaatgaaaagaacaaaacaaaaggagtgcagtatagcagaaaaacaacattctccaaatatgttggattgtatctgaaatagccaaacttccaagatcatgattcaagtggagcaaatacttcctatacccgtcaattatatttccctaactggaactctttacaacttgatgtgaaacaatgcaggtactgtgaatagttcatggttcttaaactttaaagattattagtacaaaacatacaattcaacattagaataaatatccagtatttaaaggaaaattaaagtaaggaaacatgttacagacctaagaccaaattaaactttcttggaatctcttcaggaacctcaaataccgatacacagaggtaatatttaggtccttgtttggggcagtatgagattacgttgaaagtgacttttatttcatcctcaaaagtgctattgaatagttggaatgacttcgttaacttaaaacatagttacgacttcttaatcgacttacaacaacaaactatggcatcgcagagagctttttaacgtttatgagcttcatctctttgagggtaaagacaagctccaaaacggcttgagacaatgcttcggaaaaatgttacgtaattaatacattaaaactatacaacttaatggtaaggagacatttcataaaaacttaaccagtcgatccaaaataattcctaattttacgtaagaggcaaacggtgaaagaccgaacattaactttgccaatcacctgaaaggagcagcgtggtagaactacccaggaccgcctcagcactcaggggcaatagtgaactactgaagcaacagctccacctactgatccaccctatacttccttaaatatgttggcaccccaagtctacagtgatcgcgctctctccccctcctccactcgctgtgacccaacccaaatctagttgagtcactagctcttaatactcatccccgtgctctttattccaatttcttcttcctccagaaggttctgcacagctcccaagcgtgaattaaactgaaaggtgtcaaacaccgcagttccagagttgagtctggaggtggaagacaaccaaaccactccacctggagctgcgggccggcgtggctcagcggtccgctcccgggaaggaggccccgggcgcttcacaatagcctttccatgttgccccactcggtcgcttctccccactcaacaacccacactcgtctccgaaccgaaaccctgaagccccccgggtcttgcctccgctggcccttcagcccgccaacagcccgagcctcgcctccgccccctccgggagccgagggaactgagaagcagagaaatctccctccgcccgtcttcgccctgaatctctcctcgcctttgcggctctccccctctacatgggcccggacccttctaccccaccggccgggccctgcccggctgcccttcctcaccctttcatcttccccgcctgctgaggccgtcgttaccaccgatatcaacgccgtcgtagtcgccgcccttaggtctccgcacccttagctcgggccactcaaccccgcaagccggcctcctagcctgggcagggagctgtgcgagcaacgaaggccgcgagagtcgagtgagggcttgagtctggtgggggcgggagtgtctcccgccgccgcgcttgtgccgccgcttctccacacgtgcactcgggtctctcggctccctcccgccgctgccgccagccagacccgctgccgcgctgtgacctttcaccccgcccctcgcgcgccggcgcgccgccgcctcacgcgcagccgcactgctcgcctccgcgcaccctgccccctccactccggaacctccatctttctcctggactgggccttctggggtcatgctcctccctcccacccgcttacgacactgcttgtggggctggctcggtaggccctggcggtaaaatccagatttttccacccctccctctcttgtcccatatccgcaagatagtttttctcagccccgttcttcccagtttgtggtctccagagtgaccttcaaacgctgttgcctcctagtagggttttataaagttagttcttctaaatgtaaagaaatctgtggaaagctcaagtttaagttaggtgttttaaaacaaacgtagttaacaatcggccagatagattggctaccctccagcacgcctcaagttttaagatcacgtgattggcccaaacctcagagcctggaattttaccggcggactccagagggacggaacgccaccgccatttcctgtccctcgattgtggcgtgaacgtcacttccttagcaatgcgctttaactcttgctgtccacattttccacattgtactttataacatactctttgtgaaaatttatcttttatttctttaatccaagaaaattaatattcaagggatccgtaaaaattcaggccccccgagatgtagagcgctgggatggaggaggcagggcggagctcgacgtcatgtgactggttgggcccgcccccccccccccccccaacctgtgcagctgaggacttcccctccgtggtgacagcctctgggtcctcggtcggtacagtctctgcacctcgcgccccagcaggtgagcggcgaccggtaactggcgagtggtggggatagagggggtggaaggaggcagaggaaggagagaagggagagtgtgaacggcgacttttctgcctgaggcttcctccccgctgtcaccctgcaccggcaaggagctcatttctccttaacccccgctcccccaagtgtggtcgttcccgctacttggggattcagatgtccacctttcccagggttggaagtgagtgcggccattatggttccctactcagagcctttggggcttcgggtagcagattgtttcagccatttcacagggtctgcagtagacattaggtcccattccttaaagcccattctttggcaaaggtcctcactgtccttaccctcagctcagggctgaggagcggggaggtagcaaaaaccctggaggcagaggcgtctccggtgagacaggcttgggagggactgtcactgatacggccctcactgcagagtcactgtgaagcttccctccgaatgtgctttctcagtgattctaaggattttatctgacatacctgcagggaaggttccgtagatgttcacgtgcttcggatgggactagaaaagtaaaagaagggcttttactttttcttctctgcagagaggacagttgaaggaatactgtcttcaaaacaggaggtgttagtaatgcgacagtctcgattgaatgaggaggcgttgaaagatggtattgtggtgttgtggtgtgcaggaggcccaggctggtttagggaagagtgagtagggttccctgaaaccgaaataagaaactgattgggttggaaatagttaaaccaaattgatttggccatatgcttaaaggtagaatcaagtcgagatgttgctgtctgcacatgttttctgccgtcaatccttccctttttgtcattttcccctaaaatactactgaattggcactcccaatctattccttgatcg

SEQ ID NO: 9688 - DNA, 6000 bp, Homo sapiens
agagtttgagggagcaaagttggatgtgtgtatttattccactcattcactcttcagctcactcctgcctgatgttcttcccgcatggtttccccaactaatattgcttgagccaaggtccccagtgacatctggcttgtaaaaagaatgtaccttttttcagtcttcatcctacagtgtcagcatttgacagagctaaacacttctttcttgaaatgtatctaatgtatctaatcttgctttctttaaaaccataaaaaaatctttttgtgatgtaatttacatacaataaaagtttttattcacaaggttgtgcaaccatcatcactatctaattccagagcattttcataaccccacaagaaaatctgtacacattagtagttaattcccatccctcactccccctgacccctggcacccactaatctaatttccattactatgggtgtgcctattctggacatgttatatacatggaataatacaatacgtggtcttttgagattggcttctttcacttagaaaaatgtaaaactaatttttgctagttaaaaacatctccttggctgggcacagtggctcacacctgtaatcctagcactttgggaggccaaggcaggcagattgcctgagctcagaagtttgagaccagcctgggcaacttggcgaaaccccgtctctactaaaatacaaaaaattagccaggggtggtagcaggcgcctgtagtcccagctactcgggaggctgaggcaggagaattgtttgaacccaggaggcggaggttgcagtgagctgagatcatgctactgcactccagcctgggtgaaagagcgagactccgtctccaaaaaataaaaataaataaaaaataaaaatatctcctctgcctgacttcctcctggcccaaatgctccagggctctgtgttagattctctttccttctctattactctccctttaggtgatcttattcacacccctaactttaaataaccacacgttccaatgactcctgtcttagtccatttgtgctactataacaaaatcctggagactgggtaatttataaagaacagaaatttattgctcacagttctgaggctgaggagtccaagattaaggttctggcatgtttggtgtccacctggcagaagggactgaaggacaaaaaaggggactatttagttccctgaagctcttttataagagcactaatccattcataggagccgtcatgacctaatcacctcccagaggccacgtctcttcatgctgttgcattggggattcagtttgaacgtgaattttgaaggggacacaaatgttcagatagcagcaactcccaagtccgtatctctcacctcgacctgagctctagactcatacagtcacttgcctacttggcatcttcacctggatgactaacaggattcccaaactgattatgtccaaaacagaagtcaattttcctctaatccaaaacctaattctctagtgggtctcatttcagaaaatgatgctaccatccaccagctgctcaagtcaaaaacttaataaaatatctaagtatatatttatgtatgtgattatttgttttattaatagttctggatccctgactagtctgtaagctccatgaaggacaggacagtgcctatttggttctccattgtatatccagtgcttagaacactgcccaacatgtgataggcaagcaacaaatatttgttgaatgaatacaaaaaaagagtaagacataattcctgctcttgagttgcacacaattttcttagagaaatgagatgtccaggtgtattgttaatgacaaagattacaaaattcagtgtcaaagtgttaagtagtaaggataatgctttgggagtttataggcagaatgactggggaaaactacatgaagagtgtgaatatgagtaagttttaggtgaagaacatgaggatgagagcatgcaaaggcactgaagcaaacttgagttgtttaggggatagtgaggagaccactgcaacttcagaaatcttttaggaaaacgagtctgtcactacgcttaatttgattaatggacctattgggaggtagactatgtagcagtaggaagaagtacaatactccagcaaatgggaagaactctgtagcaatcatactgatagataccccaaagaatcaggtattttgtatttaacgttttatttgggcatcagtataaacaaaactatattaagtgtcactgtaaattttgggcataaaaaacagaaattttcaaatctgattagaaaaattaatctgattttgaaaattaactttgtttacagctgaagagctcactcattatgcttcagaaaacgtttgatctactaaataagaataagactggcatggctgttgaaagctagtgatctgaaggactaaaaccgcagagatacttggaacttaaagaaaatacctggaagaaaaccagacgaatgaaggattttggcatagaacatttctatgttttttcattattgagatttctaatatgaacatttctttcagtaacatttatttgataattagtttctgctggccttaataatccatcctttcacttcttatagatatttttaagctgtgaatttcttcagtgaaccatgaaatatattatagaactgaatttctctgatacaaaaagaaaatgacacaccctgaattgagtggtatggtctcatttctacagtgaagtctgatgctttgttagcacagaatccgtacatgtccaataggtcgcttttgtaactgagataagaccaagaggataaacaggacaatataagaagaaacctctatgtcattactgattttaaaggttctgttttcaggcatataacatttccaggtttgtgtactgtaaagattataatgtcttcatttatttagcatgcaaatttaatagtcaaactttttgaatctgcatgttgatgatgattatcagaaagggtcttctgccatgctgtatctttatgaaagaaatagttgttttttcttaaggtaactatcagaggtgggattatcttgcctcctcacttagaataccaacagtcaaaaggaagaaccatcctctgagttttaaaaaccagaaggttatgttaaaatctgggcatttagtgacagatcaaatgcatacttgaactaagattggcttcagcttagcagtctttcatggtggaagtgacacatctggttgaaaataatttgtgtattttcagtaaccatgtatggcttccttctttatgtatgtgtgtgacttgttttgattggtaagttataagccagacatagattttagctctttaataaaaacttcaggggcacgtatgtcccagtacaagtgtactgactatcaagttttaactcagatgcaagctttggctctttcataaaaagtttttatgcatatgtgtctccatacaagtggctcattaaaataagaactttgtaaactgacttaaaatcagatattttttcaagagttagggaaagttgaagtgttttactgttttgtctcttgagccctttctctggggaaaaaatacatatccatctatctatctatatataaactgtgtatacattcttactgtttgaacaactattgcctttaattaaatgtttcatttttctccagagtccccaaagccacatggcattattatagtcatttttgagatgcctgtagagaatgaaagtattgactccgttagagggaaaatgggtttctctgggtgaattccaacgaagcatacctaggggtaacagtgaacctacctgggtttgttttgttttggtaaggatttatgtagtgtctggctgtaagcaagaatgagtggattataaacttgaagatttctctgttaaagtcacaaaaatgatcgacaaacaatatttttgtgatgtttatttaaacgttgtattttataacatacttcaaggaagagtatcgaagtaagttgctttataaattaagactaaattcgtatggatgcagaattcaattaataaaatttgagcctgttacgtaaattgaatattaataaaattgaaaatttctgagttgtagtttttcttctttttctacttaaaaacaaaactagaaagcctgcggtagtgaaacgtgtacatgggcccacactctttaaagaaattttgtgcaataataaaacccaaaaaggactctcatctcagggcagtttcatctcaaatacacagacgactggaacaaaagtactagcgaggcctgctggtccaatgtaaaggctgctagccagaaatcatgaaacgaacaggttgctaaatgaacagatccggcagcagtgatgggcctttaagagaaggtcagcgaaactgggggaggtacttggataacattttgcggtggaaagctccctcaccgcctgttgccggagtctgaatgaaggctggcggctccacggtctcacgtagttcggaaatcctccgggttcccgggtttcccgtatttccgtctccgcacctcgtccgcaccccggggctccggaggctgtcccaccggcgcgccgcccgcaggcaccggcggcgcccggctgccgcctctggggcggggcggggcgtggcgtggcggggcaggccggaggtgcgggacccacctcctgcccctgcctcctggacgcgctctcgggagccgattttccccttcccggcgccagggccgcgggccaggaggaggagcctcgcccgcgggcaccgcggggaggcgggcggcgcacgtgcggacaggcggggaaccccggcgccgggggcggggcacccggaagcgcgcgtggacctggcgcaccgagccgggcgggcggaggggcggttgggacggcgcggggaggcgggcgcgccgcccgggccgcggcgggctgtggtcacaggtgggcggctgcggcgagggagcggccgagcggagcccgggtcccggagactcctgccgtcacgcccggggctccgcgtagcagagatcgggagacgcgtctgtgcctccggggaagccgacccatctcccctccgcctctttggctgcagttgcacctccggccagagggcaggtaacttcccttccaaggtcattctcctggcggggtggtgcgcgaggcccgcccacgtcctccggattggcgggggcgggagaggcgcaccctgcaaggggcccgaccagttgggctggaccgcgacccctgagcactgccagggagcctggtgtgtcagccgctgctagcgggcatatgcttcgcctttccctatagccccgaggctgagttcccaccagcgcccaggcttggagcggagaccgctcggccctcccagcctgcacccgcaggtgagcgcaaccgcccgcgccccggctgtcccggacgcgtggtcggctgtcgccataggaacggctggtgcccagacggcgcctgcccaggctgggaaggggcggtgaaggcagctcagacctccaagaaccctggagccccctgtgtggccaggcggagccacagaagcctgatgaaaacgggaccccctccccctctctcttctcatttttgattgctcaggcgttggaggttaagcagagagagagaggcgtggacctatttacgagatgtaagttgtgttctttccacctttaccttctgagggcttcttacgcctcatggtgacaggtgcaaatcatgacacagaagggcagtatgaagcctgtgaagaaaaagaaaaccgaagaacctgaattggagcccctgtgctgctgcgagtacatagatcggaatggggaaaagaaccacgtggctacttgtttgtgtgattgtcaagatctggatgaagggtgtgatcggtaagaacagagcatttcttgacgctggccccatcacccttctgagaactgccatgtgtactttcaacctagccacccagaatgctagaatttgctcttga

SEQ ID NO: 9689 - DNA, 6000 bp, Homo sapiens
tgttggaagttctggccagggcaatcaggcaggagaaggaaataaagggtattcagttaggaaaagaggaagtcaaattgtccctgtttgcagacgacatgactgtatatctagaaaaccccatcatctcagcccaagatctcctcaagctgataagcaacttcagcaaagtctcaggatacaaaatcaatgtacaaaaatcacaagcattcttatacaccaataacagacaaacagagaaacaaatcatgagtgaactcccattcacaattgcttcaaagagaataaaatacctacaaatccaacttacaagggatatgaaggacctcttcaaggagaactacaaaccactgctcaatgaaataaaagaggatacaaacaactggaagaacattccatgatcatgggtaggaagaatcaatatcatgaaaatggccatactgcccaaggtaatttatagattcaatgccatccccatcaagctaccaatgactttcttcacagaattggaaaaaactactttaaagttcatatggaaccaaaaaagagcccgcattgccaagtcaatcctaagccaaaaggacaaagctggaggcatcacgctatctgacttcaaactatactacaaggctacagtaaccaaaacagcatggtactggtaccaaaacagagatatagatcaatggaacagaacagagccctcagaaataacgccgcatatctacaactatctgatctttgacaaacctgagaaaaacaagcaatggggaaaggattccctatttaataaacggtgctgggaaaactggctagccatatgtagaaagctgaaactggatcccttccttacaccttacagaaaaattaattcaagatggattaaagacataaatgttagacctaaaaccataaaaaccctagaagaaaacctaggcaataccattcaggacataggcatgggcaaggacttcatgtctaaaacaccaaaagcaatggcaacaaaagccaaaattgacaaatgggatctaattaaattcaagagcttctgcacagcaaaagaaaccaccatcagagtgaacaggcaacctacagaatgggagacaatttttgcaacctactcatctgacaaagggctaatatccagaatctacaatgaactcaaacaaatttacaaggaaaaaacaaacaaccccatcaaaaagtgggtgaaggatatgaacagacacttcccaaaagaagacatttatgcagccaaaaaacacatgaaaaaatgctcatcatcactggccatcagagaaatgcaaatcaaaaccacaaggagataccatctcacaccagttagaatggcaatcattaaaaagtcaggaaacaacaggtgctggagaggatgtggagaaataagaacacttttacactgttggtgggactgtaaactagttcaaccattgtggaagtcagtgtggcgattcctcagggatctacaactagaaataccatttgacccagccatcccattactgggtatatacccaaaggattataaatcatgctgctataaagacacatgcacacgtatgtttattgcggcactattcacaataataaagacttggaaccaacctaaatgtccaacgatagactggattaagaaaatgtggcacatatacaccgtggaatactatgcagccagaaaaaatgatgagttcatatcctttgcagggaaatggatgaagctggaaaccatcattctcagcaaactatctcaaggacaaaaaaccaaacactgcatgttctcactcatagatgggaattgaacaatgagaactcatggacacaggaaggggaacatcacacaccagggactgttgtggggtggggggacgggggagggatagcattagaagatatacctaatgctaaatgacgagttaatgggtgcagtacaccaacatggcacatgtatacatatgtaacaaacctgcatgttgtacacatgcaccctaaaacttaaagtataataataaaaaaaagggatattgtgaagagtaaatttggcagtacctgggacttttactatatattaaaaatattgtagacaacatcatgttttgagaagtgtttttgctgaaattggtaactagagaaagcaaaaggcattaaataacccactttccgaacttccagtagggaggcagcctctttctcacccagtttgcactataactccctacctcgccataggaaagtcaatttgaagtgagggatctgttagggaatgcagagaagacaaacattccagtggttccttgccccgaagatgacagaggaaaacctcatgaggactgaaaagtttgagtgtgtatgtaggaccaattcttctagcccagttaaatatcacatgagtcaccaggcctgctaacttgccttggaactaccacagagaaggaaaagctttggagggtgatggtgcagtggtatggcccgacagagaaggggacaagcatgccacctttagttctaggttcctgagatgtgcagaaggtagaacccagccacctgagaactggggtcctggagggtaggtgagattgaaggacaaagactgactgcaaaccaatgaatgaggcagagcaccctctgaggcttaggaactcgtggggttcagtagggctctcctcggccagccctgtgcactgcccttgtctacactgctgctggtggtggtgaactagacagtggggatggccaacagaaagggatagagcctctctctggccactcacacaggacgacatcatttccctctcaaatgaacatacacagggagttggggggttattaaagacctcaacttctccccaaaactactggagtctgtagtttgaattgtggtgataggaagaaaatatctaagtgtttctaacagaagtgagatattagtaatgagaattcactgatgagcttggaatcaggttaagatgtgggtaagggagccacctagccagagagaaaggaagattagcagaagagagttagaaataaattaactggaaaaaaataagcctgtcatacattaacgacttgacgttcctcaactattcagttgcagttattatctgaaaactaatcttccttttcctagctagtctcttgtctcttgttattgggtttgtgttcacattatctattttgaagattttcaaatctttttgttttctccccatataatcatggtaatggaacataaaatgcctaagacatgaatgaaaattcacatgtccttgtttgcttccttgctactttatcacaaatatttccaggacagcacatgtttttaataacttgtacgttcttataattataatatagatcctttgtaaacatatgaactgcaaaaatagaagactgtaaaagtcacccatattttaccattcagatatattctggttaatgtttgctgtatactatttctaactttttaagtcataggtaaactttcttaaaaattaaaatgtgtcagattacacaaactattttgtaaaccgctttttcattttcagcctctagaagagtgcctggcacatcctaagttttcaataaatatttgtcaaataaatgactgaacttatttccataccattaaatgtttatctgtggtgtcatttttaaccattgcacagaattctattgtgtgaaatatgataatttatctaacaaggccctgaagagctgcagaggaataaggccttgtgatggacacagaggtgctccatgcagtcccccttgaagtgggaggttgccctgctgctgggagtacttgcaacctccagcctccagttatcagcccctttcaggacttgcctcagctacagaaagctgccttcccagggtaatccacattgaagggcagatcatagaggagcccagtgtcagagctactctgacaggccatcttcctccagagtttcctgaggagggctgcttaagactgtcccatctatattgcagctcaacttcttcctctgcccagtcctgtttctcccctctccctgccatgggtgttaatctcagggcactgtctaataaatatattgcacactaaattttgtctcaaagtctgctcctgaacaacctaacctgcaacagagatgatgctgacctttgaggaactcccaagtctattggtaaaagcactcagtaaattctaacattactgcagttaccgattcctaactcaggttaaacaagcgatggcgcatgtataccatgataggttatgcagccattaaaataatgttctgggtgccatgtataacacatgatggctccagaagtcagggaagaaggaaaaaagaagggaagggaagagaagagaaagggagggaagaagaggggagggaagaattggacatcagataatcacttgagccctctctctccgtgaatttttcccaatctgtttctttccacatctcttgctccttatcagtctttgggccacctacagtatgagcattacttgggcaattactgtctctctgaatttggcatatgcaaattatagaaactaaaactggacatggccctacacaggtaagcacatatcagcatcgctgtgagcggtcaggactaacaagccttcaacacacaaaagcaggagtaaggatcaaattacacaaatcaaatcaaatcaaatcaaaataaaatccctgagtttgtattccagtaaagcccaaacctaggagggatccaggaaagcgatgagtgtggctgtcaaggtgcttccatctgtcagagtcacacattccaaagcagcagaaatcaactgacagcctccggttactcccccgcctcagcgaggcagggcaggcagcggaaagctcagcccatgtgaggtgcctcctgccaatcacagactacccttccctggtcctggaggttcaaagaattgcaggagggtagaaaagcacctgggtcgggtgcagactgcggagcgggccctaccgtgtgcgcagaaagaggaggcgctgtgagtagaccgctttccctctgcagggaatctcccgggctcaagggctgggttgctctcctgggagggaagctagcagactgggagggaaaggggaagaagttagattcttgattcataaagtctgtcatttttttctttgtaatttagggtattgtgactgtcctgttctcttttactttgaaccgttggaattgctttcttaatacccttgatataagtcttgttctcattaaacttctggagatattacgcagccatcctgctttcaacctcagatatccccacagaaagaacaagaaaatccaagcaccccgagaaaccctatatctcctgattaaatcgcacatagacagtcacctttgtagacccccaatttccttgtggagtcagaaaagcaatagaaagtttaacgaaatagctcgtgttatttcttaataatctgttcaggctagcagagagaaagtttcttggtcttcttgtcagaaatcatttggtcctgccaacctgtaatgaaatgtgtgaagcaatttactcccagttattctctgcaaacacttctgcttaataaatgtgtcagttgaagtaagtcaacaaagtagctttatctacgcaatgttatttttacataatttgtttttactccttaccaattctttgctccaccatgatctgcaggacataaagatatttttcattctgatcacattttcacacaaaatacaaatttaagtttcaaataatgctagtattattttatgtttgcatttgtttataaacctaaaactccacttctaactagttttaaagatttttaagccatttaagaattcgtagccagtcacagtggcacatgcctgcagttccagctattcgggaagctgaggccacgtgatcaggagttctagtccaggctgggcaacatagtgagatcctgtctctaaaaaaaataaaaataaatttttaaagaa

SEQ ID NO: 9690 - DNA, 6000 bp, Homo sapiens
ccttcttagagaagttgagcatgcctggcaagatcatttcatggaataagcagatgtttaaagttggatttttttttttttttttttttgagtactagcaatgcacagggaccgtgttcttaggttcttagtctgtgaatctagcaataggcagtccagatttctgagtcgtactatggttttgccttgtcactgtgaggccctactaggtgtaagcattctctctgaattttaatttcctctcattaaaataggaacaaaatttgctatcctttagattaggagctgaagattcatttccctgggaatgtttcccatttagcttcaagtttcagctcaaacatcaccttctttctgactcctttcattcattcctccaggcagtaaggggctaccatagtactttgtttatgcctgtattatatgacatcactgtagttgcttgactgtttctcctactgttctgtaaacttattaatgggtgagaatctaattttactcatcttgatggcttcatgatccagcacagtgcctcacacaaagaactattgggtgggtggatggatggatggaggaatggagacagttggcttaaccagatcctatatacagattattactggctccaaaggatgagtagataagaccataagaattggatcaatgtaaatcctcacctgccctttgaagagccaataagggcatctttgtctttaaatacagcaaatgttattcagattttgtacttgtctatctgtttacctcagtgtagatgatatgaggatggtataactatgtaaattgtttttgaaaataatttgtttccccacaacttttgaaggttttatttgttgttgttattactagttcagtcccaaacttaccctttccttttcagagagctaatggccatgcttttcttcaaggaaagaataatttatttgaatgaagtgggatacttgcataacacaaataatgctttgtctttatttatttcgggagtgttatctatgtgctgtcagtgacccaccttattctactatatcagttcagattttcctagtggtcaagaacagaaactgcctctagctagtttaagcaaagtaacttactagaaggacatgagggcatctcgtggaatctaaaaaggtttcacagtggttagaaggatagaagcaagggcacctccaggaatctcagcaagaattttgactgtttccagggtgctactataatgcagttccattacctattgggctctgtctcagctcaaaattcccaaggacaaaaactttaatggactcatttgggtcacctccaagagttccctacacttaacccctagactgactacaaacaagagcacaaacaggccagacacagtggttcacacctgtaatcccagctctttgggaggccaaggcagaagaatcacttgagcccaggagttcaagaccagcctgggcaacatggtgagacctcggctctacaaaaaaaaaaaaaaaaaaaaaaaaaaaaaaaaaaaaagaggcaggaagatagcttgagttcgcaatgttgaggctgcagtgagccatgatcatgccactgtactgtacttccacctgggcaatgggaataagaccctgtttctcaaaaaaaaaaaaaaaaaaagcacagatacacaaaagtctatctttacatgcatctaaagatgccctctcttaggataatcttactgcatccagaggtaaggtgttgtggatggagcagagagttatatttacaagtcactcatttaatacttaccagatacttcttaagcatctactatgcacagagacaaggaaagtttacaagaggctcccaaacctcaaggggctgtgccgttgagatgataaacaatatgagaggcatcatacatacgtggaaggtgattaaggcaacaggagtgccaattattcatgaagacaatgtggatctggagtttagaggaagaataaacttccaactggagcagatgggaaactttgtggaggtaaaaattaatttataccatgaaggataagtaaatgaaatggttcttggagttctcaaaattcattctctctccacatgttgaaaagttttatatcatatataatgtaacaaaatgtaaaatacgtagcaagggcagtacttggtgaacctggcagggaagggaacctgctgacccctgagaaaaaaattcactgtgagggaagaaactattaggttctataaacagaattcagcaacaagggctgttggtggaagaatggtgttccaggcagtatggtgattgcactgaaatctttccctgatgcagttactctgctggcaaacacatgtcctggggacaagaaagccatatgtgaaacagtggtccagtaaaccccataacaccttttggcttagaccaagcttgtccaacccatggctcacgaactgcacgcggcccaggaaagctttgaatgcgccccaacacaaatttgtaaacgttcttaaaacatgagatttatgcatggacttttttctttttcttttctttttgttttttgtttttagctcatcagctacagttagtgttatgtgtgggccaagacaattattcttccaatgtggcccagggaagccaaaagattggacacctctggcttagactgtattgatcggagaaccttcaaaaagagcagactacagcctacagggctgggcttggtggctcacacctgtaatcccagcactttgggaggctgaggcaggcagatcacttggggccagaagtttgagaccatcctggccaacatggtgaaacaccatctttactaaaaatacaaaaattagccaggcttgtggcacatgcctgtaatcccagctactcaggaggctgaggcacaagaatcacttgaacttaggaggcagaggttgcagtgagccgaggtcttgccactgccctccagcctgggtgacgaagctaagactgtatcaaaaataaaataaaataagcagactacagaggagggtgagcatttcccttgttctaaaagaaggtaagccgtaagggattggggaagtaggaaatgtgggagggctcagatggaagagcagcaacagtgcgagcagtagccaaaggagaggggagttttttgagttatcaggtggcaaaaggaacattacaaatgagtcttccgttacccaaatgagaaacaagttatggaatttaaaatttgcctgttaatattacctcatctacaggctagtgaatcctggggcatttgagttgtacataagtgattgtgtcagtatcttcccaacacccacccaaaccctcctacccatttcaagtcctccttcaccccagaataattctggggtcatcttatgcatttagctttttctacatataggttagaaacagactgtacagccattttcttgggctttcaggccttggtaacttatcttggtgcccacttctacctaacatgggataagcagtaatccagagccagaagtcaggagatctgaattattcaacaaatatttactgagcacctactgcggttctaggtcctggagatacagagatgaatatatttggtctgtgatctcaaggatagtttattgagacagattaataggaaattatgatgcagtgttgtaagtgctacgatgagtgctgaatcaaatctcatatcccagagtagtcttcatggcgctgtcactaattgagctggtcactctagtcagtcacttctcagggacttatgtgtagcatttccagctatcaaattcctaagtccacttactgtattctactacagtgtggcagttttgattgacaactagaaaggaatcaaggaggtgaagggattggcaaaatgaataagggagtatgcttgttaacaaggattgaatgaaattacacgaatattgagaatattttaaatgcattcattttaatgaaaactgtacttcgaagcatatgttagcagaggttgtagtgacggcaaattatacaaacacttgatagaaattccagaaattctcctgccttttgagaagcagtaggcatatgaactaaagggagtgaaatccaccttaggaagacctgccaaaaagctgattcttcaaaaaagtgttctcgaaatcttagtgtaactggcaccaacacccatccccaatgcctcgttttttttccagcagaactgacaaggtacaaacggaccccgcccagcctggaaggcttctctaatgttggcagagtaggttggacttgtttttgcacaaatcgcctttccctctttccctactccacttgcactgaatattgcactttcttccttactgaagcgggattcctgccttttttttttttttttgagacagattttcgctcttgttgcccaggctgcagtgcagtggtgtgatctcggctcactgcaacctccgcctcccgggttcaagcgattctcctacctcagcctcccgagtagctaggattacaggcgcccgccaccatgcccggctaattcctggcattttaaatacgataaattacttcaacctatgaccacctcaagctgaatataagtagccgcagacaccgtttgcatgacccaggaaccacaaacacggagcgaaggcctgccgggaccacgctgagcttcactactggcagccaactcacttccgggggtgcactcagcacagcagtggcccaacccgccctcaaccggaagtcttttgggctccggcttcgccgtcgccccgccccctggcctttgccccggtcgggcgggacttcctgtgtcgtatttccaaggactccaaagcgaggccggggactgaaggtgtgggtgtcgagccctctggcagagggttaacctgggtcaaatgcacggattctcacctcgtacagttacgctctcccgcggcacgtccgcgaggacttgaagtcctgagcgctcaagtttgtccgtaggtcgagagaaggccatggaggtgccgccaccggcaccgcggagctttctctgtagagcattgtgcctatttccccgagtctttgctgccgaagctgtgactgccgattcggaagtccttgaggagcgtcagaagcggcttccctacgtcccagagccctattacccggaatctggatgggaccgcctccgggagctgtttggcaaagagtaaaagtgcctagggtgtgaagtggggtagggggccgcgaaagcggtgtcctgcagcgtgggcagcctgggtcagccttaggacaccaaggatggtgtgcttcatttttagattatatttgaggttctgatatttgtaacccaagcttgtatcttttttctttcttttttttttttttttttccagacagggtcttgctctgtcgcccaggctggagtgctgtggtgctatctcggctcactgcaacctctgcctctgggactcaagtgatcctcccacctcagcctcccgattaattgggactacaggcgcgcaccaccacgcccggctaatttttttttaatgtattttttatagacagggttcttaccatgttgcctaggctggtcttgaactcttggacttaggcgatccgcctacctcggcctcccaaagtgctgggattacaggcgtgagccaccgcgccagcccaaactcgtatttttctttcttttttttttttttttcgagactgagtcgcgctctatcgcccaggctggagtgcagtggtgcgatcttggctcactgcactcttcacttcccaggttcaagcggttctcctgcctcagcctccagagtagctgggattacagttgcccactaccatgcccagctaatttttgtatttttagtagagacaggatttcaccattcgccaggctggtctggaactcctgacctcacgtgatctgcctgtttccgcctcccaaagtgctgggattacaggcctgagccaccgcggctggactgcgcccggcctagaagggc

SEQ ID NO: 9691 - DNA, 6000 bp, Homo sapiens
atcctacacatatatttaacttctgtgcaatattattattgcagtattacttataatagaaaaagactgtgaaccctgaaaatttgagacatgtcttagttaattaattaatttatttatttatttgagacgaagtttcgctcttgttgcccaggctggaatgcaatggcggggtctgggctcactgcaacctccgcctccccagttcaagcgattctcctgcctcagcctccagagtagctgggattacaggcgccggccaccacgcctggccagttttcgtatttttagtagaaatgaggtttcaccatgttggtcaagctgatctcaaactgctgacctcaagtgatcctcccccctcagcctcccaaagtactgggattacaggcctggcagtctcagttaatttagaaagtttgttttaccaaggctgaggactagctggtgacacagcctcaggaagttctgatgacttgtgcccaaggtggttgggacatagctggttttttacattttagggagatatgagacatcaatcaatatatgtaagaaatacattagttccgtccagaaaggtggagactatttttctttctttcttttttttttttttgagacggagtctctgctctgtcgcccaggcaaaagaatatttttccatttacctattaatctttttgttattgatttatgcagttacttatataatctggacacaaatcctttgacagatatatgtaacacaaatattttcttcccctctgtaaattgtcttttgacaatttgcagagtggtcaacaaaagttcttaattttaatattgtccaacatctcttttttttctttcatggttaccatattttatatcttatttaagaaatgctggccaggtacagtggctcatgcctgtaattccagcactttgggagaccgaggtgggctgatcacgaggtcaggagtttgagaccagcctgaccaacatggtgaaatcccgtctctactaaaaatacaaaaattagccaggcgtggtggcgcgtgcctgtaatcccagctactcaggaggctgaggcaggagaatagcttgaacccgggaggcggaggttgcagtgagatcatgccactgcattccagcctgggcgacagagcagagactccgtctcaaaaaaaaaaagaaagaaaaaaaagaaatgctgacttactccacaatcataaagatgttctcttatgttttcctctaaagacatttttttttactttaacatttagataggcaatctatatagaaattatttttgtgtatgttgtaaaataagggtcaaaataatttagggggtatggatattcaaatggtgtttatttattgaaatcaacatcatttccttcactgtattacagcatcatctttgttatatacattatgtgtgtgaatcactttctgaacgctgtgttgtttcattggttgccctatgttatctgtgtcaattccactctgatataataactatctttaaaataggtcttagattgggtaatacaatcctccaccattattctttaagattgactttgctatccttggctctttgcacttccaagttgactttaaaaagtcatcttgtcattttctatactcacaaaacctgctgggattttgttttagaactgtagaatgttttgagaaatgttgacatctttacaatatgagccttccaattcataagcatggtatgtttccatttatttagatcttcttcaatttctttcagtaaaattttatagtttttaatattgaggtctagaagatcttttgttagatttattcctaaatctatttatataaataaatatataaatgtattccttagatttcccttttctatttctttgtgactgatgtttgatacaatttatttttgtgtattttaatttagagaacttgttaaatatatgttcccttttaatttcatattttcctcttctctctgactatattagattctattaacttagagcagcagtctacttttgtgtatatataactaaaactttatcatatgtcataataaatgttttctgatgttgtaatcactaaggacacaaatattctttactcatcactgatacttagattctttcacttttattgtttgtctcagaatagttggtgctcatttctgtctgggaggtgctttctttttatctcttctctttctccttctatctgatgttagcaaaataataggatttaagagccatcttaatattatataaatggctcaagactatgccttgggagcctagggttccagtccttgctttgtcccttctgagttcctctgaaatagaataggagagaatttatgaccagtgtttcccaaattcctagcgtaagaattgctagaggtgctcgttgaaaacaaagattcttagatccctaccgagatctactgaattggaatttccaaaggaaaatgattcttatcctcagggaagtttcactcacataggacaagattaagattccttccatctctgatattattcgattctgtgaatactatcattatactgccataatcaaaagaagaattttgtctaaacaaaggagtgtcagaaaaccactgccaatactccaaagtttagtatttgggatacctatgagcacaaataaattggtacattgcatacaggtgctattccatctactctgccagatcaaggaaagccacaacataagtggatcttcaaggcatctgtgcctctgctagttaacttgactagtaacttctgaccatttattttccagccaaagtcattaaccaaaccaattcagaaatggcagtgcttcctgaaagaataactataccttaattattaatgccacagtcagaaatgaagctggactcttctttgggtaaaggttggtgggagacagtagaaatgaggggtgtaatagaagctgagaagatatggtcaaagtctgagttaaagtttagagaggaaaagacagtttatcctggccctatttgtcaataaattatttgaatagttaaagtaaaaattttgtgagggatagagttataggttttctctcttgtattttcaaataaaataattcattctgatgttgcctgaccttgttgatttagtcttcatttttcttatttcttttatagctctctagcctttcttttcccttttcttttgacaaacaactagaggggcaccatgctcttttcttatccttttacttctttggcttgacaaaaataacacagcataaaatgcacctagcattatgatgtttgttcttgttcctcttctgataaggactaaatgtataattaaggaaaatggtgttcacaacagtacctagaaagtaactggttcacaatttttgctcaaattaaattttatttattaaatgaaagaatagattaatcttgaagtgagaaaatgaaaatataaggagtgactttagcaaagaagaacaatggttcccaaatgtatatcaccaatccttttctctcattttctttagccccacctctttaattgcttataggctatttctagctgaacttttatgatgttgaaaacaaaagtctccttccttccttcctttcttttcttttctttctttcctttctttcccttcttttctttctttctttcctttctttcccttcttttctttctttctttcaagtcttgctccgtcgcccaggctggagtgcagtggtggggtctcggctcactgcaacctctgcctcttgggttcaaacgattctcctgcctcagcctcctgagtagctgggactacaggcgcgtgccaccacacccagctaatttttgtatttttagtagagatggggtttcactatgttggccaggctaatcttgaactcctgagctgtgatcagcccacctcggcctcccaaagtgttgggattacaggcgtaagcctctgcacccagccaaaactcaccatctttcttatcttccaaactcagttttatgatgactttccttctccaatgcattttaatcctctgcattcctacattccatttatgtaacctccatacctgaataatgactgacactaactccacttttcccagctgtcatggcatagtgaaaattccagatctgccacttagtggacaggtactttgaacaaatttcttaacctctgggaacattactttctataaaatggggatagtaatatgaattagaataaatatatatgttatagatatacaacatagatgtaattcatatatattaacctttcaatagtagatgttcaataaattacagctattgttaccctgaaatcagtttttctttttttttttttttggaaatggagtttcgctcttgttgcccaggctggagtgcaatggtgcaatctcagctcaccgcaacctccgcctcccaggttcaagtgattcttctgccttagcctcctgagtagctgggattataggcgcccgccaccacacccagctaattttttttttgtatttttagtagagacggggtttcaccatgtgggccaggctgctgacctaaaacgatccgcctgcctgggccttccaaagtgctaggattatatgcgtgaaccaccgcgcctgaccatggaatcagtttttcaatctgtgctcgaggtgttgtgttcttaactatcttctactcctttgcaaagataatctttcttaaacatagactttctaatcagttctctagcattgtttcattctgtctttggcatgttttcactttgctgtgctgtacttttacacattctttttaactatagcttcctgctttgctctggatcaggaagctattgaagctgacacccacagagttaaactgagttgctgaagccaccagctccccctcccagtccttcttttcagagtaggctggcagctgtcctaactgcctactaaagccaaatgcttgaggagagagagagagtaaggagccagccatgaatcctttccagaaaaatgagtccaaggaaactcttttttcacctgtctccattgaagaggtaccacctcgaccacctagccctccaaagaagccatctccggtgagtccttagattcaatcctgcctctgagaggaatggcctccctcttttggctctcttccttgggctctggagcttccagctgagctgtattagggtattaaaatgcttctctcttggatttagaattcacctgaaaccaaatctaaacagaagcttcctttacataagaagacaaagcagcaggaagaggtagtcaaagttcttcagttgggatccagggacttgctgaatttcattgcatattctgtttccctgggggaaaaaagcaattcgaatgtccagggaaacttggcaagcattcttgtctgaagaactgtgtgtgattgttctttctttaccaatataaaaactctgcccttagttctccctgtgtgcagagtcttctgctgaacaccaatggaagtttcagaatagatccaatttctgttactatgtgttcccagtttactgtgggagataggacagagaaacagagaatagtaatgttttgcatttatatactcgctaaagcacttctaaactcatcatctcagtcaattcttacactaaaattctgtaagtggggaggatatagtaatgatagccaaaatttactgagttcttacagtgggccaaaaggtgatgttattctcatttctttggaataacagaacagaggttttgagacaggtgtagtgacaatgccagtatcagtatgttaacacagccagtggcagtgttgcctaactagctaacagtgtgtcggctaaactccagattgcataattctcaagctgtgagctgcaaaggtaagaagcccagttcattgtatgtttcaaacaagctattataaaacattaaaatatattaatatttaggaggatcatttatatatatccctagggttaa

SEQ ID NO: 9692 - DNA, 6000 bp, Homo sapiens; identical to SEQ ID NO: 3729

SEQ ID NO: 9693 - DNA, 6000 bp, Homo sapiens
agtcttgctctgtcacccaggctggcatgaagtggcacaatcctggcacacttcagactcaacctcccagcctcaagcaatccttccacctcagcctcctgagtagctggcactacaagcacgtgccatcatgcttggctaattttttattttttaaatttttttgtagagacgaagtctcactatgttccctatgctggtcttgaactcctggactcaagcaatcctcccatcttggcttcccaaagttctgagattataggcatgagccaccaagcctggccacactttcattttttgaaagaatttttcctagacatagaattcaaagttgacagagtttttactttcaggactttaacattcttatttcattatattttggctttctttctttctttctttctgaggtgaagtgtgaagtcagtcgtacctcttatctttgttctatatacacaaggtggattcaatgtttctctggttgcttctaatattttcttttgatcattggttttcagtagtttgagtgtaacatgccttggtgtagctttttttggtgtttatgctgtttgctttctttctttctttcttttctttctttttttctgacagcgtcttgcactgtcacccaggctggagtgcagtggtgtgatctcggctcactgcaacctccgcctcccgggtttaggcgattctcctgcctcagcttcctgagtagctgggattacaggcatgcaccatcctgcctggctaatttttgtatatatacattttttttttttaagatgaaatttcaccctgtcacccaggctggagtgcaatggtgtgatctcggctcactgcaatctttgcctcccaggtttaagagatccttctgtctcacctcccgagtagctgggattacaggcatgcaccaccatgcccagctaatttttatatttttggtagagacaaggtttcactatgttggccaagctggtctcaaactcctggcctcaggtgacccgcccaccttggtctcccaaagtgctgggaatacaggtgtgagccactgtgcctggcctagtttattttcttgaatctatgggtttatattttttatcaaattttggaaaattttggccattattacttcaaatattttgtatcacctctcctttctgagtctctgattatacatgttagataactttgtattaaccataggtcaccaaggctgtgttcattttattttaaactttttttcgctctgcactttaatgtagataattatttttcactgttactttgtttactgatcttttcttcagcagtgtataatctgctgttaagcccatagagcaaaattaccaattcagatattgtagttttctgctctagaagcttgatttggttctttttatggttttcatttatcacattatttatgtttctttaaattcttggccatatttataatagcttctttaaagttcttatcttacctgcttgtaaccccagtgcgctgatgccctctaaaacttaaaaaaaaaaaaaaaaaaaaattaaagaagaaaagtgaagttcttatctgctttgaaaactaatttcatcatccttgtcatttctgggtctgtttctattgactgattcttctcccatttgtgactcatgtttcaatgcttcttcacatgtgtagtaattttttattggatactaggcattgcatatattacatggttaagtacctgaattttgttgtctttctttaaagactgttaagtttcattcaagaaagcagttaatttacttgcaaatcagttttttcagctttgttcgagtgggtttagaatagtctttactattgggctaatttagctttaaagtgtggcctttttagggtctctttaccaaatgcttcaggttttaataagatttaataagatttcccattctaatcagtcagagcctaaatgtttccaaactctattcaagttcttgtagctgttcagcttaaatttccccagtaattgttatttaccagcctcatacaatctatccttaaagttataccaaagattcacaggaatccttatgtatatttctggagctctttctctggcaccctgccccacaaatatcatttgtctcaatctctattaattccaatttctgtgtcctcaacaaaccctgcttggctttcttctatcctgtgcttacctccagaaagaaatctgtggatattctggggactcatcttgtttgttttccttccttccaagatcacaactttactatgccagttgtccaatgcctggaaacacttgtttcatagatttggtccagttttccgttacttgtagtggaaggtttagtctggtatcacttatttattcatggctggattgctcttaacatttggaaaaacataaactttctattcaatagtaaaatacatactggaaaatttcataaatatagcatacagcttgatgaattttcttttctttttcttttccttttttttttttttttgacacagggtctcactttgttgctcaggctggagtgcagtggcacaaacatggctcactgcaatattgacctccaggactcaagcaatcctcccacctcagccccacaagtagctgagactacaggcgtgcaccaccatgcctggccaattttcagagagggtttggccatgttgcccaggctggtcttgaactcctgagctcaagtaatctgtctgtctcggcctccttggcctcccaaaatgctgtgttgggattacaggtgtgagcaagccaccatatccagtccagtgaatcttcattaattgaaaacaccatgtaatcaacacctggatcaataagaacattactagatctccagtagccccttattgctcctttctaattattaacactaataattataacttattggttacccttgggtaaccaatattttacttctattaccttatatgattttttattttgaacattatgtaaatggaatcatatagtaatcttttttgtgtctgacttatttcactcaatttttatgattgtgaaattcatgcatgctttgcatatggttgtagattattgtctttcctgtatagtattctactatgtgaatattcttcttcctttttttttttttttttttttgagaaggagtcttgctctgttgcctaggctggagttcagcggcatgatcttggctcactgcaacctctgcctcccagtttaagcaattctcctacctcagcctcccaagtagctgggattacagatgcctacaaccatgcctggctaatttttttgtattttagttgagatggggtttcaccatgttggccaggctggtctcgaactcccaacctcaagtgatccacccccgcccccggcctcccaaagtgctgggattacaggcgtgagccatcgcgcctggtcagaatattctaaaatttatttatttcatgaacattcttatacatatgttttctggtgaatatatgaatacatttatgttgagtatatatctaggacaaaatttatgttagttcaggcctttcttctgaactctagacctacatatccaaatctacttgacatctccatttataggcatttcaaatttaacatattccaaaccatttgctcctctttctgtgttccatgagtcagtaaatggcttcttaatccatctagttacttaaggagtcatccttaatattcctttttgttgacccttcccggcaaaccaatccgttatgaagtcccttggataccatttctaatttatacatatcttgaaattatctacctctttctgtctctaactcccattacactagttcaagccccatcatttctggctttgcctgacgcaactgcctccaaatggctttccagcagcccttcttgcccttttccacactattctccacaaacagcctgagtgattcttaaatatgcaaataggatcctacttaatagtctttattagctgcccattgaccttgggctgagatgagacaagggccagaccatgctgactcttattggccacattacagatttcaggctgtattttggaagatatcttaaggtcaacgggcaaagtttctccttgctccctacactccatccacactgactcccttttagttcctagagcacaagaagttctttcatgccccgacaacctcacacaatatttccttggcggggaacattctctaaggctcttcaatatgcctgccgcttaaaaggcacttattcagaagtcttttccctgatagtccaaaattaattgatcattgcacccactaattttccctcccaatactgacaatttgtagttctgtaactatttatgctttaatatctcttgctccaattactccttaaattccatcaagtgttatgtccactcctgtaaccccgtgcttaacacggtgcttggcacatggtaaacagtcaggaaatgcctgtttaataatgcatgaccgatgcgaaggctggaaggggtcgcagggtcagcatctggcacttctctgccatggttagtttccttcttgtgtgtgggaatagacggggccaggtcttctccttgctcacccagagggggcttttctccctgtcccctttataagtgtctgctgtagggccgcgtgtgagagacaaaatgcctgcagaaacagggcggcgagcggaagagattggccctatttctgaagtcaacgtagttctgtcatcagaggatgctgtacttttctggcgcaggtgcgagagaagctgccaatctctcctggagcgggtgggactaaggagggccccgggagctggggggttgttgtgtccttcctgcagaacccgattggcctgggtgagctgagggaacgggggcgtggtttgattccgcgggcgcgagccacgttggacgcgccgcagcgtcgccgaaaggtccctcccaggccccacaatgcacttcggggcgcgtcactcggagcggcgggtcccgtctcgacaggtactccccggcccctcccagtcctcttcttcctttcttaggggtcgttcgaatccctgccggcctctcccctcccgctccctgcctctcgccacagcctcggccttcgccctcgggattgaagacctaccccacgggcaggagccaagtccgtgcctttgggatgggagtcggggccgcggagctctggagggacgggcaagcggggaccccgtccccttcgacttgagggttctctggggccaggcgggcggcggttgcgcctcgtctgagccgcctcgggtgttgggcagccaggaaaggagtgtttgaaggggagggacagtcgcacttggctgtcagcatggtggtggggattccctggcgcccaggtgtcagaaacacggtgatctacctgtgtaggtggcccatgagagcttgaggtggcatttcctatttcttttaggcagaatgggacttgaaccagtgtcttactttacgttttgtggggatggagtgagccctgagcccagatatttgcccgcgttggctcacggaaatctcttgagaccctgtctcaagagtcactttgggaacgatgtggcagaagggagacctgagcaattggctcggcaagtggaggaggcttccaaaagaaaaggacaagccccagctggcttgaatctctctgccagtgaagacagcttaagataatttttccctgctgcttagtttcctggatcatccacctggggcagggggcgagcttgagaaccagtccctcctatgcctattcagccaaggcaaagcctagcccagagcaaaagtatcagccaccagactggagatgttgggatcttcagtcaggggaacagccacttttcaaactctgaatcactttccatgttactgatatttgcttacatgctaagattgtaaggaatcaggcaatgccttaaacggtacctacaatttctgatatattaaggttcattc

SEQ ID NO: 9694 - DNA, 6000 bp, Homo sapiens
ctgagcacaggcagattcctggagagggtcatgcccagagaaggcacagaagctctgtgcatcttccccacacctcatcctgggcatcttgtccatctggctgttcatctatattcttcgtaatgtcctttataagaaaccagtacacatcaataataaagggtttctctgagttttgtgagccacagtagcaaattaaatgaaccctggaatccccagtttatagccagactgtggtcagaaccacagtccacagaccacaacctgtgcttgcagcatctgaagttgggggcgatcttgtgggactgagccctcaacctgtgggatctcatgccatccccagcaggtggtgtcagagttgagctgactgggacacctagctggaggagacacccagctgaaaagctggctgctggaaaaagcccacatgtactttggtgactggggcgtgttgtgttgtgttgtgtgaatgaagaaggacaaggtttgttctcatactgggcctgtggcatctctgctcctcaccagccagggccacctgggacagagcatgcagaaaggtgctcaggcttaagcatcccacactcaatccttcttatgacaggtgctgttgcaggccctgggaacagagtgcacaagacagaagttgtgcagcctggacgccagcggccagcaccttcggctgtcttctcaagggtgtcttctggtgaccctgagtgtcttcttcccactcagagggcagctggaagggatggagaattagcagcccctccccacctgcccagggaacagcccctaagcacccaggtcccttgcccctcagggtggggagattgtacctcggtcagttgcttcccctgcccagctcactatgcactccccaacagacagacccttaacaaactgcaccaagacctggtctcagggcccactgcacaggacgccccacgtctcatggctcaagagcagccagaaatccagcaggttttctgaaatctcctgagttttaaacatcagcaaccaatttgtgaaaaggtgaacattgtgcagaagtcgtgtggatggcgtccatgtcacatccccactgggctactgcagtgtggttctgcaagatcttagcactgggggaaagtgggtaaaggggacatgggatctttcttccttacaactgcacacaaatctagtgaccccagaatagtttaattaaaagcaaacaaacattgcctaactatttaaaagcacaaagatcttggctggacgcggtggctcatgcctgtaatcccagcattttgggaggctgaggcgggaggataacctgaggtcaggagtgcaagaccagcttgggcaatatggcaaaaccccgtctctactaaaaagacaaaattagccgggcatggtggtgggcacctgtaatctggctactcgagaggctgaggcaggagaattccttgtacccaggaggcggaggttgcagtgagccgagactgtgccacttcactccagtctaggcaaaagatcaaaaaaaaaaaaaaaaaaaaaaagagagagagaatgaagatctcacagaagttaaatatggcagactgctagtttcaaacaaccctggctacatcactctctagctgtgtccttgggtaagttactgagcctctcattgcctcagtttcctcatctgtaaaatgaaagtctattatatacctcataggatgcatctgaggatcacatgagataacacacatgaagggcttagaatagtgccttgcacagaatacgtgccagacaagatgaagtattatttttctaacggtttcctccatgaaaaaaaaaaaagcatcatctctcacagagacagctctggctcctctcctggcctccacctcctccctgcctcccacagagcagcagaggtgccatctgtgattcaactgttcttcagggacggcttccctctgtgcttagaaaaacccacccatgggatctggactccctgtctgcctctctgacttcacccattcactctcgcccactccagaacctccctgctattcctgggacaggcggtggtggttctaaaacatgcccgcaaattcctgggcactgctggtgggtgtggccccactcctgagtctggtccagcctcagcgatctttgggtaaccaacaaaaggcagccccaggccaggtcagaaaatggccacacagccaggctctgtgggagcagcacaccgggccccaggctggagggtgccccgaggatgtctggaggccagagggtggcccaaggagacccccagaatggaggctgcccccaggaggaccccaggccagagggtgccccgagggctggagggtgccccaggaggcccccagaatgaagggtgccctgaggggatccttggatcgctgcccagcagagcttccagacggacaccacctgccagtgtgagccagtgggacactgggcctgggtgagcctcccagtgatgcagtgccagctgccttctgactgtggcagcctgagactcccatgagcactcagccaagcccatgccccaattcccaatacacaaaattgtgagcaaaatttaaatggttgtcttaagcggccaaattttagggcagtttgttacctagcaacagcaactggaacatcacctcagggcctttgcaatggtacctgctggcttctgctccctggagtcacatctctgctccaatgccacctcccccaggcctgccccggcaccctccttgcaccggacacacttttcatcctggtacccgctgtgttttcttcacagcagcattcaccgctctatctctctatcctgattttccgtgcttccaatctgtaatggaaatgctgtgagggcagacactgcatgggtctcaccctctccacccaggcctcagcacggagtgggtgttctgtatctgtcgaatgaatgaatgaatgcgagtccctgggagagggcgtcttcgcagggaagctccctaggccccgggcgtctagccaggcatctgcaccctcccaccccaagacccaagaccatctcttcctttctccagggaccccatttccagggacatctccggatgaagggctgagatgttattcccaactttggccaccaggtggcagcatataagggcaaagcgcgctgaggattccaggctggcagtgaggccagggaatgccggtctggggaaatttggaaggcacctttggatgcgagttaggtccggcagggaatgcagatgacctggaatccctgggtcctgggccagtctgggggtgggctagaggttccccaaggccagaaaagtcatgataagaagcttctagcttactgtgagtctggactcccacccctgtcctttgagaacatcatcaccatttaaagctgtatctcaaaaccagcagaactattatttgcttaatattcttccttaaatagatcttccacaacttaaataaatatagtagggagaaatttttatttcaccactttaacagaaaccagccacttgccagaaacaggcagtaaccataaacaaattaattactaatatcaaatacttacctggcactcactgagtgccagacactgttgcaaacatttcctgtatctcatttaatcttcacagcactgaggtttaggattatccccccgtacaggaaaatgggaaacagagaggtgcagttaatttcctaatctcccacagcagtaagcggcaccaggtgggtttggagtcaccacatttttcaagaacagtttaacaactggagcttcgagtgtggaataatagacactggagacttggaagggtaggagagtgagcgaggtgggagggatgaggaattacttaatgggtacaatggacattatttaggtgatggttacacggaaagcccagacctcaccactgcatatctccatgtaacaaacctgcacttgtgtcccttacatttatacaaaaaactccaaaaaaaacctacagtgtaatgtagtaccctatcccatgcactcacactgctaaatgttgtttccaacgcactcatccgcgcacccagtgccagctgcaccctcccgttccctgctagcctgacttctgggcagcaagaccctgcggttagacgtgggctcctgcccacagggctagctggatgtgtgtgtctttcaaaggctggactttactctcacctcgccccctccaccccccaacacacacacacacacacacacacacacacacacacacagtccctggcaagtcctcagagctcacgtggtgcccagagaagttgtgggtgacacgatgaggcacaagctccattccccgggggatgtaagctgagaccctacctctctgtgcaaaggctagtgccacctgcatgagctagattcaggcaggacctggagaccctggaggaaagcaaggctgcagggtagccttgggtcggggagggagggacactcttaggcctcttactgagggcgggggtcccggagagccatggacagggcaacgctctactaggctccttggttcatcccagatcagcccttgggcccctggcatctaaggcagcaaaaaggcaaggggacaccgcccggggtggggcacgccaccgcgacaatgcctcttggccttgggtggataatggcacccctgggcaaaccctaggggcggggcccagaggcgaggggcttccccaatcagtctccgccctagcgccctggacttcggccccattccattgggtgagggtgggggcacgaaaagaggagcgggcttgcggccccaccgtgtcccgcctcctcagtccccagcgactcgcaggggctggtggggctggggtccagctgccgtgctcccctgccctgcgccgcgccgcgcgtcttggtaggcgctgcgctgccggggccgggtcctgggccagtgcaactccgcccccagccgtatccagcggactgtcctccgccgcgcgcccggcacagcatggggaggcgctgctgccggcggcgcgtgctggcggccgcctgtctgggcgccgcgctcctgctcctatgcgccgcgccccgctccctgcgcccgggtgagtgcccgccggccgagccgcgcacccccaaccaaacctggctcctcgcgctttccaccgcggcctgacccctcgacagcgcgggggacacctgttgtctccttcctggctggggctaggggtggcgggcaggggcgctggtgaggcacagaaaggctctagacgcccccgcgagcaaaggctcttgctcctcctccggagttacctccccactcccagagcggtgactgttttgagtcccacagccggtgcctggagaccggggtcagttgtggggggtagaggacaattggccaatccgggaaggccatctcccttaccttcacccccttcccctgcgcaccccacggcccctggacatgagcgctgctgggcgcatgcgcataggaggggaagcttgggccactcggtccggtcccttggttgtcctactgtgcagtgggtgccactccctgctccaccctgaaatccacactgggtagggcttgggactcctgtgcacccactcgtggtctggctggggaaactgaggcagttagtcatgactccgcagagctgagtgccctgggctccaccggtgctgagtctttgctctgagtctctcctcagctcatgtgaagcctcccatcaacccatttcacacaatctgaagcgggccagagagtggggagacaggtgtggtggcaacgtgctggctatacaatctacttgggactggaggggcccagccagcgcccgggtctcctgacctcagggctgtttgcctttccttgtatgtggtatgcgtgctgggtgggacgactcagtccgcctccccacccccagtgtgggctctgagaatcctgggccccacccttggaacctggcagacacagtcccagggagtaagtaactagg

SEQ ID NO: 9695 - DNA, 6000 bp, Homo sapiens
tgtgtgcaggtgtgagtggctctgggtgtgcacagctgtgcggacatgagtgtgggctgcagcgtgagaaacagggcacagtggaccagccccaagccggctggttgcagtgatgagggcaacagggactgcaggtactcctggtagtctttagtgcgaggaatttacagcctccccattgcagtgtggggccaggccagagcctgcttactgaggcgcagaggccgagccacttgccacggtctcacggagcagctggagtacggagcagggcctgcccagcctgcaccgtgcacagctacaccaatgtgagctggggctctatgaggctgggttttgttatgaagaggcacccagcctctgagtggcctccctccagagtatctgcctccctggccagccagtcccttgctttcctccggcctggcccacccctgggacagtgacctgcttcttccctggtcatggactgcccaactcagcaatgttggcttcctctctgccacacaggcaggccagcccttggcctcactccttactcaggacccccaagctctggtctgtggccccctgctccggttggcacactgtagccacaccctagcccctggagcgggtccctgctgtgtgtgtggcccccaccccagcagacaaccccaccattgcctgctacaggggagcccctctctgtgcaccaggcccctctacctgcatggccgagggcttctggggtaggactgctcccccacacctggggtcaggtggatgcccttgcctgtatggctggaccctgcttcaccaggaagtgcccctcctcaccgtgcatcctgctggggtctccccccagttctgtgcacactctccactgtcttagctcccctctctcctggactgtccctgccacttctgctggctcccgggccagcagccacccccgacttggtcttgtccatcccatgtgttgcttcccaaacctgggatgcagccaccccaacctgtcccagctccgcccactgctcgcggagtctaggatttaaatgaagtgtcacgaagcccctctcctgggccatgctgattgggcacagcgggaggtggggcctccagggacgcagtgtctccaggtcagcatgttcttggagaatgttctgtcacagtggaacattctagacccgtgctgtccagggtggtggctcctgagcctttgaaatggcactggtgtggctgagtgtctgggctcttcacttcatttaagttaagcagccacgtgtggccagtgctgccaggcagcccagctaatggcagtccctgaggtggtgtttggggcacagagggctggtctctgcaggaatgggtcccctgggccggagctgagctgcaggtctcagtgcaggagccatgagtgcaagccagcatgcaggcctaggagggtggtggctgtgtggagtgggcccctgagggcctggtcacatcttgcccttgtgcaaacgagtgcgtttgagcacgcctatctcatgatgctctgcgtgagatgcaggtggtgggggcagcacatctctggttgggtggcaggggacggccttcacttaaccatgggccctgcacctctgtgggcctcgtttccccgtctgcatggaaagccatgcccactttggattcggagctgggagggccacaaggtcactgctcaggagggagcagaggcctatctgagcagcgcctggactctcgcctgcagcctgcccctgcgcttctgggtgaacgtgatcaagaacccacagtttgtgttcgacattcacaagaacagcatcacggacgcctgcttgtcggtggtggcccagaccttcatggactcctgctccacctctgagcacaagctgggcaaggactcaccctccaacaagctgctctacgccaaggacatccccaactacaagagctgggtggagaggtaggtggagggtgcaggggtcgggggcaggggcccgggggcagcctggactctgctcatgtgcccacctggccactcacctgcaggtactatgcagacatcgccaagatgccagccatcagcgaccaggacatgagtgcgtatctggctgagcagtcccgcctgcacctgagccagttcaacagcatgagcgccttgcacgagatctactcctacatcaccaagtacaaggatgaggtgaacaccgtgggagcccacaggctgggctaggagggcttgccggcccctgccagagtcacctgctctgccccgccctgccactcctccctgaatctctgggctgccactgaccaccttcactcctctgcaccctctggccacctggttccttggggccaggagggagcctgccaggccgagcagagaaggccgtggtggagtcactgtgtgcagccatgtggggtcaggggtggggaagatgggatggcagcttcttcctgaggcagagggtgtgtgggtggtgagcaacttccctgaggggctcatttcagggttttctagtctgggccagcatctccagggctgggcataggctcttggcagagctttcctttcagtatcttttctgctgacttggagtgaggccacgtacatggacctggggacggggtccaggaggtatccaggaaggagaactggctcctgggccgcacaggatgggagcacggggccagagggcaggacagtctcggcctgtgccaaggctctgagggctaagaaggccacgggagtgaaccagagccaccctggggaggccagggcaggtgcagcagaggcaaggaaccttccccagggtgccacaggaggcagacaggaggcagagggctgtcctcaggcaggtgccccaggggagcagaggagcagccagagactgcatgtattagggtggggagtggggacaaaagcctggggtcctggggctcaccagggaaaggggagctgaggctctctggggagctctgctttaaaggggcacagaaaccccagggtgtgaggactgggtggggacatgtcagcagcatggccaggcagccaagggatcagagcctgctgttttagggggtgagagtaggatgatgacaggggcagggctcattctccatattggggtcctggagggtccaggctcacaaccaaggtcctttggccaggggtagatggggttgaacctctggcacctactctggaggcatctgccctgggcctgctgagtgcatggaggctggtggcccggcatgctgacagttctcctggccctgcagatcctggcagccctggagaaggatgagcaggcgcggcggcagcggctgcggagcaagctggagcaggtggtggacacgatggccctgagcagctgagccccagctgtgatcatccagcatgatgcagcgtgaggacagctgagcagggaccgggacagccctcaccgcatgcgtgtggagtgtccggtggtgctcgggccgccgcagtgcagcgactgcccggccctccctcccctgcctcacccggtcgggtcccggctcttcctgtgtggaggtgatggtacctgccacaccacagctgcgcacacagctgcttgctcaggggccgggacagcactgggtgctcaggctggccaaggaccttcattgcctggcaagagctgcccagtggccttcatgggagaagggctgacctctgaggggctgaggggtgaggccagggccctccagggggaggggtagccagcttgggctgtccccttgagaccaggacaagaggctgggggtgtcagcattcccagctttccaagctgcccccaggcggcagagtctgagggtcccggggcccggttggcagctggagaaagaggcaaaaagcccgtagccgggcaagaggagctcaagtcggtctgggcccgttgccaccgactcccacctccagcacccatgcccgctgcaccgctgccatcctcagattcaccgcgtgctctgcgcggccgaggccggagcaccacatccacctcgccccagagaggctctgctccctcctatggaggggctgtgggccaggctgctcagactcctgggtggcttccagacggaccgggcagcccctctccgtcctcagggctgtgcctctgggagccactgggccaggggccccgggtcgcagagagcacgttcccgttatttattcccctccgcgtcctacacaggctgccctggcagctgtcttcaagggtaggctgagctccccaccctggagcccctgagggcggcccctgagcactcctctctctccactctctctgtccctgccccagcggcttccagtgtggcatctcagcagtgtcctggcccctccagagcagtgggacatctggggactgtttttgtgtttaggggaaaaaattctgctgcactctgcttgggccttgaggtctgtggcagggctcctctggcccgcagtggcctggatctatctgggccatgagtgacgggcagtgaccagagggactggaggccagcggtgtccacccttgccctcagcaagagagaatgcattcttaaaagaaagctgtacatgtatatatatgcatatatatatatgtggctctagcctcaggctccagccccagtggggtactgtacagttaactgaagaagaattttaaagacgatttgaacaagaaaatgaaggcagtgggaaagcaatgccaaatggttgtggagaaagtggccggagcctccctggagtggagcagccctgaagcctgtgccccccgacctgcgggccgctgttttggtttgacatgacaaggaaaggacttcctgctgaccctgagagcctctggggtgccgcggcaccacggggcatgcatgattgtgctagcgtttagtctgagttgatctttttaaaactgcaagtgttgaatactagaggttgttagacccttttttatgttttttaattaatcagtcacttgtaaaagcaaacaagcggtccatccccttttcaaggtcacttttttgatggtaccgaagatcccatggacattaagggacagctaactgtggccagactcagccccatgtccttggccaggcccaaggagaggactcggccccatggggtgtgccagtcttgcagtccgccccagctgagtagcgtgagccagatgacgccacagagacccgcctcttccctgaacgcgggtcggtgtggagtcagtgactgctgactcagggagctccttggccccgtgggcactgtgccagggctggggccttctgctgctgccacacccagctcaggcctgggccagcccctgcccccagcccactgagggggtgggcttactccctgggcagtcttgggggccagagctgaggccagtccatattacagtggctgggctgtttttttcagtagcccctagcattggctgggattcctgttcctgggtgcgcctccacctcccttctgatgtttcctggctatggtggggtgggaacctcagtttcccccaaagtcttccctggatgctggcttcaggttgaagtccctggttcttccagttcctcacgggttaggtaggggctcctgcatcaccttcagaatccagttccaacccccactctccttaggccttgtgctctgctctgccctgccaggctgcccttgtccatgtgagtagcatgggcgggtggtggggacggcagtggtgatgaagggggtgcaccacaggcctcatgaagcagttcccacatgggcgtgtggctggggcgtggccaccacagagcacatggctgtgtctaggcgcaagcactttagcagtatctgtttacatgcgcaaggatcaagccgactacctgtgctgtctactgggacagcagtctccgagctactccgtacctccctctgccaggtcgtggagttaggccccagtccctacttgtcactggttcccactgtgctcctaactgtgcagcacctgggagctctggcct

SEQ ID NO: 9696 - DNA, 6000 bp, Homo sapiens
acaaaacaagaagtcatcttgaactggtcaatatgtaaatcaaaaatttaaaaacatatctcctatttctaaataaatatcataaaatgacaatgtaacttgcagcaaaaataatttgacagatctttctagtatgtctaaatcatttcttggtttttggaagttatgaatcttttgatacagttgtcactagattttgcccctgtatggagtgatgatttgacataggaagcaacatcaaattgttccaacaacttcctcattaaatggataatcattaaatgaattaagcagagaatttccttaacatcaatgatactgtttttagtgttgaatcctcagtttcttattaatagcaattaaatttaaacattttatagactataataaagtctaagaacatacagaactgattcaatatctgttattgactaagtcacacaaatcacttattgaaatatcttttaacttactggcttattcactatgttctgttcactctcaattcacggagcttcacaaaccagggggctttatttcaagattcaaaaaattgaaagggcttaaaagtttattacatttttcacttttgtcaccaaatacattgatttattagaaaagccaataatttttctcttggaattgatacttcactttttttttcaaacaggatacctattttttcttatccataataacttccacttgtttcaaacttccctttgtttacatatgtccaactgctttacagtttattgaaataatgtcagctctaatagctaaaatatgttttcttataaagctaaaataaatactgctgggcacggtggctcacgcctataatcccagcactttgggaggcagaagtgggcagatcacttgaggtcagaagtttgagaccagcctggccaacatggcaaaactccatctctactaaaaatacaaaaattagccaggtgtggtggcgcacgcctgtaattccagctacttggaaggctgaggcaggagaatcacttaaactcaggagatggaggttgcagtgagctgagatcgcgccactgcactccagcctgggcaacagagcgagacttcatctcaaaacaaaacaaaaaaactctaaatactgacatctccattaaaatatcatttattaaggcccaaactctttaaaatatatttttcaaacagccactgcatttgtttccattacagtgaacatacagaacttactgacttccaccacagcgggtatatagctcaggggtagagcatttgaatgcagaacttaccgacttccacattgcttttgcagatctagcactgcaggcttgtccatcaaggttcaatttgcattacttaatgtagttatttctgctacttggtgtgtggtagtaaatatagtttatcaagaaaagcatgagttccctgacttgtattggtttatccaaaattaaatttgataatttagtgccaaattaaaacatccacatttttcctaaacttttggctgaaactccatactctctctagaattacattagcattttttgtataaaatccaatgacaattttcttatttggtacaatattccaattacatctttatggaactatatctcaaatgtaattctttcttgtgtactcataataaagacaatacagtgtactaaatgtttcccagtgtcataagatcaacaaaaaccattatattcaaaaacctttaaatttgcattttaattattaaaacacattcacataaaaaaatgaagcttcttagatgatgattttaaatacacctctttgatttacatatttttcaaaaagctgttttctcatttgggtacatctggtttttaacaggtgggtccagaatacaatggcgtgttcatatcaatattaatccttttgaagttctagtaaatgtgtgtgaaatgctcaattatacttaactatataatagtgctaaaaattctgacagtaccttctaaatctttttttttttttttttttttttttgagacagagtctcgctctgttgcccaggctggagtgcagtgatgagatctcggtttactgcaacctccaccccccagggttctagccattctcatgtctcagcctcctgagtagttgggactacaggcacgcaccaccatgctcagctaattttttatttttagtagaggcgagatttcaccatgttggccaggctggtctcgaactcctggcctcaagtgatctgcccaccttggcttcccaaagtgctgggatttcatgagccaccaagcttggccctaaatctttttgattgctttatcctcactctgataacctttttgggagttctaagttttcaaatacttaatttatgaaactgattatattcttttaagttcttttctcatcgataatcacaatttttcttcacttgcacaagctttaagagcattctgatgaatatatgtttaacactttgatcttttaacaatagaacttctgagcactcagtacccaacatttctgtcactagcaatgtcaaatttttggttgaaaaaaattattttttcactacaaaactatagattttatgtaataaagtttatcttataaattataaattttattttgtgctgattcttaaacagtatcaaaagaagttccaggcggggattcattattattacaaatttcttgtttattcttctgcagatatcaagatttacatttatcatacttaaaagtattgaaaattcatccagatttttgtggtctctttcattctaggtggatgtttctaatatcctataataaaatcttaaatgtataaatataaaacactgcatacctattttccgaagaattaatgtatgtgcttacaatagaaatattttattattttttgagacagagtctcactctgtcgtcacccaggctgaagtgcagtggtgagatctcagctcactgcagcctcgacctcccaggctcaagggatcctcccacctcagcctttccagtagctgggactacaggcatgcgccaccatgcctagctaatttttttctgtatttttttctagagacagggttttgccatgttgcccaggctggtcttgcactcctgggctcaagtgatcctcttgccttggcctcccgaagtgctgggattactggtgtgagccactgcacccagtccaataaaaatattttaaactagtgattctcctaaagcaatcagtgatttaacacacgtaacttggctgcagtccctgcagtgacacaggccagattgtgtcataatgtggaaacaacaggaggcctgttatcaatggtactgacatcctacaactattagcacaaaccaatgagtttatattaaaatttctattaactaattgtaatatttattgtaattactatactatttaccctcgaaatatttcaacattttaaccatcaatatggtgcagggtgcataatggctaaatatcggatctagtctatatgctgaacttagtccaggggctgccagttttagcttcaggccaaaactccagaagagatcatcagtgggtcctggaagtgaagatgggttgcatttcagactctgaataaagagtcaatgtcttctttttcccctttttggtgggggatggatatcaagtgatgtcacacctagaccacttcactgaagttacctgcctgttcccagtagtcctttgaattttccaccagtgggtttgtattccaaaaaagacttcctgtcctgtccaactttctgagccaagaatgtacaaaacctgattatctgctagaaatgggtgagaatggaaaaatccaaatagttgacacctaaattaaaagcaaaaaagcatcttgccacatatgtaccctcaacttctacctgtcctggtcaaggtttagctccatgaaaccttgcctgatcccacaaggcgtgcccacctcctccctgctaaatgctcacagcattaagtctgtttctcttagatgacatcatacctactgactacagatgcctgaaagtaaattccaacccccagccccagcatcccttgccctacccgttatccccctttcccacaccgatcttaggcaatcacaccgccatgctttgcccacaacagtctcctcaacctgttccctcattccttctcgccagaatctatcaaggctcggcacaaaggtactctcccaggaggccttcctgaattcttctgtgaggcagactacttcccgagctgccccggcccttctccggccaagtctctccagaaactcatcccattcgttctcagatggaaggggacccacacccacgacaagcctccgggtttgcttaatgactcagacagcgagggtgctcggtaagccccaccagcccgcgccctactcagcaggtaatgacggagacctactaggtgacgggcgccgcggtagacgctgggataaggtccctgctccagggagcttacggtctattcactaacgtcaaagagcagtgagtgctgttacgtgtatgggagccaccagggtctccgcctgcctgcagggccacgcgcgcactcgacgcttcgcgcctgcctcagtttctccgtgaggccgcacagccccagtctcgggaggcgtgacacaccctccccgcgcgctctcgcgttaccaagtctgcgcagccgcacacccccagtcccggcgggccccgcgcgccaggccccttcccgacaggccccaggagccccgctgcatgccggggcttgaggtctcggcgaagcggcgcggcgcggcgaagcgcggcggccggcgggcgcgcgtggcaggaagcggaagcgatccgaggcccggccccggccccgccccgcgccgcgccgcgccgcttgccgccgggctagcactgacgtgtctctcggcggagctgctgtgcagtggaacgcgctgggccgcgggcagcgtcgcctcacgcggagcagagctgagctgaagcgggacccggagcccgagcagccgccgccatggcaagtgagtcctgtagggaagccctattgaggccgggacggaacagatcccccttccccacacccgtgcggtcgggcgcccgccggccaaccctgaccggccccctgcagaacgcggcccgtgcccccggcccttctcgagtatccccacgcgtccggggtgcggccggctcccctggcccctgctctcactcgtcgtgggcagaaggcgtccctgggtagcgcggaaggttacttctctgtgtcccaactcttcctgttttgtttctcccatcaaagtcaaatttctggaagtcatcaagcccttctgtgtcatcctgccggaaattcagaagccagagaggaaggtaagtaccccaaatcgccaacaaagaaggtttcaggaaactgtctggactctggaagtttacagtatgattaaaaatggcttcagcacggcaatggaaactctcccttctcttcccttggagtgtagttgtgctctgttattccggagagctgtcgaaaggtgacctggttgtgtggaaatttccactgaaatcactgtgctttatttggagcatctttggtggatgttgctccgagaacaaagcctccggttgccctgtcccaaaaatggatccgggccatgaatgaataaggcctcagttaggatagcagattgagttaccctccctttttcacctccaacgggagcagatcacgggttggttttttttcccaggagatgccctttgtatccagctgctaaagggaagggctgtcactttagtatttacaaatgattttgtaccttttatgtaggctgtcacaatagggggaataaaggctattcttttgtgaagtctgctgcttttcacagacggtgtattaaaacaaggaaagattaaatttagagctgtgctgaatcagaaattgtgtggagtgagtgttgccagtgtaactacagctgtcaacgaaaaaaagtttcatta

SEQ ID NO: 9697 - DNA, 6000 bp, Homo sapiens
gcccagctaaattttgtatttttagtagagagacagtttcatcatgttggccaggctggtcttgaactcctggcctcaagtgatccgcccacctcggcctcccaaagtgctgggattacaggcgtgagccatcacgcctggctgtcaggcccccctttcttccctgacagtgtgccagtggcccctgcccatgatgacttccacagtgcctgctgtggccagacccccagcaaagcacctgtcaggcttatctcactctttcctcacagcagtctgggaggtggggtctttgattttccccattctgcagatgaggaaactgaggcagagataggctaagactattgcccaaggtcacagagcaagtaagtagcaaaaccaggtttcagagcaaggcaggctgctccacaggctggctcagaacagccggggtgacggagacctgcatctgcaaagatccagcaagcagaggctctgttccaagggggtccaacagtggcagacagggttacccatttcctgttggttgcacacaggctaaaaatgctacctaataatcactgcctcttaatcccctctgcttcccatgagaaggaaaaattgtcttgggggatattgaaagatcccagcctccaaagtaagtttacctaagcagtttgcctcataatacgattaccaaacagaggctgtttccttcagctcaggggacaagaaaggagtggctgtctccctcatgtttctcgttatttgtgtcataggcatgtatcacctgaaattgcctgagaggctcaaccaacttttagtcacaagatctgcgaacacttccctagtgggtgctgaggttctccaaggagctgctgggcccatttgcaaacagataagcaaacggctgggtgagtgcgtcgaggagggcttcccgtaagaagttatgcccccggtgaatcttaaaggatgcagcatgccaggcaaaattccacagggctccagaaagagggcagtgcagaggcaaaagcacagacagaagttggcatgtgggtggggagtgagggacatggctagcctaccacgaagcttcagatcaggaagagatgagaggtgaggctggacagggtggcagagggtgtcctgaagacagcagggagccatgaaagacatggagcaggagtgtagtgagattaaacctgtatagtagaggcagaggccagcatcaaggagacagcagtcctggcaagacacagataaggccagcactagagaagagacagccagcaaggctgacaagtatgtattagataatgcccatgggccaggcagaggtgctggggagggaagagttaatgggacagagtctctgccctcttgagtttcacatcaatgggaggagacatttaataaacacataaaaatgtaaaaataagatcatttcagatcctgatcaatgctaaggaagatatgaaatggaatattatggtacagaaggatggagctgtgccttggcaagggaggcctttgaggaggggtcatctgaattgagatgagaatgatgatcaggaggaagccatgtggggctctgggggaagggcactccaggcagagggaacagcaagtgcaaaggccctgaggcaggaaagtgctggagtgtttgagcaacaggaagaaaattggtgtggctggacattgatgagcaaagtagacagtgggtgatggggtcaagaaataggcaggggccaagctacaggggggcctgtagcttcctgaccacaggggcacgggttttcttttatttgcgatgggaagccaagaaggcgaacgaagaccagagcagtagcagcacagggagaagtggttaagttctgaatagatcctggtgactgaaatgacaggaattactgatgggttggacagcaagtagaagtgactcttcagaggagttttatggaagagagaagcagaaaaatcagatggtaattggagaaagaggtggaattaaggaaggatttttcaaaagggcaggattataggttgcttcttttttttttttttttttttgagacggagttttgctcttgttgctcagcctggagtgcaatggcgcgatctcagctcaccacagcctccgcttcctgggttcaagtgattctcttgcctcagcctcccaagtagctgggattacaggcatacaccaccacgcccagctaattttgtatttttagtagagatggtgtttctccatgttggtcaggctggtctcgaaacccactttaggcagacctaaagtgatctgcctgcctcagcctcccaaagtgctgggattgcaggcgtgagccaccgcgcctggtctggctgctcctaacctgatggaatgacccagtgaaggagaaattgatcatgcagaggaaggggcacctgatggggcaatgtcctggaaggatggagaggggacaactcacagcacaagagtggggcttggccttcgccttggttcctattgctgctgtcacaagaggcttaatgcagcacacatttattttctcattcttcatcacacagctcctgtgggttctcttattccagccctcctgaggtagatcagcaggacctgttttctgagcacctgtcaggacccccggtccccagcctgctgatggcagcaggatctggttgaaacaaggtgtagtgaagaagctggcagacaccagaaaccagcagatgggaacgaaagcaaccgctagttgccctcactgctcactaacatagacactccccctggcaccatggtagtttacaaatgccatggcagcacgccatggcaacaacctgaaagttacagggttctggaaactcaccaccccttttctagaaagtttgaaataacctgcccctgaatttgcatgtaatgaatagtggctgtaagtgcagttgccaaaagcccacacactactgctctgggcacactgcctgtggggtagccctgctcccagagagcagcacctctgctatgcactgctgcttcaataaagcggctttcttcaccactggctctttgacttctttcctggccaaagccaagagccctcaggggcaaagccctgatttgggggctcacctgccctgcatcacttgtaggtggaaatcaagctgctggcagggctgcattcctctctggaggctctgggagaatccacttgcaggctcacccaggctgtttacagatccacttcctgcattatcctgtgcctcttgggcagatgggtatgtatttacccatatgggtaaatacacatggggaaaaagccttgcctgatgttgggatggagggaaatttttattttcttcttccagttcatctgaacattctaatttcccacaacaaaaatcatttatttgttatttatgtagttttttaaattcacaaaacccatctatgttgatctagttttttgttttaagttgtacatgctgaaaataaggaaatctcagaggctcaagaggaaggagggcacaggccccaccagatctggtcacaacacctggcctggcagctccagcacccccactcactccagaaccccttacccacctgcgtggggctcactggtgaatgtgtgcagggcagaggaggtggaacatgccaaggctccatggggagggagggaagggccagacaggctgaggctcctctccatggtccaggctccggtcagagtccccactgagcacataccaggggacccccagcagcaaccaggcccccgagcaggtgtgacatcagtgggggaacagcaccttccccacccttctctgagcccagcatcagtgggtggaggaagcagagctggggcctggcagcctctcagggcctcctaggagggtgaacacccaaatcctgccctacccaaatccagaaccaggaggcggggagagaacaggcggcctcccaaggaaggactcaccctgcttggccatgcaggaggaggaaggctggcctgagaaggatgtgagaccaaaataagaacaagcacacccccacccccgtagggccgaggaatattcccgagggtcctgaatgtcaacgaagtgcgtttaaagcctccgtcagccttctgtctttggcttttcctgccaggcttctgtaacttctgtgtttttaccctgttttatttattttttaagacggagtctcgctctgtcacccaggctggagtgcaatggcacggtctcggctcactgccacctctgcctcctgggttcaagcaattctccatcccaaaatatatttatcttttaaaggaagctttatgtcactaacataaatggaaaatggtgtccctcccctaagtagaatgtgctctagaagaaaatgtactgcaaatgttaaaaccataggccaaaattctagctagagattcacacttggtagaggctctgcttcccaggcctacagctgtttgttagaaagaggcatggagaagcactaggcaggagctaaaaacaccatggcaccaagaagagactccgtccttgagtatacaggaggagggaggagagttaaaaatgaagtcactctccccaccatggtgttctcagccagtgggagctgcccagcccacacctctgtgaggcaggcaggaccggtcactgctcccactttacagatgaggaaaactgagattcggaggaacaaccagcagagccacgtttctcaggggtctcctagttcccaccttctgggagcaggtgaggggccaccctcagtcctccacagacctgattccaaagcccatcaaggcactggcggcacagtgggacccccttctataaaccggggttgagatgtggttctgtgcccaaggcgcgggcccctgagggcctcctgcctctggaaataggccccaaggctgcactggggggataagccaggctattttcatcacttccttccgcccgctcccgcagcggccacctcagctgtatcccatagagttgccacccaggcctcagccaggacctttcaggccagacaggagcacctgaccaaaggcttcacaggtaagtggccctccgtattacccagcatggcctcccacagggagagaggaggtcagttcctgtccctttaacaagacagggttgggtgggacattccctctgagacaccatctccttggctgagtcaagatgagtgagttgatttgacacttattcactggaaacctgctgtgggtagggggagctctgctggtggaggggaaacgcctgtggggaagaaccaaacagagggccacggttgccgagacccgagtgtgagtctggcctctgacaccacaccggtggccctgggcacattgctttccctctctgggcctcagtttccccaagtcagtgttagcccagatgagtggttttccagatggggtcccactgagttcccctccctgctccagccagtgtccctgtcctgctgtcttctgcatctgggaatcaggtaacagctcacttagctggtggggggtgctgggcgcagcctgcagggccctccaaggctctttcctagtctctggggactgtggtcctgggctgggactcatttagcagccatctgctcctctcatccccaagcaggggatggggtctctgctaagggccaggaagtcccttccccttcccaaaaacaaacttacccaatccacagccgccctcaccgcccggccttctacggtgtccagagacagttagccaggcctgggctgggcacactccaccttccctagtcaccagctggtttcccagaggagaaggctgagacccgagaagggaggtgagtgcaccccgtcccatgtcaggctccgctacatccccagtgcttgccgtccctgaggatcggtccaggctgccaggccctccctcacagcccctctctctgcagccagcctgtcccatgcctgcctggggagccctgttcctgctctgggccacagcagaggccaccaaggactgccc

SEQ ID NO: 9698 - DNA, 6000 bp, Homo sapiens
tagtagagatggggtttcaccatgttggtcagcctggtctcgaactcctaacctcaggtgatccgtctgccctggtctcccgaagtgctgggattacaggcatgagccactgcacccaggcccctgtctctatttttaaaaataaataaataaggctgggagtggtggctgacgcctgtaatcccagcactatccgagtcagaggtgggcagatcacaaggtcaagaggtcaagacccctggccaaccaacatggtgaaaccctgtctctactaaaaatacaaaaattagctgggtgtagtggtgcacgcctgtagtcccagctactcaggaggctgaggcaggagaatcgcttgaacccaggaaggcacgggttgcagtgaactgagatcgtggcactgcactccagcccgggcgacagagcgagactccgtctcaaaaataaataaataaaacataataaaaataaataaatacatacatacataaaaagggtaaaaagaaaaatggcataaggaaaacatgtttatgaagctgatgggacaccccgggttgtctaataaccgtgtgtccaggtcaaaccttgattttaccccgagctctccttttagttgatggcttgtgattcagggtaagtagcagtctgtggaaacccaggaaactggtttgattcccagctgtgtcattcagttggcatgtgtccttcatcaatgtacataatgtctgagattcaggtttgtgccagtgaagtcagcatgatgtttactttgaactttcattaggtgggctcaggataaaatacatgaagtgcttctcgcctggtgagtccttgataaacgctagcacttgtattgtggtcctcctgccccaataatgatcacaccttagcacaatgttgcccttcacagtttgcaaaggcgggggcgcttatattcatgatctcatcctaaaaaagtctaatttttgttaacaacagctcatatgtatagagtacttgctatttttacaagtattatgtaacagtgggtgctcaacaaatgccgaatgagtgagggcatagtttcaaaagtgggcgtgggtggacaagaaaacaggtgacttactggaaaactcattttatgaggctggaagctgcctctaaagcaagggtagtcctgagtctccctgttatattgaagggagttagtccccggactctgaaactgccctgggtcaccctagtggacagacagggcctggcatgggggcttcaagcctcttccagctgtgccgtcgctaaaaaactagaggtaaaattaaagagttggtgccacctagagggcaagagagtgcatctcagaagagggctgcggaaatccttagaatatggaaggtggtggtggttataaagaatcataaaaataatctctattggcctggcatggtggctcatgcctgtaatcccaacactttgggaggccgaggcgggaggatcacttgaggtcaggagttcaagaccagcctggccaacatggtgaaaccccgtctccaccaaaaatacaaaaattagctgagtctggtggcacacgcctgtagtcccagctactagggaggctgaggcatgagaatcgcttgaacctgggaggcagaggttgcagtgagctgagattgcaccactgcactccagcctgggtgacagagctacactctgtctaaaaaaaaaaaaaaaaagaagaaggggtctagacttaaataactcatacaactctaaataaaaagataaaataattttaaaacgagcaagggatatgaacagctattttttcaaagaagatgtacaaatgaccaataagcacatgaaaagatgctcaacatcagtagccatcaggaaagtgcaaattgaaacctcttcacacccactagcatggctataatcaaaaagacagtaacaagtgttgacaaggatatgaagaaattgaaacccccatacactgctggtgggaatgtaaaatggtgcagctgctttggaaaagcagttagacagttctcaaaaagttaaacatagttaccatatgacctagtaataccactcttaggtatagacccaagagaagttaaaacatagggttgcacaaaagcttgtacattaatgttcacagcattcacagctttgttcacaagagctagactggaaacaagccaaatgtccatcaactgattaacaaacaaaatatagtaaatccataaaatggaatattatccagctacaaaaggaatgaagtactgattcatgctataacatgtcttgaaaacatgctaaatgaaagaagcaaaacacacaaaagactacatagcatatgattctgtttatatgaaatatccagaacatgcaaatctatagacagaaagtagattagtggttgccaggggctgggcagatgggcaaatggaaagtgactgctaatgaatagctttctttttgggatgatgaaaatgttctccaattagtgcggacaggtacataaactttttttaatatactaaaacccactgaattgtacacctatttatatatgcatgtgtgtgtgtgtgtgtgtgtgtgtgtatatatatatatatgtatatacactttttttttttgagacagagtctcgcccgtcacccaggctggagtgcaatggcacgatcttggctcagggcaacctccacctcctgagcaattctcctgcctcagcctcccgagtagctgggattacaggcatctgccaccatgcccagtgaatttttatatttttagtagagacggggtttcaccatgttggtcaggttggtctcaaactcttgacctcaggtgattcaccctcctcagcctcccaagtgctggaggcgtgagccacctcgcctggccacccctatgtattttttgagacagggtcttgctctgttgcccacgctggaagtacagaggcatgatcatggctcactgcagccttgacctcccaggcttaagcaatcctcccatctcagactcctggagtagctgagacaagataaaaatcagtttagtcctcagatgtaccataacttccttaatcatccctttattgatagacatttagggtgtttacaattattttgctgcaaactgctgcagcaggcaacttcattttcttttttcttttttttgagacagtttcgcttttgttgcccagactccaggctggagtgcaacggcgtgatctcagctcactgcagcctccgcctcccaggttcaaacgattctcctgcctcagcctcccgagtagctgggattacaggtatgcaccaccacgccaggctaattttttttttttttgtatttagtagagatggggtttcaccatgttggtcaggctgctctcaaactcctgacctcaggtgatccacctgcctcagccttccaaagtgctgggattacaggcttgagacactgcgcccggcctcattttcttcttttgaacaatttcctcctgattaggggtggggttaccgatcagacattttgaacatctttctgactcttgacaattttgcatgtcacaagatctgttgtccttggccctagcctctgcaaagccagaccctaagggctggcccctctgacatctcccttcctccagctttgcggtcacccttttcacctggggcctctgcctcagcctcctgcctctcctctccacagcccactccttctcctgcccacaggcctgcgggcttcccctccccaggcaagctggggccgtgtcgcagcgcttggccatcacgactttgccattgccaatgcaatctggctcactggcatgcactgtgcttaccttagcctcagggtgtcctgcataggtccccaggaagataaaccctgggtgatgtgtcattttcccctttccgttccttcccacgcccttccccccacctccccgcgtaggcagcgcatctagttggcactccataaatatccaaagtatttacaaaataacgtagaagttctatgctgtttagttagatctcttaaggttgataatgtacaaggcaatttgcatcaggagcagacgagatagggcccggcagatataaattaaaaatgcaattgcacgcattcattcaacgagaactcactgagcaactactatgtgccaacattatccactgcagtgaataaaagacaaacaaacaagcaaataacaaaaaaaaaaacaaaagagcaagaaagtggccgggtgcagtggctcaccgctgtaatcccagcactttggaaggtcgagaaaggaggatcgcttgaggccacgagttcaagaccagactgggcaacatcatagtgagacctcgtctctacaaaaattaaaaaattagtcgggggtggtgcgcccagctctactcgggaggctgaggtgggaggatcgcttgagcccaggaactgtaggctgcagtgagccaggatcgcacaactgcaccacagcctgggcagcagaacgagaaataaataaacaaataaaagccagaaagtaaaaataaagtgttagatggcgattcgagctgaggaggaaatcaggcaggggaaagaatctgaaagcgaggagtgagtggctggcaaggctccttcggaaggtggcaataacagtcatagaccggtcacatcaattgggtgtttactgcgggccagtgtgtgccaccaacctcacacccgaaagccacaaagactcacgccacaacgcaacgaggcaggggctcctcctcctcccttggtatacggaaagaagcgtagggagcagagttgggatgctagtcagtacccccctgcacctagcccttgcccctccgtctggctttccccactcccgctccggcggagctaaggttaacattagacgaggctgtggctaccggaaagagcgcaggcgcagagcgcggaatgcgcctgcgcagagcgctgggcgacgtggccagtcggggcccggaagtggtccctgtagaaccactgtggcaccgctactccgtgccgcgcccgtcgagcattgcgttgctgcattgcgccccaccgactccactatgttgaagaaattcgacaagaaggatgaggagtcaggtgagggggccaggcctgggtctgagggaggccggacccccacccgccgagctttccttctggttctctgtcctgacccggaggctgaggcccagtgaggggcaggggcttgtgccagggtccacagctagtcagtggcaggcctcggagagcccgagcatgcgcggctgtctcactcttgtaagctcggactgcaattttctgggtgaccttgggcgcgacaaacacccccccccccaggcctcaatttacccatctgtcaaaggaggggaccatgccgaatgttctcttgttactttcttcgtccaacctcttgggattcgctggggctacgttggtgctggccaaactggggtgtaacctgcggagccagcgtcctgtgactgggaactctgaccccatcattcatttattcagcaaagtatattgagcagttactgtatgccaggtactgtacggtgtcctggatactgcaacagagcaagtgggacactcagtgcctgagctaggaatattagaatggttgcacccacgatggaggaggcagacatcaaccagataatcacacgtgtaattatttgcaaatgtgtcatctgctatgaaggaactagttacaacgagatggtggtccctggcacatagggacttagttaattacaagttatataaatgaacacaagacatggcaccatgagaagcacaggactgtaccagggctgctgggagattgtgagtggtttggggtagagtggagcccacctgcttgcaggagactagtaggatccctagacagattgtagaggcttgattgccattcctgaggagtttgaactttactagatttcctaggaagggacatcttccctttacctatgtctgggagagttttgaagttcagag

SEQ ID NO: 9699 - DNA, 6000 bp, Homo sapiens
ttttgagacagtttcttgctctgtcccccaggctggagtgcagtggcatgattacagctcactgcagctttgacctcctgggcttaagcaatcttcccaccccagctgcctgagtatcagggaccacaggtgtgtgccactgcacccagctaatgcttttattttctgtaaagacaggatctcactatgtggtcaagcctggtcttgaactcctgggctcacacaattttcctgcctcagcctcccaaaatgttgggattacaggtgtgagatgcaccagaaacccttaaacttcttaaaaatcccttaagtcctcttggttttacaggaaagtaggagcttggattttagtttgatcataggaaacaagtagattgttattcattcaacaaaaaatatttatgataaacatttttcaggctatccatttatttaataggtctttattacatatttactgctgtcaaatgttttggggccagaggtgaattatgctagtttggaaactaggtggaatattatcatttaaatggatacctttgtatctcaaaacaaatcctgtagtttatataatttggaatattgtatgtctgttttccatggaaatgatgaagttcattggtcatggtactcttgggtcatgggactcacactcactttgctcttacctctttcttattttcacatgcatcccatcgacactcatgtctaatccagaagactggtagtatataagatcccaaatattaccactggctcagaatctgagccaatgaatggagagactatgtcatacttgaaataaacttctttaacaataaaaattaagagtataagttctctcatttcatctcagtttcatcaaatatttcatgtttaaaatgctagcaagtgtgaaagaggctatggaattttgtgagtgataaaatatttgtagagtacttggggatctggatctgggtgctattaaaaccaaccaaacacaagtagctcatatgagtccttcaatttttattcttgcttccaacttttaatcttccagcactgccaaaacatggaactaggcagatttatagcaattctggtagatgtttgttaggaactgatttcgtacaacactcttggcaataaaactatagttttctaaacttgacatttagcatgtcctttatcttataagaagaaaaatacttctgttgttctgttggagtaggttagcttataaaaataaagtgatgcatctttatatgtttttaacgtgtccaactttgccaggcatggtggttcatgcctctaatcccaagcacattggtaggccgaggcaagaggatctcttgagcctaggagttcaagactgcagtgtgctatgatggcatcattgcactccagcctcagcgacagagactctgtctcttaagttagtaagtaaataaataaaatgttcaacttaaaataaaattacaatttcttttctagcagctaggtgaaatttcttaactattaacctctggtactttaaacaacattaaaacagcctttaaaagaagacattaattaattgaggaaagattttaaaataattttttccaagttttaatttttaaatccctaaagaaccacatattcttgtaccatccaggtttataaaaatgcagctatcaaatttgatattaaaaacaagataccgcacaccctttgtggaataaagcacagtataaagaaaattagaatgtcatgaccattcttcttcaatctttcccatttgtaatatttcccccaagcggaaaagcctgacaaatttccctttcttgcacgtgaccactttttgcatcagatgcatttaattttgtaggttaaatattcaggacaaaaggagagtagaaagaatttttagagctttgatttctatggaagcaataagctgaaacttggaaataatatgtttcattgccatcaatcccattgtagctagctaacactccagggatttccttgattctctctataataatcttatacttctatagtgcttataatttgcaacctgtgttcacttactttatgagattcttacaaaaatcttttgaaagaaggctagtgtgtatgtatatgtgggtgtatgaatatacatatatatgtgtatatgtttgtctatacatatacatatgtgtgtgtatgacatatatatgtatatagtcatccctcattgtccacaggggatcggttccagaaccccctcagacaccaaaatttccagatgcttaagttttttatataaaatgactaattggtcaattcttcttggtaaagttgatcttgatcttaccagtttcttttttggcttagtaataggaacaatgattttcataatttaggggaccaaaagtaaaatttcagtttaagtcattttaggaataaaccatggagctataaatcttttggaggagttatagattcagtgttaatgctagagtattgcagtatattaatacaacagatagttctgaaaagttgctttagaaaaatgtttcagctaaagtgacccaataccaaattctgtacagttaccctctattttgtaaatgcatatgttaatatcaaagtatttatattgtgtaatttcctaccttaggtgcttttgtttttaatataatgctgtttcaaggtcgaatatgtacagtaataactgttacaaattgattacgagagatcacaatcattgtacaaatcacaggctatgtcattgtgtagacaaaaatcactgaccatgcatgccagaggtggatcataaatagtaactcctaagactagaaatctacttgatatttttatgggttcatctttaaaagtgacctcgctgaataaaagttcaatatttcttaaaagaaaggtaaatctaaaaaccgtccagaattttcgatcctagtctagtaccacttacttgggaacaaatatagaagcacaggcaaccccgtccgttaatttggctccgtcattgtgcagacaaaaatcactgaccatgcatgccagaggtggatcatagttaactcgttaagactagaaatctacttgatagtgatttttatgggttcatctttaaaagtgacctcgctgaataaaagttcaatatttcttaaaagaaaggtaaatctagaaagctgtccagaattttcaatcctagtctagtaccacttacttgggaacaaatatagaaacacaggcaaccccgtccgttaattctgatgttgaacgtgtggttagagagcacactgcgatatgttacaggacctgagataaaaagcaaatttgtaaagtgtctaagtgttgatggagaaaaacacatctagcatatacggaaattttcttttgagttctctgtaggatgatcaccaactcagtaggtgaagccctgccctctagtggttatgggtgtgagaggacttctgttcaacattatatgtctggctcaccacggtttattaaaaccaatcgttcattaaaaagcacttattaggggtctgggtaagatgccgagcaagtgaaatgtttacgtgtgaaaaggcattgacactggacaaaggtacagctgctaaaagaagtgctcgttcattggcttcgacagctgtacgactggtttctaattgctgttccagcctctccccagttccatataccacaaacgaatgaaaaagattagctctccctggagctctctgaggctgaaccttgctctctcattacacatggtaactaagcacaccccttaaagaattttgggaagtcgccccgcgattaccggctcccccaagaaccaagcagtcagtgcagggttttgcaagtgagagtgcgagactcgggaggctgctcacggtgctccagtccctggcaggagcatggacacctcgccccttccttccgtgggcctcaacgttgcctgctgagattgtgactgccaccccgacgggagcagcttcccctacagactttgtagagagcgcttaaacgcctcggggacagcggccatgactctcagcttgggccgaccccgcggccgccccacgggaatgcgtggccgacacggggcgtgggcgaatctccgaccctcgcgttcagggggtgcatataaacgggcggacaccgtccctggggtaagggaggcgccagcaagaacaaggcgggccaccaaccccgagcgacctcctaccggacggatccaaacccaaacattgtccattccgggccgaagtctcggccttcacttcacttccgccttcccagcccgtgaacacgaatgcgcctgcgcgcacctctctcagcggaagtaatagtgacaaagctgggttcgcggctggcccaggagtgcggggcgcgactgggcggccggcggcggggaggggcggagcgcaggagtcggaggcgggagcagaccagcacggcctcgcggagccggcccggcggaccgtgacgggtcccctcacctcctcttctctcccctccccgcccgccctctctccctcccttcctccctcccgctcgcttcttctcacgccgggagcaggctcccgcctcgcaccgctgccccgcgagcagctcctcttctcccgaggcgcgcggggcgcccccgcgagccccgcggctgagaccccgcagcctggaggagggctgtccggggctttgggtgggtaccagtattacctcctgcccccatttctagaaacttccaggttctgaaggaaggggaggttcgggtatcccctggatgggggggcatctctagggcgccgccccgctggcgtgagctggggacgttgcgggcacacgacggggcgggtgcgggatcttggggaggggggctcccgagatagtggctgggcggggaactccttcctcagcctctcgtcagcgccgcttctcctggtttctcttgcagatgctgctgctaggggtggtgggagcagccgtgggacgcgtggccgggagcgggggtgacagcctgggattccgggggcttctcttccttgtcctcctcctctcctctctattcccagtgtggccgtggctgacactaaagactttgtagccatcaacccgagtgcagtttcgatggaaaatgaaggtaaaggcccctggccgaccggttgcaacgcggagttgagggtgtggtggtttgcttttaagttgtctttgtttttccacctttttattttcgtgagcttatttatttactgtgtatgtgaagtgtccaaggatttgcttacttagggtatccagcttttattttggtaacatggggcatttgagagattgaggttctgtgggtgactgagcttgattcagctttcttgaggaattcctgctctcttcagcttagggaatgagagggaagttttcatttcagatagcgtctgtgcatgtttaaatagctatttgaaaggaattactcgaggggaagtggaaatgggggacaaggggatggggctgcatctctgtatattggcgtttcaagcctcgatgtggtgtgtggcaggattcatttataagaaagcaagccatgttttattatgtctagcattggggaaaaaactcattatttttcaattcacaaaaaaaacccagtgaatttaatgaaatgttatgagatgagtgcttttcttaaagttccaccctatttcaaaacatcatttaggaggctgacagcggaacctgtttgttcactgtacactttggacacattagatcgtcattcacatgttacatgatccctttggcctcgttaaaatatttaatgcttttcctacacagcactgattatttttaaaattgttgaacaactgtgaataagtgattttttttccccctcctgaaacaacacttattctttggactgacttctgacttgtgcgtgatcatttttttttcttctgcctttaaccgggctgcaaaatactataaaagatacttaacaaatgacagttttttcctctggtataatttgtttta

SEQ ID NO: 9700 - DNA, 6000 bp, Homo sapiens
gggatggggaatacagaggtgcatactataatctctttaaaaataacgtgttcgtttgtatttactgctcttatccatacagccttcttattagtacatatgtacagaggaatgtcttaaatatttatcagatactataggtagaaaaatagaggtgatttgtggctttcattattgcttgagtttttaatataataagcatgtgttaaattctgtttttaaaaatcctctaaacgtttttttaaacaaagccatagcaggggaatcccatgattggtatccctaggtctgaggtatgttccattgtacattggagctttggggagcggatggaagaaggtgtctggtgaatgggacattttagtttatggaagagaagagaaaaattccctgactacaactggtttcattgtaactttccatctgctattggaatcaagaactaaaaacttatcagcaggcagcagtcagtatcgcatgtccttcctctgcattcgtgcccacggagctcctgatggagatgggtgagtacagggaagcaactaatctcacccctcctgctcattcctgagaatgggagtgctaacttctcactgagtgtgggagctgtgcacatttcttctgcccaggaaacatactgaagaaaaaaagtctcttttcttgaaccttttttcttcctttcccaacttcaccaccacggcagccctcttcattcacatagctctgaccaaatatcctcagcgagttaagacagttacggttggaactctccgtgtctggctcttccttcttccctgcatctttggtccccagtcaggaggtctaatggtaatatccagtgatttttctaaagaggaatcagtggttatattatacaaggggtgtgtgcgtgtgttttgggtggtgaatacagagcagcggttaggaccataagaaataagagaaatggaatgtggcatgaccgctgccagttctgatatttttgaaattggtaatttaaaataaagtagttggtttacttacttaagcctcacatcttaaccgtccttccttgatctggagttcctatcgcctacctttatcaattaaaaatgccttgaaaatgaatcctactatgttaaagcatacggttaagtagatagaagcccaattgcctgggatgaagtcccaagtctgctcattactatatatccttggggaggttactcaaccctgcttcagtttcccctctgtaaaattagaaaatgagtcagtgtgagaattaaacaaattaatacattaggcagggcgtggtggcttgtgcctgtaatcccaccactctggggggctgaagcaggaggatcacttgagcccaggagctcaagaccagcccaggcagcagagagagactgtgtctctacaaaaataaaaataaaaaaactacctgggcatggtgtttgtgcctgtagtcccagctatttgggaggctgaagcaggaggatcacttgagcccaggagttccaggttacagtgagccctattgtcactgcactccagcctgggcaacagagtgagaccctgcctgaaaaaaaaaattaaaagtatttagaatgatgcttggcaccaggaagtgctcattaacattagaaactatcttcatgccccactgtcttccccatacaccatagtcttgcttccatccccacactgccccatcccttgcttatccccttgagctcagactcattcaaagccttgtcaaaggagcctctctgctacagaagatgctactgaccacttataggacatgtctgttttactcctgtgccactgactcttccttcttaggcttttttgtgggttcctttcctcattcttcatgttctccatgattttaatgaccacttatttattcctgactcccaaatgaaaatctagtatatacttgtggaactttatttgtgtttactcatcacttgcttgacataagcttttagatttcccagaagcacctaaaactcaacatatagaaaagagacaattttcattctggctactcttacgttggatccacagccccaagccctctcccgttgaggtccctaattcatttaatggctttctcatcttcctagtcacccacacccaccacctaggatgcagccttgataacattccttttacttaattcacaatatccaactaatcacatcctacgtattttaactctcagacatctctcaaatttgtgctctcattttcatacctatttctgtctctgtattagactctgagcatcctttgcctaaatactgcatcttttgcctaaatgctctcagctggtctctctgtctgaagttttttttttcctctcaagtcatagtcctccatagatctgtcaattatctatgtcaccccaaatgaaacttctacacttgatcttagccaaaaggccgagaagcgatccccaaatgaaacttcttattgcattctggacaaactcttaagttcctcaacatagcacagaaaatcccttctggtctgattcctgccaacctttctagcttcatctcctgtcactcctacttaaattactgctctaatcaatttttatagattttataattgatgatttggcatctgttgatcactaggccaaactaacagccaacattgtttacatttcccctgtggcctggcttttgagggtgtgcctaaatcatattgcaaatcttcctaatacaacccttaacatctgtgtttcgcttcttgcccaatcaaaaacatctctatctagctactcgctgacacattagtaataaaggaagagtcccagttccttttttttttttcctttttttggaggcagggtcttgctctgttgcccaggctggagtgcagtggcatgtgatcacagctcacggtaacctggaattcctgggctcaagcgctcctgcctcagtctcccaagtagctgagactgcaggcatatgccaccatgcctggctaattattttttaattaaagaaaatgttttaggccgaggtgggtggatcacgaggttaggagatcgagaccatcctggctaacatggtgaaaccccgtctctactaaaaatacaaaaaattagccgggcatggtggcaggcgcctgtagtcccagctactcgggaggctgaggcaggagaatggcgtgaacccgggaggcggagcttgcagtgagccgagatcgcaccactgcactccagcctgggcaacagagcgagactctgtctcaaaaaaaaaaaaaaaaaaaaagaaaaaagaaaatgttttttgcagagacagagtctcactatgttgcccaggctggtcttgaattcttggcctcaagcaatcctcctgccttggcctcccaaagcgctgggattaatagctgtgagtcaccgggtcctcccccagttcctctctttttccttgtccctgtgcatggtgaggttttgtgtggccctgagtggtatcaagctaaataacaagcagagagggacgctctaaaagaaaataatatttattctggaataggcattgcaatgggactacgcatgccatagtcaactatgtgcatattcaggggggtgtaaaggaagacaaagatttttaaagaaaaaatgagtcagattccataattgttttaagataattatccttggctacaaggatcaaatggcaaggatggcatcagtactaggttggacagggagttgctgggtagccgtcctaacagatgtatttttttgtgtgtaaggttgcgatggcctttgtgcaagtctgtggtttttgcagtcttttgtgacagtttttgtcatcaggcatgggtgcctgagaaccctccctccatggcctttcaccagctccatttttctgattaaaaaaaaaaatacaagtgactccattttgatgctgacaactttttcaatggcaatgtggaactgtaataaacttttttcaatctttcagtgacactgacatcttcatgtctctactcagccatacaattaaattaaataatgtgtacattttaaaacaatgacagctgtttaatgacagagactgtgaactgggaccctctaggctggccacttttggtgttttatttgggccacaagtttttgaatgctttcaattacctacagaaaatttcaaaagtggaaaatttcctataaaaatctgcctttattgcttctcttgaaaactggaagaaccggccacccaggtcccataacacctacctggctgaatagggtcggccctactttcagcagaaatacctcctgcagttttcaacagccccagctctcctgggcgttgattttcctagttgcttcctttaatgcagacatttgagtttgcagccctagattgacagtgtaggggcactgaattacttagggttcccacatacatcgtttcttacactcattttcttctgcacagcacctttttttcctttaaccactcgcagatgctaactcattcttcaggactcaattccaatgtccagaagcttttctctgaactcatgatggactccgcgtcccattatgtattcccacatcgctccgtacatccatctgtcacatcccttgtcacattaaattcagattaaatgtttgtaggatgcttgagttcttcacaagtctcacgtcacttagcgacggtcgggaactcctcagtggtagtttcgggagccattcattcattttattcatttcatcattctttcaacagtcataacgtaggtgacgacgactgactcatctcttaaaagatgtgtgtgtccctcgacaaataacctgtctgcccctatcgttctgtaggaggacggagtcccagagaactacaactcccatcaagcacttgggggatcgccgcggctgagggagagactatggcttaggaaccaccattcgcgtgaggctctgctccccgcgcctgcgcagagtgcagggccacgtcgcttttgctgtaccggggaccacgcgtctcatccatggcttccgcggactcgcgccgggtggcagatggcggcggtgccgggggcaccttccagccctacctagacaccttgcggcaggagctgcagcagacggacccaacgctgttgtcagtagtggtggcggttcttgcggtgctgctgacgctaggtaaaaggcggccggtggtcatggcgggtttggggcgggcagaggtccgggctttggctgcaccgctgcaggccggggacgcggggctgagagggcgccttgagggcatcaggagggtgagacccacccagtctacaccccaccctctctcctgaagcagcggcagcagctgggcgttaagggggatgccgggcaacccccggagttaacgtcctggtccttggggcgcagattgctcttcgtcatctgccctgttacgcttgagcgcgctgttcctcgccttccgctgttctcactgcaaagactcagggtcttgacaccaactttcagcctcccgtgtttgcgtgcgggcgctgggataccaaggtagtgagatagcacctgagtcccagtcagagtaaggactgcaaagaaaagttgacagttgacagtgcctggctctcagtggatccctaacaacagcaatagtaaccattatgataaaagtcagttccaggtgaatgaggtgtttcgtcacagacttctgtgaatttccccaccccagccatgcacatatactgattcccaaggcgtaatttttgttgtttttctctgtctattccacagtcttctggaagttaatccggagcagaaggagcagtcagagagctgttcttcttgttggcctttgtgattccgggaaaacgttgctctttgtcagggtaaatgatttcattgacacccctgttaagcttaatagaaaattttatagatcccagtattcctgtcatctcacggtttattttgtaaaagaagctgatgctgttaaatttggaagttaattcttgacttacttggga

SEQ ID NO: 9701 - DNA, 6000 bp, Homo sapiens
ttttttaccatctccattgggagaccatgagatccttaaagggagggactgggtcccagccatcactgggtccctagcacttcacagacaactggcacagaattgctgctgaataaatgttggaagaaagaacaaaatagggaaaggaagttttttgttatttgcctgttacccatattaaagtgtttcaaataaatcttaaaggttccacctgcctctcaaaaaataattgatgaaaatatgtcctgcagcttaagaatctaattaaaggtcacctgggtcatggagtgtgtaactgaaccttttatttatgcggtaaagcagtatttcaaagggaaaggataggatggggcaacaaaatcttctcatgtacaagatatgcaagtgacatacacaggatggatgctatttgtgtaccttttccactaataagtagtgaatgaaaaaaggttttatatatatatacatatacacacacacacacacacacacacatatatatatacacacacacatatgatgtgggttataagtgaggaggaaaattctaatagaatagctttatattgggtagaattatcaagggaaattgtgcaattgctttcactagaaatgctttccaaacatttagacacaaaactgtttagaggtagggagtgaactggttgactgccccaaagccttctagtcagatgggcctctgagtcttagcaaaagagttcagtcacccttgggtgcctgagagccctcagctgctggccttagcagcaagcatctgtcactttgaaggagtgatttagtgatatcaaatagctgagtgattaatcaagaaaataagtgaggatttgacatcagacagaaaaaaaattgccaaggagatgctctaggggaaaagaggcacccaggcttggaatcccaaaccaatggtgccttcagggatatttacaaatcataacccattgctagagaaagatcaatgttctgcaaagctaaattaatatttaacttgctcaagaaaagtcaataccttgagttattagggaaattaacaagcagccctaaactgacactattcttgcctgagccatcagcatgttctagaagtcatcaatgagttaatgttccctacaccacccaatcaaatcctctccttgaattcctcttactcttcccctccctccttcttttcctgctgaagaacagttccttcaaaaaaaaaaaaaaaacctgatatagatgcccagtaaaaaagataaaaaagctactggagcagaggtgaggtctgaagccccagttccttggccactttcatgagcatcccctgaggaggcctcagggcagttgtaagctcttggaccaagaacagcagcttccaagcctcatcatgcagcagagtcaattggggaggggaggatatgaaatcacattcatgggctgtattagtctgttcttacgctgctaatacagatatacctgggactgggtaatttataaacgaaagaggtttaattgactcacagttccacatggctggggaggcctcacaatcatgacggaaagcaaaggggaagcaagacacatctcacatggcagcaagcaagagagagcgtgtgtgtgtgtgtgcaggggggacctcccctttatcaaaccatcagatctcatgagacttattcactatcacaagaatagcatgggaaccccccactccaccccgtgattcaattaccttccaccaggtcccgcttacgacacgtgggaattatggaagctacaattcaagatgagatttgtgtgtggacacagccaaaccatatcacgggcctacctcatccctactgacaggcctagggatcagtatttttagagggcctagttggtgatgttgctgtatttatcctggcacaagttcaaagtccctagctgggttctacttgaaatccctgtacttggtgggctccaagcgcactcccaggtgtgacattctgcagttagttggataatggtcatttataccttcagccatgtctgacagagccattcagtacccacagaaatataacatgagggtatcaggaagagggacagaagaaaaggcttcctgggagaggtgggatttgggtaggaatagaggtcaggaaattcaattcaactcattttagttgtgcaagtaaacatccagtacagtgtttgtggcggaaggtgctcagtaaacagaaggtcttcccagcatgtctaactagccgctgtcactctcttgctgcttcctgctttgtgattcttcagagctctcctcagcacctgacatgccactgcctatttgcttattattgccgcccttccaggacatggtaagacccctcagagaagggctgtctactgtgttcccacagctagaacagggcctgcctgaatacgtgggtgagcacatgactggcctgggtgtggttgtggagatggcaagaggataccctaggcccagagaaagaccagcagggcctgggctgagaaggcaggtttcagagagcttacaaagcagtctgaatgtcatgctagagtggtcagtctctcttcagcagacagtgaggagccactaggttgctatgcagggaagagacaagatcaaggttggcttgagaaggatgagtttggcagcagagtttggagggattaaggggagggagggaagctggactgtcattcagagactctccagttgtccaggggaaggtagtatgggtttacactgggtcagatgcacaggcataggacaagggcataaggaggaggacatggcagagccggggctttgccagacatgcctaccaagtgactgtgatatagtgaaagggggagggaagagtgtgaaactcacccatccatccatccacctgtccatccatgaggggatggctgggggtaaaaaagcaagtgaagctgccaaggagttgcccatgtaccccaggaggacgaactccaaggatggagtttgggggatacctctcttgaaagctgaagaggtaacagagggaacagtaagaagtggcaagacgggtaggaggagaagcaggaccatggaaactggggccagagccccaaaagatctactggacaccaatgtcagcaggtgctgacggtgcaggaggatgacagctaactaggagcaggttgttgcccagggtgacatcaggtggctccagggacatcacgacacagctggtggtgtggaggcgtagagggcagctaacatggcattaaggtggatgatgagaaggtggaggttgatgacatcttcccttcaggcacagaggtggggtaggagggaggggaggggaggaggaaggcagcctgagtcagagccagggaaggaaagaattgtcaggattgggggacttgagtctggctgtggtggagaggaagaagtcccagcaaaggagagactagacacgcagaggtggggggtgtggggaactgatttagaaaagcccagaaaggagagtcatcccaaagggaaatatcgcatctgcccactgttagctcattaacagaccaggggaaaggattggtgcctccaaggtgagaggcgtaggaggaggggtggggaacctaacgggtcatccctgaccctgtaggaccagactatcatcaggtatgtagggggggcgggagaggagggaaggacacatctccagcataacatataacagcctcaaggtgagtttctgatttagaacccttgaccatctccagaaacaggaagataaagtgtagctgtgagagctgagcctgggagaattgctcctatctccaaggctgcatccccagttgctgcctaagtccttcccacccacactgaaggcctggcccacagcaacagtgcacctcgccttgcaccggcctgggagagccctcttgcaggctttgctgttttatagctgactgtgtgactcctggtctccccacgctgagctgtcctctggggtcagggccctctgtggaagttcacaatgcactgggaagtgaacaccaaaggcaaccagaggcttctgcagaaaaagaactgcgaaacgttggacaggaagcaaatccggttccctgtggaccctggagcaagtgcccacaggttatctgaacagtattcattctttcgacggacatgtactatgcctcccgcaggccaggcactgttctgtgaactgtggattctgtagtgaacaaaatagacaagaatccgaaaatggtgaccccattttaatgagggagagaccccacgataaacaaaatcgattagtaaataccaacccatgctagagagtgaagagctctggaggagaggcacgggtgcgcccctggagttgctctaaacagggtaggcagggtgctcttgtcacagagaagatgaacgaaggctcgtttgatcatttaaagcggatccagtcctgggtgggatgtaagggcacgaggcctccccagctccttcgctgggcaccctatggggggacagggtgagttgggcgggccgctgcggttctccgagagcaccacgagggggagcccggacccctcctagcgccttccgagccctcccgcacagccttgcaagcaaaagtttttcttaaactaacaatgccagtgtaaggaggtgctcgcgcctgattggccgggggaattttgcaggtttgattccttgattggacaggaggtgttaggggtggggagagagctgatggtgggggatcccgctccctcccgcgtcagtctggccggctccgtcctcccgtaggctccgctgtagctagcaatgtgacaccaggacgcactcgctctcgcgcgctctcccaggctcgttctccctcgccctctctctctcacacacgcacgcacacacccacctctcccataaacacacacacacacatgcacacccacacccacgcgcgcccgcaccgccccacgcgcacacactcctgcccacgcccacgcagcgctccgggaagtccggtccgggcgagagcgcgaaaggataccgagaagccacccgcggagagcgcagcggcgccctgggacgcggcgctctcccggcgctgctgcctcggcttggtctcggcctgcgggccgtcggccggcgatggccctggattatctactactgctcctcctggcatccgcagtggctgcgatggaaggtaacgtaccctccacggagcaagttggctgctggtgccggccgccttgggactgctgtgctccgcggttcgcggggttcctctggctgctttgcggtgcaggcatcccgggacccgagggcaaggaggtttgggagcctcggccgctgccgagcgcggggcttgggcggcacccaccagagcgcccccggctggctcttagcgcccgaaactggctcgcgagtcccccggcttcctcgccccggcactccctggtagcctcggtctcccgcagcccccgctcggagagctcggagcccgctgcattgcggtgcatgctccttagctctggggcagagccagagctgggcgttggggagaaaggggtgcctctggccatccggctcctggagtactggcgcccgtctgctcccaggcacggatacgcttctgagcagccgcgcgccacctccttttctccagctcgcagtccacgggctagtggactctgcttggcgtgcaagcactgcgcgcgggggccggagaagctctgccgtggtatcccgcaagtggccgccgaaggagaggggtggagttcattggccgtacccttggggaccagtctggtggtccgggcgcctgcgggactgcaggtttccagggtcagtcggggagaggtggaaacccttttcgcctcttgagccttggaacaggagtgggctggggtgagtggtcggtcctacctaaagtctcccagcctctccaccaccccggagaggatactcggcggccgggagtcgtcgggcagcgtcactctctgccagctcagacttggcgg

SEQ ID NO: 9702 - DNA, 6000 bp, Homo sapiens
taatcattgagtaaggatggcttctctaggagaagtaatgtcaaacttgatgttttctagacttaataggcaagggggatgttacagagaacaaattcatcaaggcatatgatgatgtcaagatgcaaatattttttttaattgttacatctctatatgattttatgtttaaatagcttttggagatactcgtaatcaatttatccaaccaactcacctcaaatattttattgctgagctgagactgttctagcaatgtaacagtgaagaaaatggacagagtttttataaaacttatattttagtgatgtgatacgtaacggagaagagctctgaattaaaatagaacagatttgagggttgaagagtgagggtgagggtgttaatttatataggatgataaaaagaggcctctgataaaattgacctttgagtatactgtgtgctccacttaatagaatcactgatgactacgaacgaccagtgactgaataaaatacagcaaccaaaatcatttgaaaactatgtggaacttcactattacagagcattgtttctggttttcagatttttaatttgactaaaatggtattttatcgaaatgtggaacatttaactacagaaggctattctgaataaaccctgattctccattttaagaggagttttttggggggatgtcaggtagaaaaagataactacaggaagaggacagtttggccgacttaagggttctaattgagcacactctaaggaaaccctggaggttaaattcctgatgaccagacaaacatttgggaggaaattgaaaaactgaagtatttcagaagtgaaaaaggaatgcaggagccctgaaaattagattctaaaaacgtgtagaaattctacctggggccgggcacagtgactcaggcctgtaatcccagcactttgggaggccgaggcggggggatcacatgaggtcgggagttcaagaccagcctgaccaatgtggagaaacaccgtctgtactaaaaatacaaaattagccaggcgtggtggcacatgcttgtaatcccagctactggggaggctgaggcaggagaatcgcttgaacccgggaggtggaggttgcggtgagccaagatcacgccattgcactccagcctgggcaacaagagcgaaactccatctaaaaaaaaaaaaaaaaattccacccggaacagtcttggtggaagcatgaattagaagagtctaagacaagtggaattccgctatttaaattccctgtgttacttctaaaaagaaaaaatagagacacagtgaaatccaactaaatgtcagaagtgctacaagacagaacatagatatctaagaatcttaatgcaaagggaaggaactattttgtgttaagtaggggaaaggaagattactggactgtaataattgaccacatagttcattcaaggacacagggcctatcctggacttgcacaaccctaagagtgagtgcctcagattttgcgccctaggtgcttcccttaattttagtcctggccctgcagggcacagagagcttagggttctcttccttggccacaaaacttcccatccctccccactgcctctaccttttcataaaaccttttctctgcttgcttttccttccataattaaatatcagagatttaagtggcaaatagtgtaatcgaaaaaaaaatcctatttctgaactgtacctacctataggaaattggtctattcttccagcggtttatcttctgacatggatgaccctccaactctgtggaaggcaccagaaattaacttgagaagtgcaggaaacaggatagagaatagtttcgttgtgcatgttgcatagacaagacattacaacttctctttctatagaggggcacctcaaagccagaagagaaaggcaaaatcagggtcagggattatccaggaatgttaggggctagcaggtgaggcacagccctccagaagtcctcacccaaagatacagcccaggcagaggtgggtggtctgagttacttgttgggtcatgacccaggcttgaaacggattattgttcaaaaaatatgacaggcagatggcattatctctcagtgccccttgaggtgtgctgaacccagggcagactctgtgcaatggcttatgaaggattggcaggcagtactgtcttgccagagcattgtagtgctggacaggagtgtcttgacagggaccaatgagcaggtggagctaactagccatcgtaacacttcaaagtttggtaaacaactcttcttctccgacagcatagctaaatgattcttattctttcctccattttctctgtttactttcattttcatcttcttaattcagtctgtattcccctctacctttccatctttgctcatatcattctcccaaaaggaatgatgaacagtgtgcctctcttcccctcctacccatatccaattggtacatccggaacctcatattgaggtctacctattccctaaagcctttgctgatctcttggatcactcctttgtgtccctcagacacattcctttgatgctaactgggaggcagttaaagtgagtgaaaaaagcttggagttatgcagacctcagttagaattcctgtttccatccctgaatagctctgtgatctacagtaagttaatttccctgagccctgtgttctcacctgaaaagtggagaatcaaatcatatcttaccttgcaagtctgttgtataatatatggacatgtatatagtgtgtagaaaccctttaggacattcttggcagataatagatatccagtacacattggcttatattgctaacttttgacatgctggaactgtgagcagaagcgaacttaggagagaggaatcaggaagccaagatggagaacaaaggtaacattggggacagacgttgaggccatgtatgaagcactcttaagaggagcagtgagagactgtacaagcagctagtgaccagaggtcaaagtacagatgtggccactgactcacagtgctggaatcaaggaaaatatgcaccaggttttcttgactatggtgtggtaaaaagatatacagcaatgtttattgtatacttattttgtgccagatcctgttctaagtttcacttaatcctcacaacagccctgagtcagacactattataattgttcccaattttcagatgagaaccataaagcagatagtttaaatgacttgcctaaagaaacacaactaaaaagttgacaccaatcaacctgagacaaagattatttatatactagagactcccctgcccatataagcatctaagctcaaatttcgcaagctgaacatttgcagcctttttctatagcacccccaatcctgcctgtcctgaccacactccacccacttcattatttcacttgaggtgctgccatccacccagttacccaaactcagaacctgaaagccatgtttggctcctcctccccagccctcttaatgcactcaatatccaggagctatcagttctatcttctttatcttttgaatttggtcatttctctctgcagacatgagaaacctagtggaagccaacaatgtctgtcacctggatcactaccatagctccctcatggccctcctgccttcaatctggccccctgtgctgttttctccaccctagtcacaaactttttaaagctcaaatgcagggaatgacatggtcatatttgagctttgaacccttcctttgaccttcattcctctcaggataaattccaagctcctcaataaggcattcaaaactctctagaatcctgtttctgtctgccactaagccctatttctcgccatttcaaccttgttctcgtgttgcaccaaacttcttcttgcttcctaaaaacaacattcctggctgattttttttttttttttccagagtttaacacccagtcctggagtcacctcctccaggaagctttctgtaatcctacaaactgggttagatgtttctttttagtgatgctatgtttccttacgaatattgctgtcccttcattttaaaaattgacttatgattattcccgtgtctatcttctccactagttgggaaattcttgttgagggaatggactgttgaattcctaagaactagcacatagtaggccttcagtgaaggtttcttgaatgaataaataaatgaccaactttcccaaggttacattgtaagttctgaaacttgaaccaaaatacattatactctagaacccatgtttattccactattgtatttgcacattagggtggttaaagtccttcaagggctaaattttaaagggctaaatactatcacaaggtttttcttccacctattgaaattggttttaatttttcagtaatacattcacgtgactcagtaatcaaacgatatacaaagatattcagtcaaaagtcttgttcccatttttctcttccacctttccaattcccactttctctgccccaaggtaaccaatcttgttcatttcttatatcttcttttagtttttctttttgcaaatgcatgcaaatatgaagctatatattattctttaccctcctgacttttagaagggtattttaaattttttcaaatatctttagtttttctgaagtgggtacatattagaaaaaagagctagtcagtacccagcttgaatgaactcacagagagaaacttggaagaggacagctatttaatgagggagggagataatcctgcctgctcattggcttttagggaggtgcagagtcctttaggacagagcctgtggtccgggtattgctcataggcagattctcaagctccccaaagttacattttctctggaactctcctaggccactccctgctgatgcaacatctgggtttgggcagaaaggagggtgcttcggagcccgccctttctgagcttcctgggccggctctagaacaattcaggcttcgctgcgactcagacctcagctccaacatatgcattctgaagaaagatggctgagatggacagaatgctttattttggaaagaaacaatgttctaggtcaaactgagtctaccaaatgcagactttcacaatggttctagaagaaatctggacaagtcttttcatgtggtttttctacgcattgattccatgtttgctcacaggtaagtatgaattagaatacatccaatagtttgggccttgaatataggttaagaaggcaaaaaatactttcccagggcctggggttgaaatatgtgtatagaatatcgtatatctgttttacaaaagatttatcacctcctaaacctctattcccacatcccaaagaaaaggcctgcattctgtttggaaatctctcttcttaatgtccacacaacaatctagaaagagaaatcatcaaaataaataaaagcagagctctgtgcactttgttacttatctcatcgtctggttttatatagtgcaatgtagttctttcagacttactgtgtgtgtcttggagatgttaactgtaagaacaaattaaaacaaagattctagcaaaatacacatgaataaaaagacaatttgtgagcttaacattggatacgagacttataaaaattggatttctctactggtcattgaagaaaaggtactccatagcattctaaaaaatatttggtttgggacatttcccctgccagtgagattacatagttttctctgctccactcctggttgcttgtacctatctgctttattgtcttaaaattggaactctgtagcctttgatgtttgttcatgtcaaatcacgtttaagagaaacttctaattttgatactccaagacactaggcactttgcagtgttgatgggagccttgagtactttctctctctctctctctctctgtctctctgtctcactctctgtgtgtgtgtgtgtgttttacacagaactaatttaattattctagttagtttacat

SEQ ID NO: 9703 - DNA, 6000 bp, Homo sapiens
gatgttttctttaaggagttttatggcttcaggccctacatttaagtctttaatccaatttgaacttatttttgtatatggtataaggtaagggcccaattctattcttttgtatgtgaatatccagttatcccaacacaatttactaccctttcttttttgtgtatttttgatgcccttgtcaaaaattagttgactgtatattgcttggaattatttctgtcctccatattttgttccactggtctatgtgtctgtttttatgtctgtaccatactgttttgattactatagttttgtaatataatttgaagtcaggaagtgtgatgtctccaactgtgttcttcttcctcaagattgctttggctctttagggtcttttgtggtttcatacaaattttagaatattttttcatttctgtgaaaaatggcactggagtttgataggggttatgctgaatctgtgtatcactttgagtagtacggacattttaacaatattaattcttccaatccatgaacaagagacatctttccatttatttgtgtcttcgatttctttcattgatgttttagagttttcaggctacagatctctcacctccttggttaaatttactccaaaatattttattctttttgatgctattacaaacggtattttttttcttgatttcctttttggatagatcatgattggtgtaaaaatgcacaactaacttttgtgtttcttttgtatcctgcaacattactgaattcatttgttagttttaacaggttttttgtggagtcttaaggagtttatatatgggatcatattatctgaaaacagatcattttacctctttctttccaaattggatgtattttgcttcttttccttgtctgattgctcatgctaattcttccattttaaaatcaggttgtattttttttattgctgagttttaagagttcttagtatattttagataagaatcttgtaccagatgtcttttgcaaatattttatctcagtctgtggcttgtcttctcaatgttttgagttagtaattatttttattatcagtctttaaagatataattctattcttctggcttcagttgttgcaattgataaaatagctgcaattcctttctctcaggattttacagatgtaattaaagttactaatcagctgaccttaaaggttttaaaggtttttctctttgactttggtgtttttcaatactacaatacatccaggtgtgaatttgtttttatttaccattcttggaactcatttaacaacattaacatggaatttatgcttttcattcattcttgaaaatccttagccaataactcatcaaatatttttttcattctatttattgtcttcttatactcctattagatgtgtgttggaatttctcattcatttttccattctcttactactgtttcatgttttccacctctttatttctctgtctacattttgcataattttttcagttctattttttactttatgagtattaccttcagctgtgtttaatctgttaattatctgtttttagttttctactgctgtcataacaaatttccagaaacttagcagcttcaaataacacccatttattatctcacagtttctataaatcagatgtctagcatgatattgatttttgcatatggtgtaagataagggcccaattagttttgggatattctgtttaaggaattgctgagcttcaattaaggtatttgccatgcctgtggttcttatatgggacttggagggttcttccaaactcactgttggttggaagaattcagttctttgcagttgcagggctgaagttcctgcttccctgtcatgtgatctcctttcatcttcaaggtaaaaattgtgcatcaaatccttctcattcttgagatctctctaacttaactttctgctacatctctcccactccatgttctacctttttctgctgctttttagggtttatatgattacattgggctttcctggataatctaaaataatctctttatattaaggtcagctgattagtaactttaattacatctgtaaaatcctttttgccatgtaatatattatagccatgggagtaacacaaaggccagagatcactgggaaagagggcaaaattgtgcctaccacactatccattgaagttttgtttcattatctatatccttaatttctagaaattctagtggggaagttgtcagatcttcctgttctttttttatggtgacttttatttacttatggttttagttccttcttttatgatttaactgtattatctgattcaagaaggggtttcttgtaagcattaaagtcttatgatagtattcataagtaatgtgccagagtcagcttgcaagagttgattccatgcatctcttcccatctttgcatttagtgactttacattcacattagtagattgaaatcagccatggtaggagaattggcaaagactacaaatcagagtaattctttttttctttttagagttggtttactagtataccactgggtttactagtacaccactgtttatagcagattttgaattttgggttttgagctcaagtttgacaggactttaaatgtcgaaatcttatgcaacctgcattgagggttttgcagttgcctctgcaaatcattctagatgtgttatcagcctggaatcaccttttaaagctactttcttagtgtaggagctccagggccatgatgttcagggtacaaattcaaaccccagtcacattacagaaagaggcttttggtaatatagtctcagaagatttttttcaatttttttcacacatggaccagctcaggcaaagcctaacaagcttccttgttttctctctgggccagtgaactgatttttctagttcgtttcttcactgtatgaattttttaatagattattgagggaatctaagacaatagttttcaaattatgttccctggatccctgtgggattctaataagtgatcttagaggctacttcatggagcaagagaaaagtttcttcatcccataaatcagagtagcatgcccttcctcctgccctcccactgccacacaagcatatacatgcacacacacatgaatgcacacacacacacacttttaatctaaacgatatatttgtcttcctgacaatatcatagtcaaagaaagaggtacctcttttttacaattatgaactaacatattccaaaatcttaactttagaaatggaaagactagaacacagagatgttagccaacaacatataatatagctctgtgagttggtgaaaaaagttgagacttgagtccaggttcaaaataagtaggaataatatttggacaaaaaaaaacctttaagcctttttgtaactagagacactttgtgtgagtaggctgcagtttaatttctggatcaatgtgaagaaacacaatgtgagagtgatcatcaattgctacagctttcaattatattatcagtctgccctagtaatatttcctagtattttctgagtacagtgctccatatgtaatgctcaacatttcacatgtattttcacatttaatgtacaaaacaatccagagagataagcactattattacctcattttacatatgaagataatgtggctcaaagaggttaagtatttagctgctacccatccacagctagtaagcaatggagtggggcttgaacccaagctgtgtagttccagagcccaaagcccttcttgcttcttacctctgctatcttccttcctgcatggtttctccattgattaaggcagtcaggtgccacagaagctgcaaacagtttaaccacattaactagtcaattctatcaaataactactacagctgattctcattaaccatgtgtaccatattttcaaatttgcctacttgctaaaacttattttaactccaaaatcaatactcatggcactgctgcagtcataacagcatgtgccgagggtgaaaattttgcattgcccaagttgcatgttcccagctgaggtccagtaacgtgaaaatcttccttcttttttcagctctcatacggtaaacaagtgtcctctttgaagtatgtgtaccgccacgtttttcacatttttgtgctttttgttgatttcactgtttaaaatggcccccaagcatagtacagaagcactgattactgtttagaagcacaggcaggctgtgctgtgccttatggagaaaatatgtgtgttagataagcttcattcaggcatgaatttcactgctgttggctgtgagtccaatgctaatgaaccaacaatttatattaaataagctgtttttaaacagaaatacacatacagtaagtttatctactgatgatgaaaatgttgtgaccagaggcttgcaggagcctgaccctgtacttcccctatgggcaatgattcagtattcactaattcggtgttctttgtgactttatagaacgtaactaccatgattaactagaatcaactataccttattatgcctcataaccggccttgcctaagttttttaactaaggtggcagcatgtatctcagtccccagggccacatggatgaagcccttgtatctccaagtattttgtggcttaactactggaagccctgcctgaccaatctgcagtgccttccgggcaaccacctctgcacttgctttaccctctacagaggggagcctggttaatcaggaaagaaactccctcaaaaggtaaacagtgagtagagtgtacatatggtggaaaacaaatgactcttggtaccctattgtgggaattatctcacttcaatagataaaggagtagggcaagcccaggtggcactggtgagtaaccgcctccattacatggtccgttcctgacgtgtacaccagcctctcagagaaaactccatccctacactcggtagtctcagaattgcgctgtccacttgtcgtgtggctctgtgtcgacactgtgcgccaccatggccgtgactgcctgtcagggcttggggttcgtggtttcactgattgggattgcgggcatcattgctgccacctgcatggaccagtggagcacccaagacttgtacaacaaccccgtaacagctgttttcaactaccaggggctgtggcgctcctgtgtccgagagagctctggcttcaccgagtgccggggctacttcaccctgctggggctgccaggtaagggccaggtgtctggctggctggagggagagattggaggtggagaggaaactgcaggctctgtctgggcaccacgacagggactgctggggagggaggaactgcgattcgtgtttgacaggggcaacagccacctgcaccagggtggaataggaggacgggaaccttagggagaggaagtttctggagctgtctgagctcctgttcccctaactggatggtgcccaattctcccagaggaacttattttttcaataactcctatgtgagcaatggcatagtctcaatcacccataggaacaggactcaggaggcccagacttcggccactttgttccttcggccccgggattccccctcactgagttggggactgcctatctcctgaacagattccatcttcaggcctccttgtgcctgaactcagcttccagggacacctaagtaagcaacagcaatagaaatcgggcagaggaaaaaggcagagaaaaagaactaggtggctgtgtttccctgggacgtcagatgggcccctgcactggggctccaggttcccgatctccagaaaatattggtgacaaggaaccagactcagggcgctctctgcacaggggattctgctgtggcaaatgggcgctgccatgcagggaaaggtattgcaggctgccgtgcccccttctagggattggcatattcaatacacaaggattgtgtttatttgcttagtagattggtcattttaact

SEQ ID NO: 9704 - DNA, 6000 bp, Homo sapiens
ttggttgtgaacaagcttttttttttttttttaactttttcctgaagagaaatgcctaaactttttttaaaagaagttcctttggcagcaacagcgtaaaaacttccaagaacaatgttaaaaaatctgcaaactgtccagttgttcaagcgtcatgaagccccagttttacctgtcaagatgggaaaaaagaatgacaaatgactctagttctgtaaagatcagcttttcaacctttcttttaaagttaagtacttttagttgaattaaatctgggtcatggagaaagcctcagtttaattttctttttaaaaataagtttccataagtatatataatttatttattttctttgattacccagcttaaattatttagggcctgtgttttggtgcttaattgggcaacgcattaatgatcctggtgaaatgagaggaaatggctatgtttatatggggcctatgccagttagattctattttctggaataggggagttatttatttattaagaactattgacccagataaattacctgagattcattattacactgccaggtggtgccccagacttgaggcttagagtgaccaagctttacatcatcctgttcaccattttttttttttgagatggagtcttgctctgtcacccaggctgcagtgcagtggcatgatctcggctcacagcaatctctgcctcccaggttcaagcgagtctcctgcctcagcttcccgagtagctgggactacaggcacgcaccaccacacctgactaatttttgtatttttagtagagatggggtttcaccatgttggccaggctggtcttgaactcctgacctcgtgatccgcccgcctcggcctcccaaagtgctgggattacaggcatgagccaccgcgcccggccctgttcaccattttttgaataaaatctttagaggaatatgccacaatactaagtccagaataagtaatggatattcagagatttgtatctctactttggtgacagttggctatttaaattggtccttaatcagaggtagtgatagataaaggttttttaaaaatcaaatccccaaagctatcttttctgatttgaaactattttttgttgcttacttatcccgcatgcctctcccaaagtcatgatgtgtgggagaaagatgaaatttggaattaagcagacatgaattgatattctgcacaattatgcaaatatggataagttgctcaaactttctgagccagtaatctgattatgattaaatagggaaaatagcacaattgtcttagtcaattttctgttgcttataacagaatacctgaaactaggtaatttataaagaaaacaaatttatttcttaaaattatggaggctgagaggcctgaggttgagagtccaaatctggtgaggtccttcttgttcatgtggattctgtagaggtggcaaagggcatcacatcatgtaatagctcaggtctctctacttcttgttataaaactaccagtcccattcccatgataacccattgatctattgacacattaatatattaatctatgcacagattaatctattcatgagagcagagccatcatgaaccagccccctgccaaatgtctcacctctcaatactgccacattgaggattaagcttcaacatgagttttggaggggacacatattcaaaccacagcacacttgttgcaaagattaaagaaggtgtaggtgtggaatgtatatcctccattgtaaagcctggcatggaaagaatgaggactcattaactgttaggttgctttaccccatcttttgcatctgcaatggcccagcagaagcagacagcacagtagtgctccatacaaatgatgtggacttaaaagctcttatgtctgagtatttctaaggctgaacttacttacttttatctcctctaaggcaggtcattgttgcctgttccccaaatgaatcaaatcaaatgtgtgactggcacacttgttttcagagatataggaagtaggataaggggaagacatttttacatttattgaacattgactatgtgcaacatactgtttaacatatttttaaaatttacttcttgtaatgatcttatgaagtaggcataatgctgctcaatcaattgctccagaacataatgaattaatgcaaaaaccacttattgtatctcataagtcagctggatagttctgatgtgagccaggcttggctgatcttggttgagcttacctgggcttgctcatgtgtctgtggttagccagcctgtaggccagttggttctgaccagcctagtgtgaccttggctgtctgaaacagctcagttctactccatgcagtctcctacccttctgcaggttagcttaggcttgttctcatgtcagcagcagggattcaaggcaggaagaagcaacatgcatgccactgtcccactgaccaaagcaaatcatatggcctagctcagagttggggtgggagggcacatccaaaggaaacagattcagagaagcatggacaaatggccattagtgcacttgatctaccacaataggcattgttattaccctcattggtagaggaggagatggaggctagcaattttgtgcctgttggtaactggcccaccccctagtgtttttctttgctgtgttctttcctggctatctctccatggagatgcttcctaataagctacatttccccctgtttctcattatttggtctgaatttgaaacttcacataaaattattaggaccaatcagtgatcttaacaaagcccagtataatgacatcaaagaacagtgcaggtaagtcagtaagataggtctacttattagagaaaatgaagggaggagggcagatatgtagttgggtggagcataaatggaagaaaatgagacaaatttacatttctcttctattttctggcttttttattttccctgggtcagctaccacctttccatgccatcttttctagattctgaaaccaacatctgacaaaggcaaggtcctggtgtcggcctgggacatttactagatttttgaccctgaacaaggaagttacctaacttccctgagcctctatttcatcatgtgtgaaatgagaataatagcgcacatgttgatttgtgggctaaaggagacctgaaggtaaagagccccacatgggtctgagccccatgcagccaccatgattcactgctgtccccaagcacatcctggtgcctgaaatcctgaagagttggctttcaccactgcagaggctctgagtgagctgccagggcagcagagggaggctgagctgcaggagtgctgttaatggattttatggctttgttgagtacctcaaactacagttattaattagaggatgctgtttaggcactcttgcaatatatacattttgttaattgatttgtataggctcatagctagcaacataaagaatgtgcaggaccataacacttacaagggattgtaattgcctttgctgccctctctggctccccaagcagggaacaaaagctttgaggataggacccactctctcctctgtctttggatctccaacgactaatccagtgctcactgtcagggtgatacagcctgtctagatgctcagcaaacgtcttgaatcaatgactaaataaataatattgtttgtttctgtatttccatatctactttatttccaaactattcctcataaaccctgcattgtgtgtgatgttggcatttcatttaggtaaatatggtcaaggatttattctgagtccttactgttttttttttttttttttttgagtacctttgtaattttttcacggcctagagatggttgaggatgcaaagatatgcactggctcctgcactcagggaactgacaatactcaacggcacgagattttacaatgcatgacgtcaagtagcctgttcttagagatgcggagtgacaacataaaggtggcaacttcttgcatggcaccataccgcagggaattttaagtttgacaccccgcccccgccactgcagcctcagcaggcccagcaccccaagttttctgatctagctgttctatcagcctctaagagccgcggctgcccctgcttctcggagatgacgcggagccctgccattgccatccaggtccaaggctatctactctgcccgacaacccctagcaccactaggcgctgctctagtgtgcgcctggcgccctccccagaccagtcgacgcagaacgcccagagacccagccaagggcaagacccttagcgacgcccgtcagtcctctccgcccagatatcagttcaaagggcatggcaggtcagggtccctcgcgccaccccagatgaccctcaggcctcgggtggccactttctgggggagccctccatcccttgcggcagcttttccgagagtcggagtggaggcgcggggctggagggctctccggagccgcccaccagggtcctctgggggcccggtcccgactgggcagggggacctggacagggccccggagcgtggagacggctgaggaaagttgggggtcggggccttggggcggggagcgcggaacccggcgccgatgcccgcgttcatgaatatgcacgagccacctccctccctccgtgacgtcacgggccgtcccggggtgagcgcctgagccgctccgggtccgcgccagtgagcgcggctgctgccggcgagctagcggcgcagcggcgggaacccgaggccgagcgccgcggcggcagcgctagaagcgcacccatcgggcacggcgaggcggcccacggtgcggcaggcaccgggaggcgagagccggcgcggacagtaggcggcggctgcagctcgttggcggctgctgcgaggatgctgcctgggcggctgtgctgggtgccgctcctgctggcgctgggcgtggggagcggcagcggcggtggcggggacagccggcagcgccgcctcctcgcggctaaaggtgggtgctggggaagtttgctcttctcccaggagggaggcagggcaggcttgagggtgaaagcggcaaggacctaggctcaagctggatttgcccaccctcccttgccgcagcttctttggcctctgtgcgccctggattcccgaagtcagttccctgcgcagcggaccagagaggtccacccgcggacgtcaactcaacccctgggcggggtccgggggctgagcagaaggcgaggtctggggagtacggacaactttgagggctgtctgtgccggggtgggagcgcagtgggtgagtttcgagctctggcccagggacggctagagcagggcgctggcgcgccgtggggacaagcaggtgtctgctcctgcctgggggaaggatcagcggcggtgctttcaaggagggagccgagctgtgacttgtctcccagctcggggatggagtggaaacttgtaggctccagggaaggccccgctgacactcctcaagctcccccagggcgtctctgactccccggggaacgtgtaccctccgggtaggcggcggggtccggaagaagcgcgggatgtgaggctccccgctgcctttcctactccgctctgactaccgaggaccgaggagcctaacctggcaccactcccctgcccaccctgttcctttgaagagcttgacctccccgcgcctcccgcccggaaggaagctagatccaagcgaacgcctggctctgtcaggcgagcctggaagccggcgaaccccggactttgacagctgcctgggagcgtcgggagctctggggtggggggccgggtctgaaacaggaggtcacgtgcttgcagggggtggggaggcgagggaagagcagagctggtggggaacagtggtgggctcaggggaggctgtggcagatcctagctggggcgcacagcttagtgataacttgttgattctctgcgctgttcataagtagggcttgcgttt

SEQ ID NO: 9705 - DNA, 6000 bp, Homo sapiens
tccatgtgtttaatttcaatgcctctctgggcctgataatttaaaggggctagtcttcctcacataaaaaacttctttttggccaggcacagtggctcacatctgtaattccatatttagggaggtcaactcaaaactatcgcttgaagtgaagccagaagttcaagaccagcctgggcaacatagtgagattcccatctctacaaaaataaaataaaaattagccagatgtagccgggcccggtggctcacgcctgtaatcctagcactttgggaggccaaggtgggtggaccatgaggtcaggagttcgaaggagttcgagaccagcctggccaatagagtgaaaccctgtctctactaaaaatacaaaaattagctgggcatggtggcacgcacttgtagtcccagctactcaggaggctgcagcaggagaatcaattgaccaattgaacctgggaggtggaggttgtggggagccgagattgcaccactgctctccagcctggacaacaaggcgagactccatctcaaataatgataataatattaataataataagtcaggtgtggtggcatgcctgtagtcctagctactcaggaggctgagggaggaggatcacttgagtacaggaggtggaggctacagtgagctatgattgcaccactgcactccagcctgggaaacagggcaagaccctgtctcaaaaaaaaagtttcttcttttttttcacacacccagcttcagtaactcaacattctgccttttttttgagacagagtcttgctctatcacccaggctggagtgcagtggcatgatctaggctcactgcaacctccacctcgtggttcaggcaattctcctgcctcaaactcccgagtagctgggattacaggcgcccgccactgtgcccagctaatttttgtatttttagtggagacggggtttcatcatgttggccaggctggtcttgaactcctgacctcgtgatccgccctcctcggcctcccaaagtgctgtaattacaggcttgagccacctcgcccggcctactgtagaggtattaatggtattgggtggtggaggagaggtgggtatttgaatccaggtgctgtcattagctagcttcttaaccatggatgagttaatttctctaatttcagtaactgtaattagagaattaattacaaacttaattacgattttgtaaatgtaattccctcatttacaaaattagggaaacagtacctccccattagggtatttgtaaagactgagaaataaatcacactacgcaagtagtacagggcctgggacttacttaattatttataagagatcattattattactgtggaattcctaagtatcctctacaggtagggctgtcagatttagcaaataaaaatacaagataggctgggtgcagtggctcatgtctgtaatcccagcactttgggaggccgaggcgggtggatcacctaaggtcaggagttcgagaccagcctggacaacatggtgaaaccttgtctctactaataacacaaaaattagccaggtgaggtggcacatgcttgtaatcccagctacttgggaggctgaggcaggagaatcgcttgaacccaggaggcaggggttgcagtgagccgagattgcgccattgcactctagcctggacgacaagatcaaattccgtctccaaaaaaacaaaaacaaaaacaagatttctagttaaatttgaatttcagacagacaagaataattttgggggagtagctatgtcccagatattgcatggaatgtataccaaaaaaaatccatcatccatctggacttaaatttaggtaggcattctgtattttctctagcgaagtaacttctccttcaaaggagaaacttagagtaaaataaactgacagagaatgtaactgtaattaaatgttatctgctcatacttggtagaccagtggttcccagtacacacaggattttctcttccaggtaatgctcaagttaccatatatcagagaaacaaatagcttccatgttttggagtagaatgtaaaaatttcaccaaactgaaatctgttggacctagttactatactgaactagtcatgtgtttcaaaactgcttactgaattatatatttgtatttaaatccttatttggaaaaccacaaagcactaaatatgaaagtcatattaatgaccattaaacatatacaaactaacaggctgggcgtggtggctcatgcctgtaatcccatcactttggaaggctgaggcgggcggatcacctgaggtcaggagttcgagaccagcctggccaacatggtgaaaccccatctctactgaaaaataaaaaaattagctgggcgtggtggcgtgcgtctgtaatcccagctacttggaagggtgaagcaggagaattgcttgaacccgggaggcagaggttgcagtgagccaagatccgagccactgtactccaacctgggcgacaagagcaagactccatctcaaaaaaaaaaaaaaaaaaaaaaaaaaaaaaaaatatatatatatatatatatatatatacacacacacatacacaaactacaaatccttgacagcagccaatatctttgaaacactatttcataatattcttgtttaccacgttttctttgtgtgccaggtgattagttatcaaagcacgcttattattagcgcacacacacatacatgcacacacacaatgtaaatgaagcggacaggttttgtttcattctaaatatctttctttcttacctaaatgaaaaagcctgttatcaactctaccagtattttaggtttcctctaacctgtagttatatttgtaatgagttgaaaatagttaactacttccattcttttttttttttttttttttttttttttttttttttgagacggagtcttgctctgtcgcccaggctggagtacagtggcgggatctcggctcactgcaagctccgcttcctgggttcaccccattctcctgcctcagcctcccgagcagccgggactacaggcgcccgctaccacgcccggctaatttttttgtatttttagtagagacggggtttcaccgcgttagccaggatggtctcgatcctgacctcctgatccgcctgcctcggcctcccaaagtgctgggattataggcgtgagccaccgcgcccggcaggtaacattctttagttctttcaatcttgcctatgatttaaagaagtgcattccagtctgcttgcatggtgctttgctatttctaatactcatttcatgccaaactctccaacatgcttctacaaatcttttggtgtcattagctcaaaacgtaaatggattttggttattttcaatgtcataattataaatttagcttttttaagcgtgaaaaaagcactttataggaatatattttaccacttttccatttgtgggaggtataattcattatttcttgctttggtaagaaaagtgaggaaaaaggaaaattcatccatttgcaggctgtttaaacttccagacagattataattcatcactccaaacaataagatggctattacatttctccataatttttatttgctaataaaacggaggcagagcttttttctaaaaataaataaataaacaacaacaacaacaacctcccccaccccgcaccttctgtgcaaattcctataaagtcttttatcctgtcgctgagtctgagggcaccccccctcccgtactcgtcagctccatctcgcggaggaaaacgctaccggcaccctcagctccgcccaagggccgcgatctctacaggggagatgaaaagccggcgacactacacaggcgtggaccctccaacgagtgttcctttcctgtgggttaagagtaggagcgtctgggcaaaagctgggagctttcagttgccaggacccttgggaaagcacgtatttagatttcattgataaattcaactgaatcccgagaaaaattatactccattcactggcatatttagaacggaattcccattgacccgaggctcccggttgaacccttcaagggagccaagcgaggacgttctcagaacagcagtgcaccgtgtacattgtgggagccccgcgcgatcccccgcagagcgtcctgtaggaacgtcacagagcccagagagcgtcctgtaggaacgtcacagagcccagagagcgtcctgtaggaacgtcacagagcccagagagcgtcctgtaggaacgtcacagagcccagagaacgcctggggacggtcggggaggcagttcggggaggggacgattaagttccctcagagaggaagccgcgggccgactggagtcgttttcgtgctctccgcacccgcccgccgcgggtagcatcttctcagcgccccggcgcccaggaacgcccaggaaacccagtcctcctcctaagcaacctgcggcgcggggacgcccgccttttgctattattataaacgtgcgtgcgactaaaccttcggatttttagactttcttctcgcttcctctgacccaggctgagggagcccccgaggctactgcggggcggggccggggcggggtggggcgccctcgccgcctcaggcagcgccccggccgctggcgggaggcggcagcggcgcgggccgagcggcgcggggattggctgcggcgggcggagacgtcaggctcccgcggcccaagcggccgcccggcgcggcgcggcgcagtcggctcgagtactccccgtaacgaggaggtgttctcggccgtcccacccttcactgccgtctccgggctgcgccgccggagccgggacgcgcctccgcagccctcgccgcctccatccccgcggccgcagctcctctcgccgtccgcgcgcacaccatgacgaagaacgagaagaagtccctcaaccagagcctggccgagtggaagctcttcatctacaacccgaccaccggagaattcctggggcgcaccgccaagagctggggtgagcgggcagcagctgggcgtccggggccggcctcggtcccgggggcgccgggcgcggtctggtgggaacggaaaggcgggaggcggctcccagcgccggggctcccgaccgcccgaccctaacccgggcggcggcggcgcagtgcggccccattcattgctccccgggccggccggactggccgcagctcgctcccgaagcagcggggcccgcgggcagcccggccgggccgcgctggttcctccctccctgctgggagcggggcgcacgtgctgcccgggcctcccgcccggcgcggcgccggaagccggggacccctgcccgaagccgggccccgagagtgcaggagccgagcccccgggcctcctttgtacggagcgctccggcccgagaggccctggcggaggcgcccggcccgctgagcggttcggagaagccagaccctgccccactccaggggagaggaaatttccactcccgccgctatcttgtgactcgtccacgctgccaccccgaccggtcggaagagtgcgactgagtgttaagtgtgggtgtgggttgcttaaacgtgtagcggtgagttaatcacagaagtacattgtacaagaaaatgcacttgaatttggacagtgaaaaggcccttaaaaaggttggttcctcccggattcctttttaattacagaggttttcttccttacaaatttgcttctttggggaaagtaaatcctgtctgaacaacacaggttttttttttttttcccgtgtcttcaaaacaggagagtgatggttgtatgttagcagattttttctatgcgtgagctctttgttttaatatatttaaaccatctaccgtgtagagtagctttaggatgcctttttttcctaaaattgtatcaatctctgaatgcaggctagagcttttttttttttttgcctttatacttaagtaaactaattttacctttttaaatcc

SEQ ID NO: 9706 - DNA, 6000 bp, Homo sapiens
tcatgggctgaatgaagtgagcctcccacctcagccttcgagtacctaggactacaagcctgtgccactatgcccagctaatttttaatattttttgtagatatgggggtaaggggtagtgggagggttttggggggcgggtctctctatgttgcccaggctggtctcaaactcctgggctcaattgatcctcctaccttggtctcccgaagtgctgggattataggagtgggccactgtgcccaatctgtgcttcttaacaaattgatttttaaagtctatgttaaggaaaccccttcaggttttgtaaaccaggcacaccccaatcaggtagacagcataatcgcattcactgggctagacctcatccccactcagggcttctgcacttgcagtatcgtctgcatgcaactctcatccctcagttttcatctggctgcatcctcattctttgcaagggtcacctcccctttgcaaaccttactttcccaatttaaaaatagctgtttccagtcactctccatcacattaatattttatttcttctatagtacttaccattctcaaaaataatcttatttgtttaaatgtgtgtgcactgagtatctcccactctagagtgtaaacttcatgaaggtagggtctaggcctgtctgcttcacttttgcatctcacatagctagaccagcacctggtacattataggtgcttactaaatatttattgtcatccttatatttctgggataaacccaaattggttctagtttattgtccttttttccccacttgagtggatttgttttgcttatattttatttaagagttttatgtataaattaatcagagacagtaccaaatttcttctctgaaatccctctgtagttattatcccctttgaatgagttgggggaaatattccctcttgttctcttctctgatagagataagactgaaacaatctagttcttgaaagtttggtggaaccctcctttaaatccctctggtaatagtgttgtttcaatttgtaagtactgtttttcttctttttctttcttttccttccttttctttttttttgagacagagtctcattctgttgcccaggctggagtgcagtggcgcgatcttggctcactgcaacctctgcctcccgggttcaagcaattctcctgcctcagcctcccgagtagctgggactacaggtgcgcaccaccaaaccaggctaatttttgtatttttagcagagacggggtttcagcctggtctcaaactcctgacctcgggtgatctgcccaactcggcctcccaaagtgctgggattacaggtgtgagccaccgtgcccaacctctttttcttttttttttttttgagactgggtctcactctgttgcccaggttggagtgcagtggcaccattatggctcactgcagccttgacctcctggggtcaggtaattctcccatctcagtctcccgagttgctgggactacaggcatgcactgccacacttggctaatttttttgtagtttttgtagagatggggttttgccatgttgcccaggttggtctcaagctcctaggctcaagtgatatgcccacctcagcctcccaaagtgttgggattacaggcatgagccaccgtgcccggccataagtagtcttgtatctttttgagattgttaaagcaagttgtttttccttcctgttagaactttatcatttcatctcagtttctaaactaagtagagcggttactcttggaggtttttgggctgtgtaatgggttcatgcatattcattatattaaaacataggacatttaaaagggccacttggactaacaatggcagcatatcttaaatcaaggattatgagtaacctgaatctataatctcaagttctattgaaaatgcatatttgttcaaaatatgagggagtgaatctatcttggtgcccaggggcaaacattttccaaaggtgaatcttctaggattcacacagataggcccaaatgggaactgttcaggtaacccagccttgcatctttccccagttcagactctggaagaaagtccttgaagatctctggacatttgtccaggattaagcaaaagccacagcaagtttctttcactcgcatcagtgtgaagagaccaccaaacaggctttgtgtgagcaataaagctttttaatcacctgggtgcaggcgggctgagtccgaaaagagagtcagtgaagggagataggcgtggggccgttttataggatttgggcaggtaaaggaaaattacagtcaaagggggttgttctctggtgggcaggtgtggagggggggatcacaaggtgctcagtgggggagctttttgagccaggatgagccaggagaaggaatttcacaaggtaatgtcatcagttaaggcaggacctgccattttcacttcttttgtagtggaatgtcatcagttaaggcaaggaccagccatctggatgtgtacatgcaggtcacaggggatatgatggcttagctttggctcagaggcctgacagtttccaatagaacataacaggcagcagagaagacagagactgaaagagcatcctgggggagatggaattgtgacaaactaaaccagtgagccgaaattaaggctagccctgtggcatgactggctcttgtgcaagtgacattattatgtgacatattatatgtctgggtcattactatgctaaaataagtagattaaaatgaaaggaatttccaaacaaatgcgggaaggaaggcattatgaagttttcagatgtcattagctataacaaagttcagaattaatcatgacaccatgcaaaatgggaaaaatttgcaagcaaggagagggtggagatgccagaacccgtaaatttatgccagctgagcactgtgggggcacctggcaaatggatttactattttgccaacaccagtaaagtgttacaaaattgcaaacggaattatttctatgcaaacaattgtttttaaaaagggtccctacatcgactaatgcaattcagtttttttctgggtaagcacaaagccagaaactaaatgaaaaatattagaaattatttttcttggaatcatgttgaatattaaaattgagatttactttcctccccaattccctctctctcccatcagtcttttcatgcaccaatgtcattttagttttcgtggtaaaagaggtggtgaaaaaggggcaggggcatttgagagagtaggcgaagggaggctggggattccagaaaaggaaaagatggggagtcgctcaattaaactctaccaccttcatctgttaacagggattcttgcctgtctcgacccacttccagaggcaatgccatattatttgagaaagctggatataaaatttgagctctgctgtccttgtcccaatccccctccccaggagaaaaaataagctgaactgtactcgtgacattatgggtttttctggaaaacaaggataaataagttttttgaacatttttctcccctgaaactaaatccgtaagagagttaaaaacccgtggaaagcgagttaagtcacttttcaagtctttgtactcaggggattctgtaagactcatggaagaataatggcgcaaacagcaatattttaatgttagaacggtcctctgaaaagtctgcccgaaacgctacaaagataattgtgcagtaacttctaaaaactctactgggacaggaggcaacaaaactccggatcagcgagagctctgtttatccgagggtgctgagcctcaggccccacggagattcccttttcggcacttggaggcctgaactcaggtctaacctttcgtgtgcgcgctctgatactcaaccaccgttcagtctccggaggctgttacaactgtccccattctacagatgaagttgaggctacagcttagtgttcttggggagggagggagttggggggagagagagacgcttttcctcataaccttaaacaaaagtacttaaacctaaagcaactgaaaaatgattttctttcaacaacggtgtttcctttggggtcaagttctttgatctcatctacaaaaccaagaagcgggacaagtatttttctgcaaattagaacggggcgttcccctcccccatcaccccaattccagaggacgtcaatcacagtggacgcagcaccgcgagcggaaatgcggagagcatcggggctccgcatgtggggcacaatgaaacaagagcagccccggccagaggtccagtaaagcggaaagacggtcccgcccgcacacccctccggaaaactgaagcgtctcctctgacccccaaggtcagaaagatttattacttccttcgagagggcgcagccacagacccactagagagggcgggcagggtgtcggaagccagagaacggcgctccgcgtcctcccaccgctccagggcgcagaggtgtcctcagtgcccggagaggttggcagtgtcggccccgagggaagcgtggagcggacggccgacaggggatttctgcccaaacttcatcaccaactctttctgagagcaaaaacatggggccgagtccggcagctgcacgcagaatccaactctctggcagctctcggcaccgacgagctccagatcccgcgttcgcatcccggcgctttgcgcgcagagctaagccttcggacccgtggactgcagcccccgcgcgtcgcggtaaagcgggtcgcgtctccagcccccgaggcgcagcgacggtgggagccggctcggcgttgggggcgggggcggggccggcgaagggggagggctgcgcggcggaggggaggagccgcggcgacagacggcggcgcgcaccaaccgggcgccggctggcaggagccgcgcagaggctggtccgagcgcgttgcgggcgcccggcgtaaggggagtcgggtagcagcatcctcctgggcgccgctttcgcgcggcggcggcggctgcggcggggtctttctttgcttaaatacctcgttggccagaagcgctggtaccgggggcgggttgggtcgggtcgggcagtgctgcacacctgggtttccttgcctagagctgtgtgttcggggtcctttggtccagtcggaggctgcggagcggcgggggttgcctgcgctgtccgcccgggcatcctcccggtgatggaagcagccgccgccgccgctgcggggtcgcgctgtgccccatccaccgctgccagagaggtgggaaaattcgccgcacggaggccgaaagcgagaggggctgcgccgctatgccgggagctgagtcccatataagccgcccccagccatcgcccccagccggcttcgttcccctgagcgagacaggaagctgcggtcccgagaaagcggaggagacgtcgctggagccgggaggcgccgggttcggcggagcgcggagcggggctctgggccgcgtgaaagtttttcttcccgagccgcagggcgcccgctgcccggaaactgcccagggataagtcggccgactccccagacccctcgaaggtgcggggacccccagcggaagcgagagggagcgaaatcgaggaacgagtgacagccggacagtccgccgggcggtgatccggggccgctcccgggcgcgccctcggctccaggtgagcggaggaaccgggcagaaccgagggtgggcgttacttaggaggaggaggctgggagggagattggggcgcatccgctcactccgcttcccctcgcaggtcctacccggagccgctgccatgggagagccagccttgggcgctggggaccagccgccgcgcccgcctcggagtcgcggcccgagtcccggcgccagcagccagcccgctgcgtccccttcccgggctgcagggctgcctccgccgcgccgccggcccggattgtgcctgtgatgagccgcagcccgcagcgagctctgcccccgggcgcgctccct

SEQ ID NO: 9707 - DNA, 6000 bp, Homo sapiens
atgttgtgtctttgttctcattggtttcaaagaacttcttaacccaggaatacagtgaactgataagacagagccctgtcgcagaggcacaatccagtggagaagggaatgctaaccctcctgggtcaccatactcaggactcaggaaccatgtcttcctcaggtttgcattctgagaaagttctcctgcagaaacctatgcttactacatgcttgattatatttaagtaaatttgccatttttaatttaatgaaaattcaaaacatgtaagtcatttcaacatatggtatgttgctaaataaaaacctttattttaaaaataggttttaattattaataatttatattactttcctgatccacaatgtggtctagcacagaggtgttagccattgcatgaaagataggaactgagcccctcttctctcttcagaaacttggaagcaagaaacaaaagtcagacattcatgtctttactcatctacacaaatttcatattttacctttttaaaatagctttacttatatatactctacatactatacagttcacccatttaaagaattaagtttatcctaaagctgcttccttacgtattttaaatttggcctaaaagtttctcagcatgtagtgaactgtaacctaactggatgctgaaaagactgaaacctactcttgtgccaatcacagagtttcagcatatctaaggtggtcagttgttcaaactgtgttcaaataaggcaaatgccaaattataaccaattctatttctgtacctcatttttgtcttctttacatcactttcctttttctgcccataaatctttttcaaccacgaggcagtgctggagtctctctgaacctattgcagttcagtggctgcccgatttgcacatcactctttgctcaattaagcactgttaaatttaatttgactaggtttgtcttttaacaaagatgtacagttcaatgttttttgtatgttttcaaacatacaaaagttgtgtaatgatcaccataatcaaatgtacaattttttatcatcgtccaattagcagacactaccattccctcctacccctccactctcagcctaggcaatcaaaattctctacagttatgtcactcctgaatatttcatataaatgaaatcatataatatgtcttcttctgtgactggcttctttcaattagcacaaggttttcaaggcacttccatgtgtaacatgtactttattcccttttattgccaaacaatatcctatggtatggagatatcacattttatctattcatcagttgatagatatttgacttatttctgctttggggctattatgaataatgctgctatgaattttcacgtctacatttttgtgtggacatatgttttcatttctaatgagtatatacctaggaatggaattgctgagccatatggtaactctatctatgcttagcattttgaagaattgccactgttttccaaaatggctgcactattttatattcccaccaacaatatatgagggatccaatttctccacattctggacaacacttgttactatctgactttttgattatagctatcctagtaggcctaaaatcataactaattgttcctttgagttgcattttcctgctggctaataatgttgagtttttttatgtgtttgtctaccttctttagagaaatgtatattaagatcctttgaccatttttaatggtgtttttattatctttgtgtgtgctttattatctttatatgttctatacacaagtccttatcaggtatataatttgcaaatatctttgcacattcttggctttttcttttcactttcttgatacccttggaagtatagatgctgttaatattgatgaaatcaaattaatttacctactttttcttgtatttcttatgcttttggagttgtatctaagatggctttgcataacccaaggtaacaaaggtttactcctacgttttctatttagttttataatttttctcttaagcttgggtctatgatccattttgacttaatttttacatgtggtattataaggagtccaacttcattcttctgcatgcagatatccaattattccagtaccatttgtaataaagattactcattctgcattttttcaacccttttcaaaatctagtggctcataaatgtaagggtttagtttgtggacacaattctgttccattgatctttctatctattgctatgccagtaccacattgtcttgtttattgtaattttgcagtaaattttgaaattggtaagtttgttctttttcagaattgtcttgactattctgggcccctcgcactgctacatgtttttaggataactccattcatttctgcaataaaagcttgctgggttttgatagagattttgtttaacctgtagatcatttgaagattaatgccattgtaacgatattaaatctttcaatccaagaacatggaatgtcattccatttatttaggtctaccttatttcaacaattctttttgtttgttttcagactacaagttttagatccttttgttaaatttatttcttagggttttttttgttttgttttgttttgttggttggttggtttgttttgagatggagtctcactctgtcacccaggctggagtgcagtggcacaatctcagctcacagcaacctctacctcctgggttcaagcgattcttctgcctcagcctcctcctcctgagtagctggaactacaggcatgcaccaccacgcctggctttttttttttttttttcttttgcatttttagtagagacagggtttcacgatgttggccagcctggtctcgaatccctgaccttgtgattcacccacctcggcctcccaaagtgctgagattacaggagtgagccactacaccaggtcatttcttagtatttttactcttttgatctatagtaagtaaaattgtttttatctttgaatttttaaatttttaacacagttcaaatcagtgtgtctgatttcatctccttctctaacaaaccagggtgccagaactgcttcagtttctctgccttctctttgtctatgatgactaatgtatgaaggtatctgctgcatcaaactttaaacttcacattatccttatttctcttgaccttgacagatctggcatcttttcacctggctgtaagcagaaagtccttgatctccttaactttttgaggcatggcagcatgtgaggcagggagaggacacagacccacacagcaagtggtgagaagccaacagtggaattgttttcttaattccatttgttgattgtttattgctagtgtatagaaatacaactgatttttgtatattgatcttgtattctaaaaacttgctcaacttgtttcttagttctaatagttaattaattgattccttagggctttttaatacaagatcatgtcatctacaaatagaaattgttttactttctttctaatctggatgccatttatctttttttcttgtccaattgccctcactagaacctttagtacaaagttaaatagaaatgggaagactagacattttgtcttgttcctgatcttagacataaaaacgttgtcttccgttattatgtgtgatattagttaagtttttcataaataaacttcacagtttgaggaagttcctattcctagtttgttgagtgttagcatgaaaaagtgttgaattttgtccaatagtttttaaaaatttttttagacaatcatgtaggctttgtccattttttacttctttaaatttatttttattgatacacaatagatgtacactttttaggtacatgcaataatttaatgcccctcactataaattcggagctgcctcctcgccgatgattccagcgcctgacagccaggaccccaggcagcagcgagtgacaggactttttaggtacatgcaataatttaatgcattcatataaagatcaaatcagtgcaattggcatatccatcaccttaaatatttgtcttttcttcatgctagaaacattcaagttattttctcctagctactctgaaatatacaatagattactgtaaactacagtcaccctactcacctatctaacattaattgatttttggtaaactaatctaatcttgctttctggcatcaacctcacttgaccatggtgtatagtccctttcatatgttattggattcaatttgcctacattttgttgagaatttttatctatactcttaagaaatattgatctgtagtctcgtgatgtctttatctggttttgttatcagggtgatactggcctcatagcatgagttgggagatcatccttactcttctattttttggaagagtttgtgaagaattgatattatttcttctttaaatatttattgggtttttaaaatacatttttaaaatgcaacttgggtagcatgtccaataggaacaaatgagtgtccacccttgaatttcataaccctggaattaatccatgtaatctatgatccacaactgtattaccaaagttcgagttactcataggaaagagaaagaagttctctaattcgtccttaaaagttttccaagttcagaaaaaaaaaatgttgaagaacacgaatctccgcaggaaatgatactcctgtacccccagctcgctctccctcacgacccctcgctaggcggggttcgggaccaggtgaacgctgatctgatagttgacacgggacgactgtggcatcatccttgctgccgtcaatatcccgagagggaggaggttgggccgggagggtctcccggggcggggcggaggaggagggaatgcaaaacagagcctcgtccccggaacccaagaagcagcaacgcccctcactataaattcggagctgcctcctcgccaatgattccagcgcctgacagccaggaccccaggcagcagcgagtgacaggacgtctggaccggcgcgccgctagcagctctgccgggccgcggcggtgatcgatggggagcggctggagcggacccagcgagtgagggcgcacagccgggacgccgaggcggcgggcgggagacccgcaccagcgcagccggccctcggcgggacgtgacgcagcgcccggggcgcgggtgagtccgcgcggaccgccaggcatgcttgggggacttcaagggcggggtgctaagtttcatgtcacggtgtcctaactgctggctctatactgggaagctctcggggaccaaggaaagagcgaccgtagttctggtcagcgcctgcccctggagctggccacactttcccaaatcaggtgaggggcttctggaatgggagggaacaaggtaggtttgtttgccacgtgcctcgaaattctcaatccattttaaccaaactcttccgagtgcaaggaagaaatctacagaaataagatgcaattcaataaactttcttcctgaggcttttagttaactcttgtattttagccatcatctgagcgggaagccggtatgactctgcaaggcgttcgtttaaaagttgtgctacttttgaggtgaagttaagagtgtctccatccacgccctctgcttcccagtcaatgtccctgcactgctcacgtccctttagctctctccctgcaaaccatagcggtgggtcctagacacgggacatcgctccaaccttggccaaactctcccaccctcagggttcccagatgtcctttgaataatcaaactgaggaaggagaagcaagatgtctccacaccccaatccctacagccttagccaatgcatgtgtgtaactgagacagaattttagcaaaaggtctcctgcttccaggactaaacagagcctctggcaggccactgcccgacacccaactccatcctccaattttcttaaatgtccaggtaaacatctccatagtgccagcctgctatagtctcccgaagacctcagcaa

SEQ ID NO: 9708 - DNA, 6000 bp, Homo sapiens
tggcacatgcctgtgttctcagctactcgggaggctgaggcagaagaattgcttgaacctgggaagcagaggctgcagtgagctgagattgtgccactgcactccagcctgggcaacagagtgagactctgtctcaaaaaaaagaaaattagcctggtatggtggcatgtgcctgtggtccctcaggaggataaggcaggaggatcgcttgagctcaggcagtgaaggctttggtgagctgagattgtgccactgcactccagtctgggtgacagagtgatacccggttccaaaaaaaaaaaaagataaccagaacagtgtttaccacttgtttttgtttcctcatctctaaaatagggacaataatgtcatgtaattgcttgcttctatagagctcgatgacaactctagatagtgagatagagacatctgagagggaggtctgtttcttctagttctccagaccatgtggccctttagtagttcagcctctcccaggaccccggtgctttagggaacactcatgttgaagtggcccaggcatggaggagtcagtcatgaagcgtcagagctcttagagaatagtgactgtcttcccttagacaaaatatttcacatttctttgttcgtggaggccaagttggctctcaaccctgctcccagctcaccaacttggcacctcacaatctccccaaatcgtgcttcatcccatcttccatctttgctcttgttatacttccttgtctcaaatcacccctcactttctctctgccaacacagattccatcacaagcacttgggaaatgagtaagctccaagttttccaaaggatgttctggaaaatcctggtcctgccagctacaggatacaaaagatgggttctgcaggcattgaagcttggaaaacgctgggtactatatttctcagctctccaataattacacatgcacttgcaaattaaaggccctaaaaagttctcattcagagccctattttgctctgtgttattcagatttcccaaacatatcttgacagtaaaacagttttcttataaaacaagacttcttagaaaaagtgaccactgagctgagtcctggaggggtgtagcaggaaagcaggagaagcgggcagagcaggaagcaggaagacaggagggctgatctggctggaagacaaatcagggaggactaagtttaagatctgagggccatggaagcctcctgaaggctttcagcaaaaatgtaatatcagtttagcatttatagagatcactagttctcactttataaagatcactaactttcactacctgatttgatctttattttttgattgaagacctatagtaagcaaaacatgttgcattattacctaacatctatgcacacataacaaaaatttcataaaatggctcttattacatgcaatgcccactaatattttctattatttttttcctcctttggaaaatcacttttaacaatctattttcatcatccaggtaagcaaagatgaagacctgaattttatttgaatgcaaatgtgtggagacccctgtcttcttcctgatattctgtgtgaatagatgagaatgctctgctttaagacaagcagaagaagccatgtcttgttcttctgctaaggggcagttactcatttaacctctgtgtatggcttctcttgtctcttgtcacaagtagaaggttgtaacatcattgagggcagaaagcaagtcttagatttattttattcacaaggacagtatttggcacattggtggacataccatgcatgtaacaatacacttatcgattgcactgaattgacagctcttcacccatttcagggtgaatgtcttctgctcctgtgcttgttagctgaggaattgacttcctgcatcactggaaggaacccctagacttcctgctgcttagtcccgtatggtcaaacctcacatccggtgaggtccatggagatagtgcccatattcacattcttctccttttcttcccccaaggatccctcctgtctttctatcccttccagggctactatttgctctcacttctgaagtctccatagaaggctagtgacagaatggggcttagtgtcctcagccacttccttcttgctgtttctgaaaacaagggagttagcctttttggtttaaagccttcactgctaaacacccagaggaacagaataagcaataaactatcaagtaggagtatcacaaaaatgattcccagaatctcacacaattttcccttgcccccaaagcagtctgttggtgacctccctgctacacttccagagagtgaatttcaccaaggttcccatcccccccacgattccctctctccagattagatattctacttcttgcctggaggtctgaaggcacaattaataattgaacaattaatgagttagtcactatccaagtgtttgaagtctgaagtggtcagggcattccaggaaagtgactgtttttcagtgtttctcttcctctacccaggaaataagttacctcaggcttgaaagaaaactgaagtgtggtccacaatatttcttactttcatctagtcactcagacagtatacatgggtaactccagttgtgcatctgaaaaatctaggacaacagggctagtgttggtcaaatgccatgatggtaacttctagaagcaaacggtgtagtccagggagaaaggagaaagctgcccagtccccagagagaagctgcctagctctaagtagcatatgcatttgattaacccaatccactcacccccaggactgttgcctttagagttcatatgctcaagactccctgtcagaagccagtgggttataaataaagttcatttgcacctgcctggagtgttggaaaacagctgtcagcacagtgatgacagcccttgtttgcttctggtggaaacacagctggttttctttttcttccttttgcttgtctgtatatccaatttttctaccaaaaaaagtcacattattttgtaataaggaataaaatcacagtttgttgttgtgttcagaagggtctcctactgtgtgcatatacctcacacacagtgtcattctattgtttatatttaaaagatgatgttttgttgtttgtttgttttcaaaaaggaaaatctatgagagagaacatagcctgggttttggcaacacagagctggagaggaggtaggctaatgggtatgaacatacagttagccaaagggataacctctgttgtttgacattacagtaaagtgaccatggttagtgataatgtattatagattgcaaagtagctagaagagaggacttaaattgttcccagcacatagaaatgatcaatattcagtgatggatacccccaaataccctggcttaatcactacatattctacacatgtaaaatatcacacgtaccccataaatgtgtaaaatagtatgtataaataaaaaataaaatcttagctcttcttcttatgctgagatgagcttgcaaaaatcactttgagcagaagcatccccacttgtgaagggggcatgacaccttcttcacagaagggtgaagaacatttaaggtgctcattcgtgcttggagtattatgcatggctcaataaacatttgctgtttttctgctttctttctcatcctgaccctgagatttctaagtatctttataaagcaaccagtactcatttcttagaaattttagaaggagcctcaacatttttccagtctgacttttctggaatccttcccacagcttccctttccaagggcctctgagccttggcaaagcccagtccatggcttccttgtgagcaggtggcctattccacggtaggacaggtcttaccatggtaataatgtcacttgctttttatttagctaaaatttgactccctaaaatattcgacctattttaacctctagattctcaatgaagaactagtaagacttccagttccacctcttaatccttcagctgttatgtaataccagtaccaggcagggccatcgcataatgtagagcttggtccaggcgtggcagagaacttcttaagtgacacaaagcaaatgaatgaatcatgcccctggcagttggcaaactttctaataggggtgtgttttactgcctcctgcactctataactgctcttccaactgtgtcttctccccagtcaactcatcaggaccttttctctccctctctaccaatgctgaccttcctttccccttagccttagtggatgatggtttctttattcctatatggaagacatagctgagaaagttgattaggaaaactgtttttgctaattccatcacatcgtgtagggaaaagatagaacttaattacttaattgcgtaacaagtagagaaacacagcaatcagacaataaaatgaacagtagctttttgccttaaacaattcttttaagtctgagctcaatgatacacaactagaccatcaaattattttgatattgaggaaaacagaagctcttttggataaccctgaattccaggctttcagtggaaaagacaaagacacgcactgtacaccattaagtacttgggagacatgattttaaccaggatgtaactcaattatattagtgatttataaagagtctggagaaaatatttctttatttgggcatgggcactgtcagattaaaggtgcagtggttctaaatgctgtttgttccagccctgtcttcgattgcaacaatgtgagtgtcttgtctgtgctggtggattattaacagaggttattggtctccatggcaaaacgattgaatgattgctctgaacgtaatctcatttatgggggtgcaaaaaacaaagcacttcaggtcagggagaatgtataaatgtccattgccatcgaggttctgctatttttgagaagctgaagcaactccaaggacacagttcacagaaatttggttctcagccccaaaatactgattgaattggagacaattacaaggactctctggccaaaaacccttgaagaggccccgtgaaggaggcagtgaggagcttttgattgctgacctgtgtcgtaccaccccagaatgtgcactgggggctgtgccagatgcctgggggggaccctcattccccttgctttttttggcttcctggctaacatcctgttattttttcctggaggaaaagtgatagatgacaacgaccacctttcccaagagatctggtttttcggaggaatattaggaagcggtgtcttggtgagtagggaagcttaaaatccccctaagggagattttcccttccccacaatcctttttaaatcaggtacttattgaacagggagatatttagttggtaatagaagctcaagcattgcatggtgagaggtcaatgccttaatttttttctcgtttctgttaggatctgacaaggacacgtcagctaaatttactaagtaattaatctctaagcttgggctgacagttctcatgggtcatttgagtcccatgaaccgaagtgaaggtcgcatagtttcttgattccaacaagatagtgcccaaaacaataacaacaacaaacccacgatgcaaacccactagaaaagcaaattgacttaaaaccaccatgagaagctgttgtcagtgtggtcgtcttccacttaggacctaatgatttctttacctctggtttccaatagaattgggaacctccgtttgagagagtgaaagggagagagactcactcttcatgacaattgaggaaaagtttgttattcttttttctaacacaccatctaaatggaaactcagattttgaaatcttgcctcattgaagctggttagtcagcccaaatggaatctaagtactccataacactccattacccctccagccatgctctgttactttgccattccctttgggcctccaaatccctcattgtggatggggctccttatacagtcaggcaggctcggg

SEQ ID NO: 9709 - DNA, 6000 bp, Homo sapiens
aaagaggcctagaagagctgtggcaagatgagggcagttatagccctatcttaccatatggacaggtgcccctcatgcatccgtttataggctctccacaaggctcacattccattcccagagctatgaacatctgcttttctggaataggattcttggtgatgtgaaacctccctgactgcaagtccgttcataggctttctgcatggggaagcacatcacgcactattggctcattctggcagtccaacctggcattgtctttacacaatcctgaatgcaattttgtatttacaataatcaggggcatttcgtcttttattccatagcaatagtttcagggggtctccctacactcttccatagctgcacaccataaccccatcaaaatccagttaaaggacccctccaaatttcctaacgttccccaataccctatctccctaacccaccaaaaggtcctccaacccattataaacaagctgtactcatgtgatcttcttagaccaacacattctccatataacacccccttcctccctgttagaaaatctgacagctcataccgactcgttcaggacctctgagccatcaatcaggctgtactccctatttaccccttggtccctaacccctgtacacttctctccctcatcccttccaacaccacccactatacagcaatcgacctacaggatgctttcttcaccattcccttacactctaattcccaagacctcttcaccttcacctggacagatcctgacactcttcagtcacaactcacatggactgtcctccctcaaggcttcagatacagccctcacatctttggacaagctctagcccaagaccacaccaccttaaacccctcccccagctgcctcctccaatacattgatgacctccttctttgcagcccctccctagaggactccaaactcacaccatcaccctactaaactctctttctagcaaaagatatagggtctccccctccaaagcccaactatctgccccaacagtaacatacttaggagtccaactctcccctggggcccaagccatgaccccagcacaagcaaccttaataaacagcttgcctctgccttcctcaaaaaatgaaattctctctttcttaagactagaaggtttctttagaatatggattcccaactttgccctcctggctcaacccctctacgaagcagccaaaggccccctcaatgaacccctaagccccatacacaacatacttcccagtttctgtaaactccaaactgctctcatcactgcacctgccctgtccttacccgacctctcccaaccctttgttctctataccaccaaaaatcaaggaatagctcttggggtcttagggcaacaaaagggaaatcctccttcctttgaccctgtagcatatctctgtaaacaactagacaacactgtcaaagggcagccaacctgtcttaaagcatcatcagcagtggccgttttgcctctggaaagcaaaaaactaacatttggccaaagcaccaccattcacagccctcacaacttacaggatctcctctcctcctgggcattaagctccctctctccttcccaaattcagtcgctctacgccctctttatcaaaaatcctgaattcagccttgccaaaagtgcccccctcaacctggcatccctacttcccatatcctcttcccctcctactcattcttgcactgacattctggatcacttgcagccacaattccctaacatctcctccaagcctctcactaatccagatgaccaactatttatagatgactcctcttccagagcccccggctctcccaaaattgttgggtatgcagtagttaccttaaaccatgtaattgaggctaaacccctacccccagaaacctcctcccagaaagcagaactcagctctcacaagagccctaaccctctccaaggacaaacaggtcaacatatacacagactccaagtatgcctaccacattcttcattctcatgccgccatctggtaagagaaaaaattccttactgccaaaggaaccctcattactaatggcccccttatttaccaactccttcaggctgcacacctcccaactgaagcaggagtcatacactgtcgaggacagtaagcaggttcagatgaaatctcaagaggaaataggctgatgagcaccgaaacaggcctctctttctcctatccctgcccccatcctccttgtcaccccagcagtccaacccagatactctcccaccaaaaactcttcactactacagcaaggagcctcccttcaaggggactggataatcaaaaaccaaaagctcattcttccccaagagcaaaccaaggaaattccaacatctcttcaccaatccttccatatcagtgggcgccccctgtacctactccttcacccttatttctcctccccccatctattcacctcactaaaggacataacctcaaactgtcatatatgctctgttacttcctcccaaggggccctccgccctctcctcatccctacacatcagctcagaggaacactcccaggggaggactggcaagtagacttcacccacatgcctcctgtcaaaaaaactaaatattttcttactctcatagacactttttcaggttgggtagaagcatttcctaccccttcagaaaaatctctcaaattctcataacaaaaatcatccctagatttggtctcccttgttccatacaatcagataatgggcctagcttcatctcccaaattacccaacaagtctctcaatcccttggtgttcagtggtgcctccatatcccataccagccccagtcatctggaaaagtccaaagggcaaatggaattctcaaaactcagttaaccaaactcacacttgaggttaaaaaaccttagacctccattttacccatagcactggctcatatcagagccagtccaaaggccccctccttcctcagtccattcgacttaatgtatggatgccctttcctcttacaaaacagaccccctcctgagtatcaattagaatacctcccaacactctccctcatccatcatctcctctgcgaacaagctgaccaggcccccacaaaaccccaccaaggcaccactgaccaaacactccttccaggagaatatgtcttcctaaaaatcaacaagtctcatgccaaagtgcgaaatccctttccaagtccttctcgctacctccactgcagccaaactttgagaacacaagtcttggtaccatctttccaggttaaaaagagcacctgcagctgacccatcaccaactaaccaaccagctgttccctgcaaatactccagcactcttctcagaccaattcgactccgcctaacgcccatgcctgaagaccccactcttccctcatgaaccatagcagataagttatcaccccttaccattaagtatccaaacccttattaatggaaatcatccattacgctgcccttgcaggaatcaccctacttactctactctttgccataggaatatatactgtcttgcctcctgggtggaatttcagacaaaaaaaactcaatattcgtaacctcttgcctcataatcctcctcatagcaggtataatagccaccaccaacagatagtggcccctcctaaatgtcctgtctttgcccatcctggcatttcacactcttccttcactgcatcacagaaaacctttcatggtcctacccagaacatcccaccctcacagcattccttgattggatcaccaatcttatatttcaaggggatttacaggaattcactccagatgaagccgaattctttacctttacacttgctctctgtctatttactccttcttccctcctccttctcgctaccgctccacctacagcgcaccattccacaggcacatatgatactcagtcaaactaacccctccctggccaaggcctgctggtacacccctcagaaaccgtatcaaaagatgtcttcccagctcccctcaaagactgggttctcagcaatatgaccctccacccccgctaccaaagttttggagaagtaaatgcactcaaaagttacaaactcaatcttaccacacatactgcagaacacaaggttatcttaggaacacttaccccagactcagaactcagtcaaccagcatccctatgcataaagcgtgaactttccaaaggagtgcccctaggcaccctctcctctagcttatgcaactgtaccctaacactcactcccccgacaggcatccaaacaataacagaaaaaaaccccacacaaactctcaaaatctccaacccccgtcagacccaagtcacgggagaaacatcaggattctgcaataactgacacaggccctgcatagaaatcgcagggtggaacacttgcctaaaccccgtccccacttcccaatgcatggaaatcccactgcctaacacaccctcaaacaaactacttattgacacaaaacgcttcttatggactcagcctgggtgacagaggaagattctgtatcaaaaaatatatatatatacacacacacatatatatgtatatatatgtgtgtgtgtatatatataatttgttttttccatgataagctattttaaaacaaagattctgaattctgtatgttttctatggataattttgttagagttaaagaatttgttcccgagttattactcaatacatgctgtttattggaatacagataacagcatgatcattgacaaactttgccctagtttcctattactcattaaaccttgaagttgcacttaacatgactgtatctggataacagataaaattttggccttattatgccaacccttaaactaagtgagcaactctgttttcaaagcttttgggtggagctgaagcacactgcttattaaagtacactattcaggcatatcatgtaggtttactttctgtgtttctagagaccaagaagcgggacgttcaccatgggaagaaaatcgctgtaccttctgattgtggggatcctcatagcatattatatttatacgcctctcccagataacgttgaggagccatggagaatgatgtggataaacgcacatctgaaaactatacaaaatttggtaagtttggaattttatgaattcagatgtgcatacaccaccatttgacccagagaattaagtttttcaagattctattcttttgatttattgacttattcatcttttaaaataactgctgtggcctttgacaatgtgttacttagaaatgttgtttgttttctgtcttatgtattggaatcatgttaaaaaaatatcaagaacagcaagcaaggagtcatttgaataggttttgctaaaaagtactttgtttaggtagctttaatatcacgatagtggctctcctttgaaattcttatcttaggtatggtttgttccttaaattttatactcaaattagagatcatctgattatgcagcactgtgttagttacagatttttatgcacttatctttgggattcagaatatagactaaggacacgtaaataagttctcaagaaaagattcaatgggcaggctggttggcacatgcctagggttaaccacgagacggcacaatatgcacaaatgagagggggagggagacctgggtgtcctggcaactgggcagcttggatgctggcaaattaaaaaggtgtagctctctctggatccttgatgatattttactattacttctttggttattttattatcttcattaaaacaaatctcttttcagaacttaaaccagataaatgttgtaactcctggattaatcttttattttgcatttattcaacaattcaactgtctcaaatcctattaggcaaacaagtagtctatccccacacagttgacattctagtggtggagaaaaaaataaattagaattaaatgaataaatgattttagt

SEQ ID NO: 9710 - DNA, 6000 bp, Homo sapiens
tacaagacaggatggactaaagttttttactctgtattttaacaaaaatgctttttgaaagtattgtaaagtgctcaggactagggactagggcttcatgtagatgagataaaagaagtaaatattttaaaaagaagtataagaaaggagttcccttgaatacttattcttaactttggaagcaagaaactttctaaggatggaagaaggtttaggtggcctgggatctgacaggtacttgtaagtgaaaaggcacatatagagaacttagctcaatgacatatgattcaatagggacattggccacatgactgcatagcttgcatcatctcaccaccttccaggcacctcccaacacacccagatttaaacctaaataatagaaaagctatgctcagtgatatttccaaaaccttcttcctatgcctgtgcaagtatcttgctttctcttcctctgtcccccaaatactgttcaggcactatttctcctcctgtacttccctcttcctcctccctctcccacttcttcctcttcttcttcatttcactgtctgctttttattattattattattattattattattattatttcctctcccctctccccgctggcctcctgtttcttgctctcttgctctcttctccctttttcctcactcaacttcagatcaatcctgctgggtatattctgtgtcctatacccctgctgtgattcttaatgaaataaatttcaggaagcctactgattggatccatgacaagtgtataatttataggagcagctgggccctccttggcacaggacaatcctaattttttctctgtatactctctttccaattctgctccatcttagccttctccttctcctacttcattggtggacatcagctgggaattccttacacttctcctatttctttctcttattttcttcttggggaaggaaagggtctcctccctttcctaaagtgaatctcagaagttcaatttagaaggatatcctaatgatatccttctaaaggatatgagatgaacctttatctcataaatcagggtctcatcgtctctcctccgtaaatcctaacagctgtcttacctatcagctcccaacttccttcatattgctaccagaattaggtttagcatttgtggtatgatatttatttagtcaaatctgatggttttttggtctctactcagatgggagatttcatattttatgtttatgagaagtttctttttcccttttctgcctgtggccctcaattggaatttttccaatgattttcccattcttaatgattgttggattttctgtggcttaaagaaaaagaaaatagagattttctaaatatggtgataaaaatctttgtaaacataataagggcaacctttttgtttatgagtctaaaactcaacagatctgatgtcccagtgattttctctctcagattataggtaaatcgctggctgtttttaagaagcctatgtagagaagtggaatatttagaagcttctgaaatactctttgactatcaataacttcaatatctggcttagaattttctctcctgagggaaggcttctgggagtaacgctttctaaacgcaatctgtgctggccactaaaagttaacgtttctctcagtgccccgtatttgctttttttcatcatgggatagtggctgaatgcatagacttcagtgacaaacagcctacatttaaatcccagtatctactgtgtgactatgggtgaattacttaacctccctgtaccttagtttcatcacttataaaatgggaatacaatggccaaatatcatcatgcatattttaagggtgaaaagagataatcctttttacatgtacacagtacttgagtgtacagcaaaggcctatttttattgctattgttatatttactattatggttagctatatatattatttgcatttccaactaaattgtaaatctcttgaagtcaggttcttacactgctacttaaatataagggcataagaagggcaacctttttgtttatgagtccaagactgccattaaaagtaatggcaggccgggcgcggtggctcatgcatgcctgtaatcccaggactttgggaggctgaggcgggcggatcatgaggtcaggagatcaagaccatcctggctaactaacactgtgaaaaccccgtctctactgaaaatacaaaaaaattagtcgggcatgatggcgggcgcctgtagtcccacgccaggcaggagaatggcatgaactcgggatgtggagcttgcagtgagccgagattgcgccactgcactccagcctgggcgacagagtgagaccccgtctcaaaaaaaaaaaaaaaaaaattaacatggaatgcttagggatgtcacttaaatatgtaagaattttttatcatgtctttaagccatctataattgatgttcaaatgtgaataatgattcttagattttttcttcattaataatagttgaatgttttacaaatagaaagttatagtaattactgaatatatgtaacttattcccacaaggcaaaattttgatttaaagcataactgaaacataactgtgtagttaaatatgttgaatgcaaaagcaatgcttacaaagtttgtttatttatttatttatttatttatttattttgagacggagtctcactctgtcgcccaggctggagtgcagtggctcgatctcagctcactgcaagctccgccttctgtgttcacaccattcttctgcctcagcctcccgagtagctgggactacaggtgcccgccaccacacccggctaattttttgtatttttagtacagagggggtttcaccgtgttagccaggatggtctccatctcctgacctcgtgatctgcccacctcggcctcctaaagtgttgggattacaggcgtgagccacagcgcccagcccaaaatttattttttaacatcattttttaaaaagtctgtggtgcacttaaaacaactatcccccaattcctagtaaggtgtcagttttctgcaagtacttaatggtatctggactaagtgtacatttcaaaacactcacattatgagttaatgcatttgcaacaaacttctgagtgaagtcagatattgcctaggttgcaaataaaaaatgcaaaggagtgaggacttaagacctattgagtacccctggaacccttaatggttttctttgcttccttttctctcttaatagacaatcatcccacctaggaccatactaatcaaacaatacacaaatgtttcatgttaaggctcagaatcatagactcatataatcaggagattggaaggaaacacaaaaagtaagacttttcaagacaacctcattcacactgtttacttgaattatttactcttgttttattattaatttttatgctgttcaattgactacaattcaaaacccagtgtattcataccatgtgctaagatatgctccttcctatatgtgttcctctaaagaaccatctggatcttgtgggggatattttcctttgtggtatcaaagccaggagctcgtggttttcctttattttttaagggaacactatcatgtagcatctgggaccagaaagaaatcttgatgttatatattttacagatattttctttttggattttttttcctctaagagaaaagcttttgttaatgtgtcatgtaaaaatacattaactagtaacttgtcaagaagtgctagattccattcttgtgcgggtccatttatatatgttcctgaacagctaatatttcatttagtttccaattaaacttgctcaaatacatttttgaagtgcattgcttaaaatttacattcaaggcaagaaaacgagtttgtcagtaaatgtagtaattaaggaagtcccaagtctgtatttttaagatactagaggtaattgtaactaatcactttaacttaaagaaatagaattggaaatacccccctccccccgccaccccctaccaaaaccataccttagtcactttggaattataaccgtcttttacgtctatcaatataaatgtattgcatttggcattcaaattactttcaaagggataaatttcgaatttttttttttcattgtagcttctgatctttaaatgtactgaacaggaggatttggggagcttgtcttgtctgataggtgttaagtatctatgacgacaaatttgagctgaagcaatgtgcaatatggactagtaatatcttcacaagactattttggaaattctcacgttgatgttattaatgacgtgggtttattagcatttgggtaattaagaaaaaacagtactagaatttaaaaaaaagaaaaaaaaaggtaagaagggcgaaacagagttctccactcctctcccaaccctcattcctttggaggctcgcgccctcttggaatagcaggttcctgcatgtgccagaaatccggtcccggcaaagctagacgctctgcaatgacaggcgttcccagctagggactcctggctgcttggagcttgaaaacacctggcgtggttctcgagggccctagaggctcctgctacggactggtcggctctggggttgtaggcagaaggctctaagcggtcggaagggtttcctgtgtgtcagcaacttcactttgccgagatagctggcggaagagggaaggagcgctcgcgggccaatcgcctgccagcagccaccttggagcgcacccctctccctcgccgccgactccggtagcagcgtgccggcagaggctgaacacactcggcctcggcggagacctgctccccagaagacgcctcctgcttcccactgcgccctggaggacgcgggctggctgctgggcgagctcggcggaggcacgcccctcgcctccccgcggagtgcggactcgccccggtgcccaaactccgcccaccctctagggagctccgctctcccgcctaaccccggcactccggacagagctgggcctggggaaggggttcctgaactacgcggacgccgaacgggacgcgctgcagaagcgcacgagtctgcggccacgcgcgctccgatggctgccaggagctgagctcagggtgggcggaggaagcggttagacgccccgaaactgagctgcacgtttctaaggtagggaggaggaagatgcccccaattaagttgatctttgagccaaggaggctggggagcagcctccccaagctagagccctgcagagcgagtttcccttgacctcgctgcgcctctggcgcgctctgcagcgcggacccgcggcccctcgggaaagcgcagtcggaaagttatccgcggcggttccctgcgcgccctgttgtgtaagctcggcgttgccagcggacggagaagttgctggcttgcccgatagcccagttcggtggcggcccggggcggatttcatggcccgcggcgaacgcggggccagagctggcgtgggcgagcccctgcgcgccccctcccgcggggatccagttcgcctgctcccttccgctcgctggcttttccgatgcttgctgcgcccctggccgccgctgccctctcgccgcctcctacccctcggagccgccgcctaagtcgaggaggagagaatgaccgaggtgctgtggccggctgtccccaacgggacggacgctgccttcctggccggtccgggttcgtcctgggggaacagcacggtcgcctccactgccgccgtctcctcgtcgttcaaatgcgccttgaccaagacgggcttccagttttactacctgccggctgtctacatcttggtattcatcatcggcttcctgggcaacagcgtggccatctggatgttcgtcttccacatgaagccctggagcggcatctccgtgtacatgttcaatttggctctggccgacttcttgtacgtgctgactctgccagccctgatcttctactacttcaataaaacagac

SEQ ID NO: 9711 - DNA, 6000 bp, Homo sapiens
aattatatttattgcaattaatatattttgatttatttctagcattttatgttatacttcctatatgttcttctctaatactttttatttttctgtcctcctttagattgacttatgtttaattttgttttttctttctgcaaaacttgaccttatgcactctatttttatcttttttgtggttgtattagtactttttacatacataattaacctaataaagtctaaagtatataattaatcaatatcattatccttctttccaacaacataagtaaggacttcattttatttatttagccagggtctcactatgttgctcaggctggtctcaaacttgggctcaagtgattttcctgcctcagcctcctgagtagctgggactacaggtgcacaccaccaggcctgattgagtaaagacttcagagtgctttaattctaattaaactctcccagcttacacaccccgttgtctggttttttagttgatcttttttatcaccattcttttatttttgttaatgtttgcttagatttatttatgttgttactatattctttgcttatcattctttctcacatatcagatcttccataaactattattttgcttcctaaattcattctcaagaagttcctttggttacagtcagtggtgggaagtttttcaatttttattttgaacagtctagcttggactactttaccatagatctttaacttggaaatactcaggctacacaattagtataaattctattcctacatccatttgaagtctggccaaatcatgaattcttacagaaagtttttgttgtaagtttaccagcctgagtcaggactgaaaaaagcaagtatatctatgtttcttgtggaagagtaggggtgaggagtcggagttggggctgagtttcattttttgttagcccacattttcactttgccctggactacactttgtatgaagtcccttggcacttgcaagtcctgttaaagtgaaagctctaggtcgcttaagtccagtgaggcctcttgaaatggatagataccaccaggacagctactgttttcagcactcacatatccttcttgatttttttgtcggtattacaagaaagacatcttgatccagaccccaaaagagggttcttggacctcttgcaagaaagaattcagaatgaatccataaagtgaaatcaagtttattaggaaagtaaaggaataaagaatggctactctataggcacagcagcagcataggcggcttgactgagtaaacttacagttatttcttcattatatgccaaacaaggggtagattattcatgagttttcagggaaaggggcagagatttcctggaactgagggtccctcccctttttaaactatataggttaacttctggatgttgctatagcatttgtaaactgtcatagcactggtggtagtgtcttttagcatgctaatacattaaaatttacatataatgagcagtgaggaccaccagcggtcactttcatggccatcttggttttggtaggttttggctggcttctttacagtatcctgtttcatcagcacagtctttctgacctataccttgtgccaaccgacctcctacatcatcgtatgactaagaaggtctcacctcctgggaattcagcccagcaggtctcagccttattttacccggcccctattcaagatggagttgctctggtccaaatgcctctgacagctctctttgtttttggcttctaagattttcttttacttgcctgctggctcaatggtgcatataaaaatgcactatagcatttttaaaggacttaaaaaaattcatcaagcatttgtgtcacacacagtggtttttaaggatccattctgcaaactgctagaaccaatgcattccattcttaataacttatgtatggccaccaggagggctactttctcctccattcctataagtggccaaactgagtgatcttggaccacctcagtaagcctcagttgtctaaatttacttactgtaaatagttggggactctttaagatcccttaaaaaaattatctcaaacttgcacaaacttctgggaggagatttagcattcttgatttaaaaacaaacaaacaaacaacaacaacaaaaaccctaagtttctaatcaactttaatgaaatcaagatattgtaagggagatgtgggtagtccaagctacttaagaggctgaggctgaaggattgcttgagcccagagttagagaccagcctgggcaacacagtcagaccctcatctaaacaaaaaaaaacgaacaacagcaacaacaacaaaaaacagaaagaaaagagaaaaagaaaaaaatatttgttctgggaaaccagttaccaatccatactgtcgactatcagctgaaagtcagagtctaaaattaactctaagtaggcattttttttttcttttgtcatacattttaagtaaatccttttttttcctttaaaagagtcctcaccgccaggcatgattgctaacacctgtaattccagcactttgggagaccgaggtgtgtagatcacttgaggccaggagtttgagaccagcctggccaatatggagaaaccccgaaagtaaaagtacacacacacacacacacacacacacacacacacgcaagcaaaattagctcggtgtggtggtgcgtgcctgtatttccagttgctcaggaggctgaggcaggagaatcgcttgaacccaggaggcagagatcacaccactgcactccagcctgggcgacagcacgagactctgtaggaaaaaaaaattccagttgagatgctttccagggcgctagtcaagccccgcatgcttatttgtgggagtgaaaacaccaatatttcgggattgttgtgaggactaaatagtgtctgtaagatgcacagagaaagcgtaaatagacgtcaatagcacttgttaggtctacacactccatttttcctctatattaatcgaattatttaaagattggttagctttttggggaaatgtctctccattgtattccacttattaggatgaactaccttttctccttgcttttcagctttctctgctatgaaaaagatggaaaattttttagcacaaggggactcttctcaagcagcaaatcattttgatattaaaaacagataattgcaaacccagttttatttcagtatgaattccgcagtggagtgtgaatatgtgtgtgtatgtgtgtgtgtgtgtgtgtgtgtgtgtgtgtgtaattacctgtgattcaaaagaggaaagggatcagtattaaaggtacttgtacactggaagcaaaaaaaaaaggaagtttagttcctctgagctccttggcaattatagctgctaaaggtagcttttacaaagaaactgcctttgtgcctaaagtatttatttccttgtttgtatttacccctttgaggaggaatcgctgtgtcttgagtgaaaggggtacgctgcttgcttgcattaaactgtgagggtccaggcgcattacggctgatttcagtaggtagagcagacacactttagtttatttttctctttctcactccccaccctcaacctccgatgtacacacgttttaagattccctgaagtcaggaggtgggagcggagagtttcagttcagatcttgacatgagagtacttcgaccaaggaaaagaaagggaagaaagagggaagcggggtggagaaagcaggagcaaggaaggaaagaaggaaacggggagggagagtaagaaaaaagaaaacgaaggagggagggagagaggacatttaaatgaagaaggaaggaagcttggattcagggaggaaagggagcgggaaagagagcgaaagaagagcgtgagaagaggcaagcattatagtctccggtccacaggggagagatggagccccctcaggactagagaatcccgaagagcccgtgtattgttttcttgaaagccccgaagctaagcaattctaaaaatgtttagcaaagcccttttgggaatggtgagatggggggtggggaggatgggacattttcattgccaccgcccgccccccgtctccccggccccctcacatgaagtgactggatttgggagacctagcggaaaccttcaggtcacccagggaactgctcctctctctggtcctgcagcggcgaggcggggtagggggtggggggggtgggccgtgagagcgccgagacgcgcggggcgcggagatgtgcaagtggcgaagcttgaccgagagcaggctggagcagccgcccaactcctggcgcgggatctgctgaggggtcacggtgagtctctgtgggtgcgggtcggagggatgcccaggtgcctcgtcgccccacggcccgggcggaggcgggtccggaacctcccccaagtccggcctcagcctggagcccgcgcgccttgggcggatgcacggactgagaggcgcttggctgggctctcagcccgccactgccacccggccccgtgcgctcattggtcgggatgtgtcggctcagcagcctccaacttctcccgaatcccactggtgagtcccaggagagcgagctgagggagaaaggtccaaagggcgcgagcgcccagggcgctgggagcccgtgggacgggcacggggagggcagagccagccgaggggagcggctgccgggaggtgcgctgagcagggtccgcagctaaggtccagcgcgatccgagcgcccaggaccctgcggccgtggaggaggcgtgccctgggaaggagccgctactgggacctgaagagtgaggggagggagaggggcccagagggtgacctggaggagggctctggaagtcacgtcaggttggctcttcaggttcatttccatagttccctgcggcctctgccttggggagttatgttttgttaccgagatccgcgctaccagattgcaccggggctgatttgggggctgggaatttgccattctgctgtacagacactgatttttttttcttctttttaaaaagcaaggtttgttttcattttggtttctgtcggattttctcatttgtaactcacttttctatttttacttttcttaaccggaagatcttttcattatcccacctcttcatcttgcttttaacctgatttcctattatataattaatgcttaaatctcacaagggttggtcggtgcggggctggtgtgtccttttgtagatgaaagtttaagacctcttaactggtttcagtctatttgtctggtttcaaaataagggtaattgcaaccaaatatccctctttagcttctcgatcaagtcgattcctcccccatatatgattcaaatggcaattttattaaactgaaaactagtacctgacttgcagcgtcagcatttggaaagtgcttgtcggcaaatcgactgtatgaaggcgtgtagcttcatcccctgccatttttgtgggttctagcactttaaaaaattgtctggtaatttcttggacttaaccctgtgtctttggttgtagagcagcactaaccaggggagtaatatggttggcacttcgtgtccagaactccgtatttcaggctgggaaacacctaattaatgtctgggaaacaagaagatgatttatcctgagtacctctgtcctcagcttctgcagacacagtttaaatatggaaactgtttctccttcttcctgtgcctcagtttccatagaacaaactgtaattgcatagcacagcttcaggaacctgcagatataagttaatgttataatgtgcagtgaagatgaaaactgcttagctaagtctaagtctgtaagtcaatgagatttcctttttaacaaatcagttatccaggtttcctgctttgactgtctgatatagtaatgcttatgctcaactggtataagaattgctgctttacattgctttgaaattaagcttacacttaaaatagtaatt

SEQ ID NO: 9712 - DNA, 6000 bp, Homo sapiens
aacatccacagaagatgaatacataacttatggaacagtcacacaatggagtattacatagctgtaaaatgactgatttacagctatatgtaacaatatatagctatatgcaacaacataggaggatctagaaacttaatagtgagagaaaaaaaacaagtaccagaggactatatacagtaagataccattttttgtaaggctcaaaaccaaaacaaaactaaaaaatgtattacttagggatgcagacatatatgatacagttattttttaaaagggcaaggcaggaggctgaggtgggtgggttgtttgagctcaggagttcgagaacaggctgggcaacatggcaaaaccccatctctacaaaaaatacaaaaattagccaggtgtggtggcatgtgcctatagtcccagctacttggaagactgaggtgggaggattgcctgagccaagatcgcattaaaaaaaaaaaaaaggcaaggggatagtaaaacataaaattcaggatagtaggctacctgtggagaggacaggcatggaggtgggataggggaagaactaggttggtatgaagatattggtaacactctagttttttggttgggtgttctgtgttcatgcatggttgttgtatttcataacaatacttgcatgctcttttatatgtgtcctttaaaaggttatacatacataggtatatattaatagaatgtcagtaagagagtcctacttaatacctactacatatttgcatacagatggcaggaacaatttaagaatataaatcaaagtgacaactgagaaatttaaaactgtgcagagaatttctatgtgtataaaagtttcatataaaatttacttgaaaggattttaaaaatcatatttatcattcagagtctcagcagataagtcactttacattttgtttttatgagacggggtctcattctgtcacccaggctggagtgcagtggtgcaatcacagctcactgcactgtccgcctcccgggtttagatgatcttcccagctcagcttcctgggtagctgggactacaagcacatgccaccattcctggctaatttcttgtatttttagtagagacagggtttcacctgttgttcaggctggtctcaaactcctgggctcaaatgatctgtctgtcttggcctcccaaaatgttgggattacaggcatgagccactttttatcatgttctatgaggtgataaaaaataaagtagataaggacatcctaaaacaacatcatactagaaaacagatttattggttatcaaactccattttaaagactttttaaacctaagagctacaactctgaaatatttttgagaataaattatttttaaaagctatatattttttatatacttgcaaggctgacatgggttaattgcaaagcagaaaacagtaattgcctgtaaacagtttgatcactattgttatatcccatgaaaacctaggattgccattaattctctgttcattaccatgtcacttgcaatggcaaagtatttgtataatgcatattttttggtacctctttcctctgtgaaattttgacactattttactttagcaacagatctcttacctgtttattaaagaagtacacttgcacctgttttctgccccacaggtattctcaatgggtgaggtaaatactcatggtgaagtgcttatcccaaaggctaaaaacagaattgtggaataagaatacatgcattctttttgagatttctgtaacagaaatctggtgaaatattagtggagaagtgtaaaaattaatcatctcagtatcactgcacagtaatggatgttaagagtactgaactggtaatcaaaagaactgagtttgaatgtataacctcttatttgctgaacagtgatattcgcttaacatctttgggcttcgctttcctcataaacagataataacttctatcttcctcagaggattgttaggagaatgaaaataacattgccatatatgaaaaaaccttcataatcctcacaaatatgcaaatattagtttgtcactagaggaaggtcttttttctttttgtaatatattaatattcacagtaaactataacagagtttatttaggcatttttggaaattgccacataaaccacatgaagtttttagtaagaaaatgcctatagggtctgcatgaaaaaatattttattgattttcacggatgaacacttagatgtaaatgtcaaagcatatttccaccaaatcttcaggatatttagctttattaattaattcatcaagtcaaaccttgctatgaaacctccagggagatcatcagtatggtaatctctcttcttagttatgggggaagcagaagtcatgtctctcatgagtgtctgttctgctctcatcaatataggaatgtagtggacagactggatgggcctttgggtttggaattttactgctactccagggcctagtttgatttgtagttctggaatctttatcagcttatctgcaagttgcctttgccacagtgaaacgaatccatgtacagaaagactgacaatgcacccaaaagtgatttgataatttacagtaagaaatattgtaaacttatcttcaaaataatactaatgcattacttttctttatagttcccgaaggcttttaaattcattatctcattttggaacctcttggctattgaacaggatgactgaatttattttaaactgtttctctatttatcagatgaaaatacctgaaaggtaaagcaggacaggagactatatcctagttgtgaaaaataacatactgttagcagttcttcatatctccttcctgtcttttgtatgcatgtttatactattgagattatattgtatgtgccatttaaatgcttacgttttcattttttctgcttatggtggaaatatatggcctttgtagaaactttagaaaagttgtggaaaatagacaaaagtctaaagcagaaaatgaaagctgcatataatctactactgtacgcatgattaaccactgggaacattttagtgtatttccttccaggacttcttattattttgtatttttagaaaaggaatggggatcacaccaaggcagaagtgcttgctgggggacagacactggcttggctgggatcaagtagcctctttctgctctccagcccagcggactggaagcagcagatcagcactcttcttcctggacaggggtaatgagaatgagtattttcctttaaagctcacttgtttccgtattctaagcggacgcgaacattgttcttttctcgtgctttcccactttcaagacccaccaacacctgcctgcccacatttcgagttatcttcgtcggctcctgcaagcccgcactcttctccgcggtggctactctccgctcatccagactcccgccctcactgcgccttcttcctgcgatgaccgaggaggtggtgggagaccaccacttgcgagcttccaaaggactttcaaacctgaaccgcagagtcagagccctcgcgccgtagaaaagtcaggagcgccccggggcccccatcggaagcttcgtgccttcccgtggaaaggtcgcgagcagggaaggccttcgtggccactgagtcccctactccaggggcggcggccgctctccgaaagagcggcccttctcgtccctcccgaggttatcgtcagagtgcacttccttggggaaacagaggtcattctgtcgagtcccccctttctgctgttctcgggagggagaaggctgctggacccaggctcgctccccgcctctcgggagatccgggaaggcctctattgctgaacgccgagacagcggccagcggcccgatcgtctccctaccgctttgcaagccgggagaagtgcgtcccttctcgcttgccttatggctggcgaagcggggaccgcactatagtgcagccgccgaaggggggaacgctcacgtatggctctcggcttcccagtgagcagcaatagttcctggaaaaccaacgctaagactaccggggtcagtattagcttgtcttaggagccggcacagggggaaggaacaacgattcgcaagagctaggcagcggacctccctcttttctcccccttggctgtcctggaccgcatggggctgcgagcccgcaccggcggccgcggaacttgctcagcctctgacagctgggtgggaacacctcggggtgtcgagtcccgactcaaggggcgggacggggcggggcgagcgcgcggggggcggagcgcgcgcgagccgggacgcgaggagggagcgcgcgagtgaagccgagctgagccgagccgatccgagccgggaggtgcctgggagaggcaggcagagcccagccggccgcctgcggctcagtaccgaccgtgccgcgtcgccgggctctgcgtacccctgtctctgcccaggctcccgcaaaacttttattctctggggcccccggggtgtgtgaaggaattggaaccttccgccatctccgcgctccccttcggcggcgaccgaggggacctgcgtccctcgtccgccgggctctggagccctgcgcctcacctgctgatcgctctccggagtctcgagggggcacccccggagggaccgcgcgggcgccggcgcccctgaactctcccgctcaccgcggcagacccgcccagcgcaactttaacttgattcttcttgcccaaccggggcaccagcggctgctgctgcggcggctgctgctaccgccgccgccgcggtctcacaaaggggctcagggaagggaggcggcgcgggcggcagggacgggcctccgggccgccgaggcggggagacaaaagggaagctgcctctgctcgcgctgcctgctcggagccgcttgctcggctgcctctggctgggctccgcgatcctctcccccaccctcgggcactgctccgcctccctcccggcgggctgtccccgcagtgctcccggacccggcgagccttcggggcgcgcgtcgctggtggtggttgaggctctagcgataataaatgatagaggatacaatgactttgctgtctctgctgggtcgcatcatgcgctacttcttgctgagacccgagacgcttttcctgctgtgcatcagcttggctctatggagttacttcttccacaccgacgaggtgaagaccatcgtgaagtccagccgggacgccgtgaagatggtgaagggcaaggtagccgagatcatgcagaacgatcgactcggggggcttgatgtgctcgaggccgagttttccaagacctgggagttcaagaaccacaacgtggcggtgtactccatccagggccggagagaccacatggaggaccgcttcgaagttctcacggatctggccaacaagacgcacccgtccatcttcgggatcttcgacgggcacgggggagaggtaggagctaccccggggctttgtatttgtgtccgtgtatgtctcgtgtgtgtgtgtgtgtgtgtgtgtgtgtgtgtgtgtgtataaacaacaggacagcgtgtgcgcagcgggagaggatctgggtgcgaggggcgtggtgatgacaccacggtgcctggctggacaaatgcggctcaagttgccaaaagcactgctggatccagacttcttggtgctgagggtccactttagggaaaggagagtcatccacagcatatttgttgctacttaatgtgaggttcccaaggccggaacccagaaaacactgtgctagtttagcaaggagaattaatggtatctccagtgaactttggtcccagaccccagtgcccttgttctagggtttgagctgaactaggcacagagaaggaagacaatatcttatgcttcattaggcaaacaggctatatctgcagagcgagctcattgagggtgaaggaagctgtgactccttcccatcgccttcactctagggaggaatccgaggg

SEQ ID NO: 9713 - DNA, 6000 bp, Homo sapiens
gtggtaaactgtgagaaggtaaaaatataggggaaactaatggtagataaggattatagtaaggtttctttgtgcagactcatcttggtgctgtctccacttctggtggtaagggttgttttccttgtctcggtatgggagaagaatggggacacctttgtgagaatttatgctcttttaggcagataaggacagagagctcttgctgtgtctgattttctcatttgccttcaggtcaaaattatccttatgccaaagtggcatatttgggggggcaacatattctgattccattcaactcccaaatttatacctccagccaagacttctccctgaaatctgcttctcatataggtggctgtgcaatccatatttcctcttggatgtccattaggcttcttcacattaacacaccaaaaactaaatttctatattttcatgccaaacttctttcactcttatatttctcattttagtaagttacaattccattcttctggttggtcaaaccaaaaatcttgaagttatccttgattcctctctttccctcatattcagaatctcattgactctaccttcaaaatataaccagaatccaagatgtcccactgcctctgtagcaaacacccaagtctaagccaccatcatctctcacctgtttgctgcaataacctatgtccccacttctatccctgtatctcctctcacagtctattcacaacacagcaatcacggtcctttctaaacagaagccattttatgtcattcttctaaccctaatccatcgtggcacaccctctgaagccctcattttactcagagtgaaagccaaagtcattaaatggcctacacaatctagccccatttccctctgatcttatcacctactcctcttcctctattgaatctgctttagccactgacctccatactattactcaaacacacctgcactctcccacctctgaacttttgtaaatgctgttcactctaccttaagtatggtttcctaggacacccactggccttgctccttcttcttcttcatgccgtttttggtcaaagtggatctcctcaaagaggactgccctgaccatttaagttccaattacatcctccttcccactgcaagcagtccctttaccctgctttgtttctattgtaaggcttttaacatacagtgggccctccctatccaagggtccacatctgctgattcaaccaattgaaaatacttgggaaagaaaattaacagaaaataacaataccacaataaaaataatacaaattttaaagttacatagtataaaaactatttacatagcatttacattgtactaggtactataagtaatctagagatgatataaagtatatgggagaatgtgcataggttatatgcaaatactgtatcactttttatgaggaacttaagcatctgcagatttaagcatctaaaatctagaactaatcctgatttactcactgtcattcactgttacagatttttgacaggggtcctgcaattaatccccagccaatactgatggacgactgtaccatataatttgccttcttgtgttttacagtctgttctcttcttcccaaaatataagctccacaagagcaggatgtttgcctcttgaacactagtatatcctcagtgtctagaacaaggactggcacataataagccctcaataaacatttgtttaatgaatgaataaatataactcatttcctcaaaaatctccagtaaagtctcttgtaactaatagttttgctttggcaaaagaaagaacaggggccaggtgcagtggctcatgcctgtagtcacagcactttgagaagctaaggcaggcagactgcttgagcccaggagttagaaaccagcctgggcaacatggagaaacctgtctttacaaaaaattaaaaaatttagttgggtgtggtggcacgacctgtggtcccagctattcaggaggctgaggtgggagaatcccttgagcccaggaggcggaggttgcagtgagccgagatcgcaccactgcactcctacctaggcgacagagcaagaccctgtcttcaacaacaacaacaataacaaaaaatactcctcgtttgggagagaaataactgtcaaataataagagtaaaattggaaattcaaaagtaagttggaactagaagtggctaggggaaactccttactgccaccatcaataatatagatggtgtgctgggaaaaggatttgagctatttttatataaatatttttatataaatattaaatggaaaggagacccagaaatttgacccataaatctgaggttatatgtgtgaacattagccatcattcatgctgctacacacaacagggagtcatggaaggaagaaggtctggagtgtaaagagcatagaagtgaggagaacaattaaaaggccattgcaatactagttcacgtaggtgatgataaggacttgaacaaggcaatggtaatgggaatgataagggagggaagaattccaaatatctcagctgtagaatcaacaggattggtgactgactggcagaaaggcatggttgggatgcatccaaggtttctagcatgagtaattgagtgaacaacgatgtagttattagatttttacagtaaaaggggcaggttttgctggggaaatggtgatttttagttggacatccagtggaaacatccagaagaaatctggaattaaacatgaatgcagtattttggaattaatctgtaaacagaatgcacaaatagaagagacaagaggaaggtgaacatataaaaacggtggccaggaacatgtgagaattgggtaaaaggagagaagtcaacgagaaatcagaaagaagttgatatacatgccaaagaaggaaaagaagtcaagaagaacagtcaatattgtcaaatactgagtaagatgccagctgagagaaggtattgggtttgacaaaataattgttactggatggtggaggtagaaaccaaattgttgtaatctaaggagtgaatgacagaacaagaggacactaaattaaagctctgctgatgaagaaaatagtaaggcagtaacttgaggatgagtcattgtctataaaggatttttattccccaccatagtcctaacctaacatttgacatctatctagtaggcactcaatacctactgaatgcaataatattttcatttatagaccaggtctcctataaaatagtccagtgtttatgtccacataaaacagcacaaaacagattcatcattctgggtgggtagagggattgaaggaaataaagacatttcatattctatattatgttttgggttaattggcaagaataattacttctttctcaccccatccctgactatacacacacccaaattatagattatagaggagaaaggaattaaatgactcctgagaccagaactgcatagtccaaaaaaaaaaaaaaaattcagcaatcttactttattaaaaaattaggcatcaagatgctgcaatttgccttacttacatatttaattgctcttaggttagatatataatatgggaaacctggaaaaaaattttaatggtataataaacgcttacaacctaacattaagtgaaaaaagcagctgccttattgcatatgatctcaatttgggaaacaggaaaaaatataaatacaaacacacatgcacacacacacacaaagtcagaatactataagaaaataaactgaacggtcacagtggctcacgcctgtagttccagttactcaggagacagagacaggtggatcgttttgagcccaggagttcaagacccgcccgggcaacataaggaaactccatctccacacaaaaaaagtaaaaattagccaggtgtggtggctcatgcctgtagttccagctactcaggaggctgaggagggagatcagttgagacgaggagttcggtgatgcagtgagccgagactgcgccactgcactccagcttgggcaatatagagcgaaactcagcatcaaaaaaaaaagaacatctttctattctgaattttcccaattttctacaattaaaaacgctttaaagatctctataaagtcagtcaagggaatttctatctaagcacttaccagcaatttgagctccttctcttttggtctaggtggctctaaaataacaataaaggctacagtgattgaaattcaccagacttgaaatagactgcagccttcttccttcccaccttcttagaatctttgtcctattcatcttccttacgcttccccgggttctcttacttctggattctaacagtgagttgtgagaagcaacgcggaaaacggaatggagactccagcttgttttaaacgagctgtattaccccgcacagtgcaggagaaaagataattggctcaggtctcggctctgccatctaccacctgtggagccttagataagtcagttcttatctctgtcactcaacggtctcggtcttgtcatcttttacatggaatgtcatgaaatatacagtacattgcaggaactgcctcaggtaaagacttctagggttcagtaggtctcagtcgatccctctgagaaaggccgcaccctaaatgcacagactctgactctaaggggatggggtcggggaatctgcattttagtagcttctcaggtgattcagatgctcagtcaggattgagaaaccaggactcttcccagccctcctgttctctgatccacttctctgcttcctccacgtcctaacgattctccagttcccgcacagcaggagcggagggaagaggggagagaaggcaccgctaaggaccgctggccccgccaggcggccgacctccccattccaggggcgccagccggcggattacataacgggcctcggggcgcgttctcgcgaggtttccaccgccccctcctcgctccacgtcagagggaaccgggcggagcggccaacatggcggaacgcaggagacacaagaagcggatccaggtagcaaagccgagctctgggcagggggcttcggcgcgctggatagtggaaggggcggggaaagccccctaaaagggcgagcgaaagcaagggcgaggtggggtggggtggggtggggttccgccgcgaggcagctggctgcaggctgcgcgttgtgaggggcctgagggggggcggtgttggcgacggcggagacagagacggaggtggtggtggagcagcaggggaaggaaggaggcgccgcgctcagaatccggctgcggaggcgcggctgtgggcctggagttcctgtggtcgcgctgtcccgggcctgagctggaaggtcagcctcccctggggcgcagacgctgacccttcccggggctcctcccctcccttcaccccatcctctggccttagctggcctgaaattaaggccacggtaataggggtagcaggaggcggcggactgacctaaagcagctggttctttgtgcgcatagaccgtaagggggaatgatctggacttggtcagctgcctcggggcctaggcagggatctgctcatccagatgttcagttgcgttgcccttctttcccttcaatattattaacttaatagtccacttgaagcttgccggcttttttccgggcgacgtggtgtaaacaaccacaacctcgttggtgctgcaacgagctggtggagcccagaaacctttcacatgccagtgtgtcatcctcgtagtaacgtacataacatctccccctaattccacatgcgtgtcatttgtgcatttcttccttgcgattttccctggttcttgttctttgccaagaggattaattatgtagaacatcttggactcaggatatttattagtcgtctcatcagctgatgtgctgagaaaccttcataagccctcaaattgatcacatgtagtaaattgttactataatcataaattgttacattcatcattgcctttct

SEQ ID NO: 9714 - DNA, 6000 bp, Homo sapiens
gacagcaagactctgtctctaacaaaataaataaataagtaaataagggcctagtagaagtacttgattttttaattgagtaatcttgcttaagtaatttcatatatgtcctgtgttttcatgtttggttttctaaagaggtgaatcatctttttaaaatatatgaagaaaacttccacagagaaatgcacattccagttgggtttaattatccctcatttggaatgtgcaaagctgaggttaatcatgtttctctacaagttacagctcccttcagttttttaccagccatgcaatgataaaagataaccactagcaggcgctaagagcctactcgttggcccaaactttgctctcaatgtggggttttgatgcttgccagcagtcacatctgctttgtggtatgcattcgtgctgtatctgaatagcattttagtttgattgactatttttgggtgtaaatggtagaagaacagttaaccaggccttttcctttgtttagttcacatctgggttttagggccttactggccctaatcccctaatcctccccttcaaatacctttgaataagagtaagatgaaggaacgaacttacgctcaagccacagagcatatgactcatcttatatttttttttataatggaaaaaaacattggacttagggttagaagacctgaaatcaggtctcagctctaccttcctagttctgatatgtactgtggaaatgtgaaaagatggcatggcagagtttgctgagaaaaaattaactgagaagacctttgtctggatggtctggggaccaacgattgacgtttatctgagggtgattagaccttgagagactgactcttacaactaaagggtacctgagactgtgacagacccagaatatcagtttagtaagttgtgctgcatgggaagtcaggtcttaatcacaaagagggtttgggaggagagccacagccaagcaatgtggatgatattttttttttttttgagacagagtttgctcttgttgcccaggctggagtgcaatggcatgatctcggctcactgcaacctccgcctcccgggttcaagcgattctcctgcctcagcctcctgagtagctgggattacaggcatgtgccaccatgcctggctaattttgtatatatatatatatatatatatttgatatggagtcttgctcttgtcacccaggctggagtgcaatggcacgatctcggctcactgcaacctccgcctcccaggttcaagagattctcctgcctcagcctcttgagtagctgggattacaggcacctgccaccacgcccagctaatttttgtataattttgaaaccccgagacggggtttcaccatgttggccagactggtctcgaactcctgacctcgttatccacccgccttggtctcccaaagtgatgggattacaggggtgagccactgtgcctggccgcaatgtggatgattttagcaaaagtctcagctaagatagcttgagggacttccccaccctacagagccttgctaatggcaccgcatcctcagagtctgtgagccacagactctgaaaatagtcaaggattcccattgcgtctctctgcctcttggcccccagttctctttgcttccatggcttcctgccttccttttgaagggacaagccctctctttaccttgggctaatgaattcaaacaggttacatcttgtggcctcctcaagtggccttttgtacatctatgctggaatggattagacactggctttacaattgctttcattggataataataataccctaattatttagcttgtatctctaccaaagggaactcccacttccaattaatctacgcttcctataaatcattctaacagtgtctaatgtgaatgagtgtccagcagtgctgggcactatgctgagtacttcatataaattatctcacttgatcctcaccatgccctaagggggcatttactatctcactttgtacatgaagaacctgagagtcacgtaggtgaagggccagctcaagtggtgaagacagaatgtgaacctaggaggtcccagtccaagacagcaatcttaacaacttggcaatttttttttttttttttttttttttttaccatttagtgcctgagttctgaaatctggctttacaaacactatgtgtgtgtgacctgtggatgatctgggcattattatattctgattggttgaagtttcatggttcgaatgtcaaattctaatggaggcataagagtgcagattccatgagtgcttttacaagaagttgatgttgcttgggttttatgttttatgttgtatttagcacaaaagccattttaaaaaagtgttataaggaaatatctgaaaacattcagtccatagaccctggtgatgaaacgtcccccaaacacaatggctcactcagaacatactcctatggaatagtttccacaaatcaaactcatacgaatatagggaggatacataagaatgcaaaatcaggccaagcctgctggctcatgcctattataatcccagcactttgggaggccaaggcaggtgaattgcttgagcgcaggagttcaagaccagcttgggcaacatagtgagaccttctctctactaataataagaaagattagctgggcatagtgactcatgcctgtagtcctagctactcaggaggctgaggtgggaggatcacttgagtcccggggttcaaggctacaatgagctgtgatcacgccactgaactgtagacagggtgacacagatcttgtctcaaaacaacaacaacggcaacaacaacaacaacgttctgaagcatcacattagccaggggtttctgaatacttactttgtaccaatgttactttaagttctgcatatatattactaggttggtataaaagtaatcgtggtttttgccgttatgtttaatactttgcaccaacctaatagctcacagaataaaaaaaaaagtctatgaggtaggtacagttttcatccttattttacaaatgagaaaaggaggccaagaatgataaagtaacttggtctcacagccagaaagtgatggagccaagatttgaacttgggcagttggactgtgttcttagtcactgtgcttcctgggtgattactgtgacccttgtacttgacactctgctatcaattacaagagccatttctgtgtgtgcacttgatttccttggggtctccagggaaatgtaattgtctcctcaagtccaggctttcctagaagacatggtgattgcactgataaccagcattagggctggctttgggaaagctcagtacctatgatttatggttagtatcttagattttagaacgctgagcaggaagtttttgtgctttctgaaatcctcacacctttaagtctcatgattggtgaggaggcagtggtccaagggaatggatagaaggagataataagataagccaaatgtttcaaagggagtgaaaactgttgaatgtaaatgcagctcaaggaagacttccctatctgaataaaaaggtgcaaataatgcggcctatttgtatgcatggtggcttaatgatgttgatggtgatgatgatagctttacactatcagagcgctcattctgggctaggcagttttctcagtggggtacagatattaatttatttacagtgagccagagaagtctgctgtagcttttaatgcgtctaaaatgggacacatgaaccccttaggaattttcagactgatcaggacagtttcctagaaacagttcgtgaaagggatgagatgggcccatggtatctaccccttcctagctgcgtgaacttgggcaactcaaccttcttgtgctgtttctctatggctagtgcgtgtaatttgttgttgttgttgttgtttgcttttgagacgttgtctcactcagttgcccaggctggagtgcagtggcacgatcttggcgcactgcaacctccttcaagttattctcctgcctcagcctcccaagcagctggggttacaggcatgcgccaccatgcccggctcatttttgtattttctgtagagatggagtttcaccatgttggtcaggctggtctcgaactcctgaccttaggtgatccgcccaccttggcctcccaaagttctgggattacaggtgtgagccaccactcccggcctagtatgtgtcattgacaattgttcctacctcaaaggctgttatgaggattaaatgagctaatgcatgtaaaatgcatctgcataatatataacacagctcgataaatgtgagttgctattgttgattattatggccacgtttgccgctgatgatgttcaaccactgaaaagcatcgttttctttcttctagtaactgtgtgtactgaatgcctcgcgtttgtccctactgcacttttcagtctgtcacaatcctgggtcgtcgggggactgtaccgagcgcccttggagtgctcgcagcagggaagaaggagcgagcagggaggagctgaggagggtcggagcggaatggacacccagagactgagatgagagaggggctataagaagagaaaccagtcgcaggaaaacagaactctcgacaaacgcacgccctctttgcgctctccgtttctctggacctggatggaattgttttactttgcatcgccggactgcgctgcggacggggtggggcggcccaatggcccccctggggttactctgctccccttcacgcttccctcccggccccgccccgcgattggccggcgcgccccggggctgccgccgattggtgctcgccggccggagccgcggggcttaaagagggggcgggggcgcgctgcccagcagcgctgctgtccccgccgtgcgcccttcgccgctgagctcgcagcctccggcgcccacctccacctccagtgtcccgcctcgggccgtcgccctccagcggctcgcgagcgtgggagacgtacctgggcaggcactgtccagcccaggcccaggcacagccgtgaggggcgaggcacggggacatcctggcggccaccatggtggccacgtgcctgcaggtggtgggcttcgtcacgagcttcgtgggctggatcggggtcatcgtgaccacctccaccaatgactgggtggtgacctgcggctacaccatccccacctgccgcaagctggatgagctgggctccaaggggctgtgggccgactgcgtcatggccacggggctgtaccactgcaagcccctggtggacatcctcatcctgccgggtaaggacccgagcttggcggcggctcccaaatccttatcctctgggtagagagcgggatattagacggcgtcacagagacattttgggggcttgaagacctttgggtacgtttttgacatccctagtcccaccttgttgtaaaagaattaggcagccccgaacttaacttctctaggccgcagtattcttatctggaatttgagataatagtggcaatgtggccggtggtaacactggccgggtccctttgagaatgaacaaaccggaacacctaataggaactgagtccgtgttaattactgcggtcccagcccgcatccttccaccgtccgcttcccgaagtgcttcccgctcccgcccggcctcccccggggcgccgagccttcgcgttaggttccgcccgcagaggtgagaaggagcgtgtaacacaagctgacaggagaatcgaaccggctcaggctgagtttctcggtcctcatgggatgggcgaagcgcccccggccaggttagagccctcctagctccgtccgcgcagccgctgagcaattcacgtccagggctctctgggctgcctggtttgggaaatgtcacgttgattcccgcacgtgcccagggccatctccgctgcccccgctacccccgcccctgctgtgggcgcgtcagactgcggggctgcggtgacgccggctccc

SEQ ID NO: 9715 - DNA, 6000 bp, Homo sapiens
taggaaaaaattaactttttaagaaaagcaaattggtgaaaaatatgaagtaaataataatagtcatacatggatatggaaaaaattgggtaggtgatacatgaatgactgaaattggagaatacagaattctagacaaaactgcttgtttatacttcagaaaaatgatcttctaacatcattagtcaaatgctttttaaggtagaataaacatgacaaactcccaaccactcttcaaataattttctttaaagttaaaatgtgctctgtgttttttatggaatgtcataccaacacttagagaaaataacatattaaaaaataaaggacaaaagcatatgactctgatttgtaatccctgttcagtagtaataaattgtgtgactatgaccatgaacagtagatgtaatgttactaagtttttcttagtccatgggttctgcaactccttaaaacaagcttgtccaacccacggcccaacacaaatttgtaaactttcttaaaatgttatgagatttatttgcaattttttgttttgttttgttttcgagctcatcagctattgttagtgtattttatgtgtgaccaaagacaatgcttcgtccagtgtggcccagggaagccaaaagattggacacccccttccttaaaaactttttttttttttaaccttaaaaacttccatttttacaggctgggcgtggtggctcacgcctgtaattccaacactttgggaggctgagaggcaggtggatcacctgaggtcaggagttcgagaccagcctggccagcatggtgaaaccctgtctctacacaaatagaaaaattagccaagcatggtggcggatgcctgtaatcccagctacttgggaggctgaggcaggagaatcacttgaatccgggaggtggaggtttcagtgagcctagatcgtgccattgcactccagcctgggcaactgagcgagactcctcaaaaaaacaaaacaaaacaaaaagactattttactatgcttctatttaactaacagctatggaatatctactatcaagccaagtgctcaggaatacaaagataaactatggttcttgacctcaaagagatttaccatataatgcaggaaactgtcacctttctgaactacaattcaattaaatatcaaattgactttcatgtatccaagtatttgccttttgtataatgctacctaccatacacgttcttgtcagttttttatatacttgtgattcagtacttccaaaatatatgcagaatgactaaagtttatactcccatcagcaagatcatgtttccgcacaggcttatcaacaatatcatacaacttttaaatttcctgtaaatcttaaggtcataaagtagtacattattattgtttaaatttgcataatctgattactaacaaggttgagactatctaatatgcttattagtcattttaactttcattttgtgaactgcttctccctatcctttgtctgcttttctgttgggttttctgctctattttccgaagttctttatttttaactattgatttttgttggcaatatatactgcaaaaaatagatttcctatgtgtctgttatggatgacttttttgaacagaaatccttaaatttaatgtaatagattcatcacattttccctttacattgtacctcctgtctgttaattttacaaaattctctccaactaaaatgtccccaaattattttcctacgttttttcctaattttctggttttacttttcttttttttttttttttgagacggagtcttgctctgtcgccccggttggagtgcagtggtgagatctcggctcactgcaagctccgcctccggcattcacgccattctcctgcctcagcctcccgagtagctgggactacaggcgcccgccaccacaaccgactaatttttttgtatttttagtagagacgaggtttcaccggattagccaggatggtctcgatctcctcacctcgtgatccgcccgcctcggcctcccaaagtactgggattacaggcttgagccaccgcgcccggcctggttttacttttcatgttcaggtcttatacccatctgaatttgtatatagatatgattcaaactttatttttgttaattaaattgaaccaatttctccaatgtgataaaataatttatcttacccagtgattcataataccaattttatcatataccaactccccatggacataattagcatgtaaatctgtgtcttacacaattacattccatcgtttgttcctccaagagtatcacatactttaatagtaacaacatgctttaaatattaagagttgggtaagtataggcagagaacaagggaaataaagagaaatggttgataatttaaaaaataataaatattagagctttgcttatagcaaataaaaaataaatgttaggacttattataaatattaaactttagcaagtacttcttctgcatgtattgagataaatgtgggtttcctcctttggtctgtcagtattatggattatattgatttctgtttgatgatttctgtattcctaggaaaaccctacttggataaaaaaataattctaatacaacgttggcctcaggtagctaatatttcctatgtttgcctctgtagtccataagtgtgaattttttttttttttttttctggagactgagtcttgctctttcgcccaggctggagtgcagtagcgtgatgttggctcactgaaacctccgcctcccggattcaagtgattctcctgcctctccctctggagtagctgagactacaggcacctgccaccacgcctggctaatttttgtgttttttattagagacaaggtttcaccatattggacaggctggtctcgaactcctgacctcatgatccacacgcctcatgatccaaactgctgggattacaggcgtgagccatcgcacccggcaagattaatcttttcgttaaacatgtaatagaaagttaccccgaaaatcatctagacctggctagttttgaatatgtgggaaacttagcctattcgagttttctattttttctcggtctaattttggtatttgatgttttcccagattttatacttcatctaagcttttcaatttgttggcatttatatatatatctatagttattctccccttaatttgtgtcctttcattttttatgttcttgaacagatttggcagtgatacatcaaattgataatttctttcaaataacgttagtttttgttaatatctatgttggttttagcgtttatattttaattcttttccttctttgtgtttactctcctggctttttggtaatatgtgtgttccacacacacacaaaagcaatggattaaatttcttattacttactatattaaacatttaattaccgtgctataatttatagcctgtaatatgtcactcttgctttaaaatgcagtaattatattaaatataattattaagtacagaactaataaaaggataccatcatgatttttaaaattcaaacagagtaaatgttccctttgagactacctatgctcagaactgatggattagctggcacgacccagaccgataaactggctcatctgacctagtgtcccccaacccaggaactgactcgtgcagaaagacagcttccactccctgcgatttcatccctgaccaatcagcactcctggctcagtggcctcccccaacccaccaaattgtccttaaaaattctgctccccagtgctgctcggggagactgatttcagtaataataaaactccagtctcccatacagccggctttgcgtgactaagtctttatttgcaatccccctgtcttgtatcagttctggctagtcagcgggcaaggtgaaggctttccttgggcggttaccatccgaagctttaattttaagtataatggcaagctgttggaaagcttttttttttttttttttttttttttttttttttttgagatggagtctggctctgtcgcccaggctggagtgcagtggcgcgatctcggctcactgtaacctccgcctcccgggttcaagcaattctctgcctcaggctcctgagtagctggaactacaggcgcccgccaccaccacgcccggctacttcttgtatttttagtagagacgggcgttcaccgtgttagccaggatgctcccgatctcctgaccttgtgatccgcccgcctcggcctcccaaagtgctgggattacaggcgtgagccaccccgcccggcctggaaagctttttaagttcggaaagtaatacgatctggatttcttttcttttatttatttatttatttatttgaaaaaatgtctcgctctcttgcccaggctggagtgcagtggcacgataaatcacagttcgctgcagccccgggcccaaacaatccccccgcctcagtctccgaagtagctgggaccacaggtgtgtgccaccacgcctcgctaagtttttaaaatttttttaatttttcattttttaattttgtagagacggggaggaggaagagggtcgggggcgggggggggggcgcctccctatgttgcccagcctagtctcgaactcctgggcttaagagatatcccaccccttcggtctcccaaagtgctgggattataggcgtcagccaccaccatcattggaagctagctaagcctaggctgggcagatacttggacactttgaggggagaagggaggggaagaagttggaagggggaacggaaaaccactctcctggtagcagtctctgcccacaacaaaccttgccttctgcccttaaggaaaatggcgcctggcatagatgcgcttccggccacggagccaaacagaacagaggaggcaagaggccggaagtgaccgccctttgccactccccctgcctcctctccgcctttaacttctcgggaagatgaggcagtttggcatctgtggccgagttgctgttgccgggtgatagttggagcggagactgtgagtgccggctgcctcgacagcacgtttgcgacgctcggagtgaccttcgagcgactggggaccgggggcgggagtcgtgcatgcagcgttgtgtgacgaggcgccgcccgccgcggtcctgtgggaaaggagagagccagctgtcgggcgaacggggctggcggccgagtcgagcccacggagcccacgaggccgtgctcgggggtgggattgggggatccggacctagacggtcgtgcgcggggcgggggtgggctctggccctgactcctgcgcccggtgtgggaaggtgggaggccttttctaaggcaggtgttcacaccggccggaccggggcgttacccccacccggcttttcccacgcagctccttcgcgcggtcatttcttgactctctggaagaatccgccttctttatggccactgttcctttccatgtacacaccaggattagaccgtgattgtttgtctttggtgtctttttcttgagaaaccacctatgctttcttaaacttatagtccttgaagtttctggtactttggctggaagcgttaatgccctcttgaagccttacctttctaaatgtcagcctcacattgtgatcttagaattttatttcctcactctgcatatccactcctactcacctagagcttcaggttgagaaacttagtaacttccttattgtgtgtgaatttggcttcgcctcactaaccctgttccctgatgtactttagagtcacatgcagtgacaaacttagtcacaattagtttcgtcttcaccaaagggaaattgagtagaaattgcaaccaagattttggctaatagatttcacttattttagtgaaatatcattcaaaagtcgtctctaactgtctgactagaacactcccaaaaaagaattacctaaaaacattttgccagcataatttatttcattggggagttgatga

SEQ ID NO: 9716 - DNA, 6000 bp, Homo sapiens
cctccacccttccttaagggaagccagaactgagctcttgtcagagagggtaccgaccgcagaacggcttcaatagagtagaggggatgatacatactggagtggaagaagatgaaggtgagaagctgccaacagggcattaattggctttggaacagctaagagcctcaccctggcccaaaaaccctgaggcaatttccgaaagcaacggtggaggaagaggcctgccccttttctcacctccttggaatgggcagctcggaagtgggaaagagggccaggaatccatagggcatcattctcccgccagctgcctggggcctggaggggggccaggcggctcacctcctggggtttgggaatgtgcccgggtgtaaggagctgcagcccccatctccccattactgagaggaggtgttgagaggtgccccggcagagctgggggacagcgatggctgctgctgaagtgttgggtgtggacaagtggtctctgctgagtttctggctccattgacgtttcttcttagctcagtttccttatctgaaaatgagagtttttttggaccacatatcaaaggtctcttcagcactgccttctggggctggtgagaaaacagggaagcaggagaggaaagcccaggagtggttgtaactcaaagacgggcaccgagcccctgtgtgggggatagggcatgtcctcacagtggtatccaggctctagactgggggcccagatataaaaggggtggcaggtctacccctacatcttgtatgattcatcacatgagggaatcgaggcccaacgagctttaaaagactcacacaaggtcacacaggtagtgagcatggaagctttctctaccacagcgatggcaggtagatttaacttcatgcccaactctgatagattggcaagggctgtcgggagcatcacgtggaggaaagagtctttgatctattagcaatgtctggcacacacttgggaagaggaaatggcagcaagaccaccacatatttactgtaactactaattatttattaaattgttattgagaggctccttcatgtagggcactggtccttatactggagattcagtgataaacaagagcagctcctgctctcaggaagtttccattctagaaggagagacaaacaatatatatgtgaacaaatgactaaataatataatcccagctagtcctaagaagtataaggaaaataaaatagtgcaatgggataggcagtgatggtgtgggagaggagggaggagatcaaggcagccagcaggcaacatttaggctgagacctagatactgagaaggaggcctccttgtgaggatggaggaagagcgtcccagcagagggaacagccaatgcaaagactctccaagagacagagagaccagagttgaggctgtttagagggcaagcaagggggccagtggagagggtgggagcagcgagaaagccagctgcctgctcagtgtgagcatttggatgtctgacaggcctccccaacttagccagtccagcacgacactctcagtcccccctcccaatcacccctgcttcacgcacaacaaaacctgctcctccccaagtctttcccttcccttcccagcaaatgacatctttgcccaccctattgcttggtccactgtgctacaaccctggccacgtcaccatcaactctctcctgcagcctccccctaatcctctacagaagcccccaaagcactcatcaaaccaatcccctcattgcttattgcccaaggctctcttcctcccagttttgtcttttttgcagctgtccctaacccatgaacccacgaacccagggatagatactttatcatctttttaaaaagagaatctgaagttggttatagccatgagagcgctaagcaccaattcaatccacacacattcctctagttgcccccaaacagacagtgtttccagagtggatatgaggactgggtattaatgatcacaggaccatttatcaggctcctgcagtgctcctggctccctggccagagcatcacaatagccctgcagggacggcatgattaccatcccactttcattcatgcggagatttagactcagaaaggttcagcttcttatcagaagtcccagagctggtaaatggctgagccaggatttggacttaggtctctctgacgccaaagcccaagctcttacttctgcatcaagtttcctcctagactcagatgggcaaagaatgatgggctcagaaaaagacacgtcaacctcggtccggatgttccccttttatgccaaaatcaaaggtcagagcctgctccctgggttccttgggacctcagcctcagcctggaaacaggaagggtaggaccttctgcccacctatccccaaagaaatgaggcatcccagctctccttatcttgcctagctttcagtcttcatccttccttctgccccctcccaagtccttcttttgccaggtggtcaccttcttgccctgggctgttatagccagtaccccagtcttctccaggaagcattcccgtgggaaccacagtgccaacatccggtgaggacaggccctccgttacctgctggccctgctgcctctgctatcagacccaagaacaaaggagcttggtgcctgccgcctggctggctgtgtttgtccagggtgaggcctcgcctggcacagatgctgagcaaacagaagtgcggcttcacagatccgccttacaacgagcggggctttaggggatgtgttgctgccaggacacctgctgaaatatctctgtgtccaaccccagccagcactccggggcatgggggactgcagggcaaggggacacatctctgagccttaggcttttcggctctacaatgggagagttgtataagatgatctccaagagcccttctgtggtctggagccctgagtgatgtttctgaaagccc[450 bp omitted]cccagagattctgagttccaagatttgaggtaggaaagggtggcttagaattctgagttttaaacgagtacctaggtcctctgtaggtttctgatgaaatgtatttaaaagctatgaagtcctgggttcaaatcccatctctgccactttttagctatgtgacttgagaaagtcactaagcctttctggatgtcagttttgtctgtaaaatgaggctgtataaaataactttcaataagttcgagttactgttgcagagtgttgattgcactttgtaaatgtttgtggaataaatggggcagaagtccatttgcccaaaccagaaacctactgttctccttgacgtcctcacctaccacatctctccaccaaccaatcacaaattcctgtgaactctacctcctacatacacttcacacctgccagcttctctccctcctcagggccaccacgctagcccaagccaccatcttcccttgcctgcgcactgcacagcaccctcactggtctcctgctgccaccatggcctctgcccatgcatgctccccagagcagccatgatcatccaaggtcatgcccctacttcaaaccctagctctcaggaaggccttatcatgagtccaaaaaaaattccttcttcccccaacacctacttctaagaactcctttcagtccctcttacactcaagctattctgaacttctttcggattcctccagtgaatcagtttcttttgcccctaggtcttcacacaaagagtatttgctcccctcctcactcccccggaacacacaatccgccactcactactcatccttcctatttcagcttgaatgccagttcttcagggccggacactggccgtcgccctcacgtacgctcgaggaactcttcctcctctgcaataaagctccttacactctacagcgatgacttaatcccacgtcctccactgctaagctagtaacacaagcctctgtcttgtccattgcggtagcacccgcaggtactacagtctgacacattgtgggcgctcacaaagatgtgctgaatgaatgactaaatacgcagcccagtgaaagaatgaagaaacgatgaagtcccttgtcacaggatacatcgcggtgggggtccccccaagtagcactaagctacagccacatgagggcgtcgcagggcagacgcgggccacatgggggcgcccccggtccgtcttagctggttggcacctcctcggactcagtttaggttactaatcgccaatgggcgccaggaggcggggttctccctctgatggacagcatcgctccgcccaatctaattcatcttttccttagccccgcccactccggcccctgagaccccgagggtgggcctggcggagacaccgccaactgaactccagctgagtgctctcgaggccgaaccagcgggcctggcggtctgtgagtgggtggccagccgctaggggcggggcctcagcgttgacgggcaggcaggccgtcccacccctctcgcccagagcggccgcgccagcgctggggacagcagaagtgagtacgtgagcggcgcagcaagatcccagctcggaccccggacggcgcgcgcccccgaagccccggatcccagtcgggcccgcagctgaccgccagattactgtgcatcccgaatcacgaccacctgcaccctcctgccccggcccgccccccaagtcctcaggcacccagctccccggcgccccggatcctcctggaccggtccgtccagattcccgcgggaccgacctgtccgcatccccaggaccgccgggctcggtgcaccgcctcggtcccggagccgcccgcctggattgcattccctcctctcctggatctcctgggacccgacgcgagcctgccccggagcccgccgagcgcaccctctctcgggtgcctgcagccccgccggcgcggcccggcccggcgcggcccggctcggctcctagagctgccacggccatggccagagcccgcccgccgccgccgccgtcgccgccgccggggcttctgccgctgctccctccgctgctgctgctgccgctgctgctgctgcccgccggctgccgggcgctggaaggtgagcggcgtcggggggcgcgcccgggaacaaggtgcctggggtcgcggggctgcgggctagcagcgtgggtccgacccggattgagcgcacgtcggaggaggccccgccaccggcgcccgctccggggcccagggatggggtggggaggccgcccctggagccgcctcggaggctggagctggctcggaggcaggcagcccgcgggttggggggtcgcggggagctagactcgggacgaacgtcccccagagtcctggccctgctgtgagctttcgcgggagtcccccacactcacggcagagaagtggggctcccggcaccccccgaagtcgaggacgtgtgggcgaccccccaggcaaggcgagggccgcggggctgtggcgggtgggggcgaagcgggactccccgggttggggggcgctaatgaggagcccgttggagttaactgtgagagtgtgagtgcg

SEQ ID NO: 9717 - DNA, 6000 bp, Homo sapiens
cagaatggaagctgtgttagcaggcatgaaaataacattcatctccttgtatacctccatcagagcttttggataacagatgcattgtcaatgagctgccatattttgaaggaatttttttttttttttttgagaccgagtttcgctctgtcacccaggctggagtgcagtggcgcagtctcggctcactgccagctccgcctcccggattcacaccattctcctgactcagcctcccgagtagctgggaccacaggtgcccgctaccacacctggctaattttttttgtatttttagtagagacgggtttcaccgtgttagccaggatggtctcgatctcctgacctcgtgatccacccgccttggcctcccaaagtgctgggattacaggcgtgagccaccgcgcccgcccggaattttattttttaaagcagcagatctcaccagtgggcttaagatattcagtaaatcatgctgtaaacagatgtgctatcatccaggcttttttgttccacttataaagcacaggcagagtagatttaacgtaattcttaaggaccctaggattttcagaatggcaaataagcactggcttcaagttaaagttaccagttgcattagaccctaacgagaatcagcaggtcctttggagctttgaagccagacactgacttctcctctttagctatgaaagtcctaaatggcatcttcttaaaataggaggctgttttattgaaaatctgttgttgtttaatgtggccaccttcatcaataatcttagctggatcttctggataacttgctacagcttcttcatcagtacttgctgcttgaccttgcacttttatgttatagagaaggcttctttccttaaacctcatgaattaacttctgctggcttccaacttttcttctgaagcttcttcacctctcttagccttcacagaattgaagagagttagggccttgctctggattatgctttggcttaagggaatgttgtggctggtttgatcttctatccagatcaatagaactttctctatatcatcaataaagctgttttgctttcttatcattcgtgtgttcacttaagtagcacttttaatttccttcacatttacaacttgactaactatatggcacaagaggcctaatttttggcccatcttggctatctatatgtcttcctcactaagctttaccatttctagcttttggtttaaagtgagagacatgtgactcttcacttcaacacttagaggccattgtaggattattaatttgtctaatttcaatattgttttgtttcagaatagggaggccctaggagagggacagagatgggggaaagtcccattgatgaaataaaatatacacaatatttatcaattaaatttgctgtcttaatggcatggttgatggtgacccaaaacaattacaatagtaacactaaagatcactgatcacagatcactgtaacagacataataataatgaaaagtttgaaatactgcaagaattatcaaaacgtgacagagatatgctgttagaaaaatggcactgacagacttactctacacaaaattgctataaaccttcaatttgttaaaaatgcaatatctgagcagcacaagaaagtggtgcacaatacaatgaggtatgcctgcactgaacgtgtgtccatcccctcagggtgtgtacagtgtgtagatatgaacacaagctgctagagcgattttgccatctcaaggaaagctggccgtaagtggaagcagatgctactgaaggcagagcaagacagaaacaaatatgggtcctggatgatatcgtcgagttgctgaggcaaccaaccctgatgcctgtcataatactccagttatagaagtcaagatatgcccttattgtttaagccaatttgtgttgcattttgtggaagatgcaaagatacgctgcccagattccctttcaaggaagcacttgctgcccaggtgcagggaatgcggttagcaggcagcccccagctattttcttcagggtctgcttctgctgcagaaggccaccttgcttgagattacaccctttctagggcagacagcatctagcataaggggctggctattttagcctgacaacgatactcttgatgggcaatacttactctaaagctccctcccaggatggctgaggatttgctggacctgaatagcagttcaactacttcctctgaacaatcctgcttccactccattcctaacaaaaatcttctcatctccaatctggaatactcaatctgtgacaagttttctgtaacatcaggcaaaaacatcctgagattcagtgggctagtttgaattcaatcttgtctatagaaagagaaatgcactcatgatctcttatttttgactttgtgttaaggaagatttccagcatgcacaaaaagagagacaagaatataatgaaacaacaatatcaatatatgaccaatagttatcatctgataccctcgtgtattattttaaaataagtcctagacatattattccatccaaaaataccatagtgcaccaatgtttactttgagatgcaatacaatgtcttcttctccgttctcctcctaatccaactcctctttatgttatctcatcttttcttcctctttccaccaccatagctttaaaaagaggaactgttttaatagaaggggcaggggtggcagtagtaagggatagatggcccagaacaaatactggaatcctttcattcattcaacattcaacattcattcattcaacattctagagagtatcctctctcaaagtcttgggatactcaatcatcactagtataggcagttgttcagataggtggtactggacaatgacgtttttgtttagccagaaggaagcaaggaaaagagtcccttaacacctgccatctagtggtcacagtgataagtaacatgcatgttttctactaaacagattaatacatggtttgttctatggaacaaacaggaaattaaggccagaggggtaaagtgatttaaggtcatatggctagttaatagcagggcttggcatagaacccaaacaagttgactttaagacctgcgtaaattgtgattgtttgaaacgtaaatatgtcattcaaatgattttaaatttgattaaagtatcatcctgttttgtatttagttgtattaagttatagtatattagtatcaaaggagaaaaagtgccattggttgaatgagggaacaagatgggcctatgagataatattaacattgaattattttccattacatggtcccactaccaacatttccataataataataataataatgcctatgctagctctgtcatattcctaaacaaaggttgaatagttattaagagaaattgcttccaattaaactaaatgcaattatgccacatcattgaccgtacattcagagtctatgttaccttctggagtttgttggatctgttacttattcctgtccagccagttaaaattgaaggtagagctcacaggagctgatactttactctttatttctgggtaaatataagaagtttgccaggggaacggaaatactgtgtttcaaatgaatgcaatggccacaccaaacattcagatgttcatcacaattaggcggcatctaggttacattgcccttgtctctccaggactgggattttcctaatccttttcacttgagagggaaggatttaaaagtgaatctacccttaccttattaacattttgaggcagattttgggaatgggagaggtggcaagcattttgagactctacttttggtgctagcattgaaactcattgtgtgacatttagacgcttctttggatccaattttccttacctgtaacagcaagaggttgactaagtgattgcctctaaaagttcctttcagttctgtcattctgcgaaatttttgggcaaagataaatcttcagctcagctggtcccttctgctttttcctgggttgacttccttcctcccactatcatttattgagtatctccacgttcttgagggtagggcctgggttttattcaactttcccccattaactagcacaataactaagcaggttatttccagcagggttaaagttgttttctatataagattccaactttgtctggaggggctcacagttccgaagagggtgccaggcatcatcaattaattaaaagccgagtatccataaacataaaaaaaagtaggggggacataaagggtagcaggaaatctggttccagttgtccttaagcacaggtatgttccaacagggaataagagtgcatagtagtgcaaaaagtaatggttaacactcatcgaatgctttcaatatgccagtgctttccacgtattatctcaagtaatacaatcgtcctattttctaggtactagtattatgtttcacacttgaagtgggcacagagaggttaagtatcatgcccaggtaacactgttagaagtgagaggcagcacttgaaaccagatagcacaacctcactgcctgcactcttagcactccactaggtagataaataagaaaaatcatagtaacaatcatgatttctccaagaggccaggtgaatttgaccagtgatgagtccaagctacagaaggagcagagggaagtggctgccgaaaagaaggctaaagaagtttgcaaaaagataacatgcacttttccaggctagatacacaggcggagaagcaaaccggcgaaataaaatccgacaagcaagatctggagcgcatcaggatgccaggtgaactcaaagacaggtcggaagtgacgtcactagccgagtcgggcgctcagcgggactgcgggtccggtggaattccggccggacgtggcgcacaggaagttacgcacgggaggcggtacctggttgtggagggtgacgccatgggtggggcggagcgtctgggatgcgctgggagcctaggatccccgacaggtaacctgcgggcggatctgaacggggggcgagggtggcagctggagttgatggcctagatcgctcggggccctaagcgcgggtggacacaggttaggtaatggacagcattaggtggcggctgaagaaaaggctccttggcattagactctctgaggggttgaggatatggagaactcttgggaacttggtcttggggcccgaagtcgtcgaggaaatacagacaggttgagtcttctaggaatcagacatggctgggggtcatgggtttccgatcactggcgcttatgttggagagacggagcctggggcactgagatgagttgacctagggttcacctaccccgacctgttctgctaataggggacagggacctcgactttttgtctcttaactcgtagcatagtgccttgcgacaagtaggcatgctttagatgttgtcgaaggaatgaatgaatgaatgaatgaatgaaccaaccaacctgtttctggcttcccggcagaacctctcccaaatttcagtattctaacctctgaatgtagaaatgactccagtttagtttgctaaccaggggtttatgaggatgctggtgcaggagatacccagtacattgttggtttttgttagttttgttttttatggttattgaaattcagaaatgtgtcttagtattcttatccgggtggagaggatgagtcatttactttggcttctttcaggttcctttacttttctgggaagaacttgtagggaaatgataccagggaggagttggaccgttgtaaataaactgctgttgtagcactgactgttcttaatgctttcttttaagcaaagtaaacttactttcctttttctttctttctttctttttttttttttttttttctgagacggagtctcgctctgtcgccaggctgaagtacagtggcgatctcggctcactgcaacctccgaccccctggttcaagtgattctcctccctca

SEQ ID NO: 9718 - DNA, 6000 bp, Homo sapiens
tgtagtgcttaacatctacttcaaaaagttagaaagatctcaaattaacaacctaatattgcacccagaggaactagaaaaaaaatttaccccaaagctggcagaaaaagaaaaaaataactaaaatccagagcaaaactgaacaaaattgagactcaaaaatccatacaaagaatcaacagaaccaaaagttggttctttgaaaggataaacaagtttggtaaaccattagctagattaacaaagaagaaaagagagaagatacaaataatcacaaccagaaatgacaaatatgacattacaactaatcccacagaaatatgaaagatctttggagactattaatacctctgttcacacaaagtagaaaatctagaagaaatggacaaattcctggaaactcacaatctttcaagattgaatcaggaagaaattgaaacctgaacagaccaatatcaagttctgaaattgagtcagtaataaaaaacttaccaccaaaaaaagccctggaccagataaattcacagccaaattctatcagacatacaaaaaagagctggtaccagtcctactgaaattattccaaaaaagtgaggcagacagatccctctctaactcattctatgaagccagcattaccctgataccaaaacctggcaaagacacagtaaaaaaagaaaaccgcaggccaatatccctgatgaaaataaatgcaaaaatcctcaacaaaacactagcataccgaatccagcagcacatcaaaaattatttcactgtgatcaagtaggcttcattcctgggatggaaggttggttctacacagacacattaataaatgtgattcacctcataaacagaattaaaaacaaaagccatatgatcatctcaatagatgcagaaaaagattttgataaaatccaaaatcctttcatcaaaaaagccttcaagaaactaggcatcaaaggcacatacctcaaaataataagaatcatctataacaaatccacagccaatatcatactgaatgggtaaaaactggaagcattctccttgagaactgaaacaagacaaggatgcccactctcaccacttctattcaacatagtattggaagtgctgtccagagcaatcaaacaagaaaaagaaataaaaggcatccaaataggaaaagaagtcaaactgtctctctttgctgacaatatgattctatacctagaaaactataaagacactgccaaaaggcttctggaactaataaacaacttcagcaaagtttcaggatacaaaaccagtgtataaaaattcatggcatttccataaccagtaattttcaagctgagagtcaaatcaacaacacaatctcatttataatagtcgcaacaaaattttaaatacctaggaatacatctaatcaaataagtgaaatatctctccaaggagaactacaaaactttgctgaaagaagtcatggatgacacaaactaatggaaaaacatttcgtgttcatggattaaaagaatcaatatcattaaaacagccacactgcccaaagcaatctgtagattcaacactgttcctatcaaactaccaatgtcatttttcacagaactagaaaaaacctatcctaaaattcatgtgtaaccaaaaaagagtacaaataactaaagcaatcctaagcaaaaagaacaaactcagaggcattccagtacctgacttagaactgcactgtaaggctacagtaaccaaaacagcatggtactggtaccaaaacagacacatagactaatggagcagaatagtgaacccagaaataaagccacatacctataatcatctgatctttaacacagtcaacaaaaataagcaacgggggaaagaactccctattcaataaatgatgctggaataactggctagccatatgcagaagaatgaaactagatcccttccttataccatatacaaaaattaactcaagatcaattaaagatttaaatgtgagacctcaaactataagaatcctggaagaaaacctaggaaacaccattctggacatcaaccttgggaaaggatttatgacaaagtacttaaaagcaactgcaacagaaacaaaaattgacaagtgggatctaattaaactaaagagcttttgtgcagcaaaagaaactatcaacagaataaacagacaacctacagaatggaagaaaatatttgcaagctatgcatctgacaaagatctaatatccagaatctataagaaacttaaacaattgaacaagcaaaaaacaaataacaacattaaaatgtgagcaaaagatatgaacagacaattctcaaaagatgcatataagctgccaacaaacatgaaaaatgctcagtatcactaattattagagaaaagcaaacaaaagcacagtgagataccccctcacgtcagtcagaatggctattattaagtcaaaaaacaccagatgctagggaggctgcagggaaaagggaacacctacacactgttgttgagaatgttaattagttcagccaccatgaaaagcaatttggagatttctcagaaaacttgaaaacagaactactattcaactcagcaatcacattactgggtatatatccaaaaggaaataaatgtttctaccaaaaagagacatgcacttgtgtgtttattgcagcactattcacaatagcaaagaatggaatcagcctaggtgcccatcagtggtggactggataaagaaaatatggtacatatacactgtggaatagtacacagccatgaaaaagaacaaagccatgccctttgcagcaacatggatgcagctggaagccattatcctaagcaaattaataatgcaggaacagaaaaccaaatgccatatgttgtcacttataagtgggaactaaacaatgaatgctgatagacataaagatggcaataataaacactggggactacaagacggggaaggctggggaaagagctaaaaaatgaattattcagtacctgcatggcaggatcaatcataccccaagcctcagcattgtgcaatataccaggtaacaagcctgcatacataccccctgaatctaacatataaattaaaattattttttaaaaaaacccttttcttctttgtgtgcgtattgctttatagaactcatattctttatctcattaatcctctttcatttgtcatcagaactatgtaatgtagagaatcattttacatgtggggaaactggagtatgtaatcttttgaattatttatgaattatttatttattcactcttatttcctagaagtacagtagcctggtccatggtcagaagctcttaattctatggcctgaatacattctagaaaggttacattaatttatatgatcctttgaatatatatcgatttaattataatctgtccagcaatgagtattatcatgtagaaaactgcggacgaatgtaaattctataaactagtttctcagtattctagttgcccctcttgggtttctctcatgattaaccataactttatatgcttgttaattgtgctttttattttgtgattagtctgttcatgttgattacctctttattttgggagacttttattatattaaccctttttatattttgacttttcctttttattgtagttacagtatttttcattgtatagatgttgaaattttcttgcaactgaatgtattaaacttttcctttgctattttcctacatcgcatcaaaagaagaaagagctgacaggtatatatttatatttttagctgttttttgttggtttgtttagagacaggttcactctgtcacctaggctggagtgcagtggcgctcatagctcactgcagcctctaactcctgggctcaaatgatcctccctcctcaacctcctgagtaactgggactacaggcatgcacgcctggcttatttttagctttttaaaattacatttttatacttttgtacattttttcaaagtcaaagaataatggatgtacattttagaaattttggaatatatgtaaaattataaaagatgaaaacatctattattaccattctgggtgtacttttttctagtactttttcctagtactttttcacgtttttttaaatgtattttttttctgaatttggatagtgtttaccgttttataacgtattttttcagttacaattatactgattgaactttcacatattattaaatattctttgaaaataaataattttttgaaaatctgtatgaagtttatttcaggatggacctaattactccctgtttacctccaagccagcaattaaacaacctgttcttcccaggttggtccatggtggccgctttagctttctagcccattcttatctggtgtcaagtctatttctttttttttttttttttttttcttttgagacagagtctctctctgttgcccaggctggagtgcagtggcgtgatctcggctcactgcaacctccgcctcccgggttcaagcaattctcctgcctcagcctcccttgtagctgggactaccggtgtgcgccatcatgcctggctaattttttttttgtattttagtagagatggagtttcaccgtgttagccaagatggtcttgatctcctgtcctcatgatcctgatccgcctgcctcggcctcccaaagtgctgggattacaggtgtgagccaccacacccggctagtgtcaagtctatttctaggctatctgtgctgttcacagatccagagcattgcacctttaataggcttttctctctctctttttcctgagccctggaggcttcctggattgagacctagcctaggtctgcataagcacctttccatcttgttaatgtttaacactgcctctgctggaaaacagctctcacctcctctctttctgtctcttattttttgcctttgcagatgagttttgatcatcctgagaaaaatgggccttggcctgcagacccaataaaccttccctcccatggataatagtgctaattcctgaggacctgaagggcctgccgcccctgggggattagccagaagcaggtaaggaacacacagaggcatgggctagcaaaggggtacattcctgagtaaaagctggtgtggcagatgtcctggcagggaatctcaggatctcagtatctggctccagctttgctgttttctttttgtatgtattttttagtcctctttaactgctgattcaatgtgggtttcattggggggtgtagagaaatggcttgtccatttctattaactatataagatttaagttattctgtatttcagtcaaccattctgagtacctactacctgccacgaatgcaactggtactgagtatgtcatgacgggtgggtcgggacaggatttccttgctttgagcattgatttctgccggttcagtgttggccagttctttgaaggtgatgatgcaagtcgctgtgttcttcctctagaagcctcgtgatgattgtaaagattctctgatacaattgcatcagttcaataatctttcattgagtatccgctctggtccaggcactgtgctgggtactagggtttcagaaaggataccaggaggagttttccttgagcagcaaagtcaggcatgaaaagcaagcattacaaagcactggctggcagcaaaggggagcagggatagtgcggaaggggaggtggcctccactgaccttcagaagcagaaaggtgatgctgtcagagctggcaggcacatggacaaggagaaagagtgcagcagtgcagacacctggaggcttaacacagtctggtgtaattggaaaattcaaagcttagtgtgtttttccaaaacatttgtagagaaaagtttgctactcttttccctcggttgcgccatttagagaaagtttcttcagcctctgccttcttcagacaatttgagagatgagaaagggtcttgcagttataagt

SEQ ID NO: 9719 - DNA, 6000 bp, Homo sapiens
atcaccagaagagcaagggggaaatccaccactataatccaatcacctcccaccaggaccctcttccaacattggggattacaattcaacatgagatttgggtggggacacaaatccaaaccatatcaggcacttagcagtggatttagagaattccttatataccattgtgatattccatatagcattgcttctgactggcaactcatttcaaagtaaaggaaatctggcaatgagctcacactcatgaaattcattagtcttaactatatcacccataatcctgaagtagttggcctgattgaacaatgtggtggtctttggaagactcagttatagaatcagctgggggacaggaccttgcagggctaggataatgttctccaggatgtggtacatgctcagaattagcaaccatgatgatatagtgcttagttccaagaattaaagggtagaatggactggctttctcaaaattagccctaatggtaaactagttttttttcccttttctttctgtacccataactttgatctctgctattttagaaatcttagtacccaaggaaaaaaaatgttgccattagagaagaaaattaaaaattcctttaaagttgagactactacatgggctcttaatatcattaaatcaacagatggaggggcttactgttctggtccagcaatgttggggcattctggaaggaaagagtctttgttttgggactgtgaggcacatttagatctttggtacagggtaccagtagaaacttccagtcatgggtccagccctaaaacacacccctccttcttctcaaatgccatttagggatagaaaattgtgcatagttgagaatttttcatgagtgcatcatttcaagaaaaaaaattagaggcttgttttttcttttcattgctctattttctagttgggaacttaatttaaagcattttatccacttaaaacatgatcacaaactttaagaaattgaccagggtgaggccaacagctttagagatgtctgaattggccttctctaaattgtagattccatggtgttagaggtcatttgatagagagcaagttgcaataccacagtatttttttctgtcttgatagaaatttttattagagaaaatactctgctatccagaaggatgcattatattggcctctgcacagcaagcttgggttctaaataaaacttaatttgtgccaatggggattgcatcagctggttacacacacacacacactcacacacacacacacacacacccctctggtgattcttactttctgtcttctgtcatcatagtgtttattgtagcaacacctgcaaaatacttctagaggatttgttctgggtagcactgtttgttataagctcctctcagcttcacgtattttctgggaaggtccacagcccccattctcattttggccagtaactcccacctgaggcagttcccatcatatctgtgaggtttgttaaacgagtttacttatttaggtgttggttgccttaattcagaggtaagaatactgacttgaaggactgaaagtttaatgaagggtcctgaagaacttaagagtttttcccaatgccggccaggtgagatggcgcatgcctgtgatcttagcactttgggaggtggaggcaggaggtttgcttgagcccaggagtttgggaccagcctgggcaacacagcaagaccccgtctctacataaaaaatgggttttccaatgttaatgttcagtggcttgatatatttaatttctgtccttcttgctgtgttcagtacaaatctagtagagaagcacctccccagagatcgtcaactatatagcaggccccaggaaacagagcctggctccaggcattacctgccatgcctctttagaagcttccctcttccaaccagtggcctccatcctacctcctgccctcccaggattcagttttctaagtataaagctgtttgaaaccatacatgactgaagttagaggggagcttacctttgtcatctaccctaattcttcattgaacagatggacaaactgaggccaagggaaattagtggcttgcccaaggtcacaatgtcagccaggagcagagctgggctatgtgtctcctgactcccagttcagtgctctctccattgagccaagatgcctggcatcaaatgattgaggctttacagggttgctgtgcctagagatgactttctgtaccatattttctttggtaagatttcaagctaaatatctctctcagctctaaaatatttataccgagtatcaggggtctgtggacaccattgcttcattaagtttggcagtagaggcagcatccccagcagtagcagggagcctggtgggtcaagtacaactcacccctcttctggggagatgtggcctcagtgtgggggggccccagtgaaccatttgctgaaatgatataaacttcatttgcaattcttggggtctgtaacggccacgtgagtgatgaagaaacacacatttaattagcagatgttatgttctagattccacgctgagcatcacaatggctaaagctggggctttgtagacagtcatataggtttaagtcccagttcaactagttattagctgttaaatcttgtgcaagttatctaacctctagactttagctcacatatctgtaaaatggagctgctgctgctgttacctacctgtcaagtttgttattgaatgaaataaattaatatttataaagcaccagaacaatgctttctaagcacttaccaggtaagtgctgtatagtgattgctatatagtaagtgctatatggtgattgctgttactatgcaaattaaaattatattcacataaaacattaacacgtattttttactaggatgaaaagatacagattatatacattagaattgctacctatgagtctatatggaaatttttttttttttgtaaaagcagccaggcacggtgactcatgcctgtaatcccagcacttggggatgctaaggtaggcagatcacctgaggtcaggagtttgagaccagcctggccaacatggtgaaatcccatctctacggaaaatacaaaatcagccaggtgtggtgacgcatgcctgtaatccctgttacttgggaggctgaggcaagagaatcacttgaacttgggaggtggaggttgcagtgagtcgagattgtgccattgcactccagcctgggcaacagagcgagactctgtaacaacaacaacaacaacaacaacaccacaaccaggcaagccattctaaagcccctgcttttaatcacagcagatactgttttgttattatcccactgagaagatgaataaactgaggttaaaatagtgtaaatcaaggcatcaaacatccatgaagcggcaggagaagcacttggaagatggtttctggtatcagatgggtgattttaagtccctctttttcatcactaaacttcaagatctgctggctgtccaaaattcatactgtttgaagagcctgctcagattctgctagccacaccaagcttttggagagagtggagtcaagagacgtgttttccaattgtaggaagtgttgtttctaatgcatgcgatgagcttcgtcaacaagtttatacaaatagatgggaagagtgtaatgtgagaaactgaaataaaaccaaaatgccctaaaagacaggattggctaaataaattatgcctatccatataacagaatataggtagcccataatgtactactacggaatatgacctagaaaaatattcatgacgtattattttttgaaaatgtcacaatgtggtatatagaatgtatgtggtgtacagaatgtgtgtgtatatacacacacatacacttgtacatgtacagaaaaatggtaagcgggatgtacatatcgtaatgttaacagtagtcatctcgggtggggttttatggaagagtcttacttctcttttctttcatctatattttgtattttttctagaataaacccatatgattttttaaaaggaaaaataatttattaaaaatagcagcagaggcatgtatagtaaaggctgttttgcctgtgggtggtgctcctcttctgcgcttctataatcagcttggaaataatcttgtctgctcctgcctggctgatgcaatgctcctacctttgtgcacaggtggctgttcttgcacaaggccattgcagcatggatcctattgcacagttattcagtacacagtcagctacaagcactgacatagagcttggcacatgtctgcaaaccctacccacatgctcggatatgtttgaaatgaatgaattaatgaaccggtctggggtcaacagcttgaatttgtatacaggctccgccatttataggctaggtgagtcctaggctcctgatctgtactgcagcaatagtaatcataacttaagagacctccaattgtgttttgaaaatggcaaagtgctggtcacaagatggctggggaagccgagagagagtttattattattgctccatctactaacaaatttacatctccccatccctcatttctccttggctgcctaaggcatcatggttaccgtagcagccagatgctgatgatgcctccaggggacggcaaggtgaaactgagccagttcccagtcctcacctccccatactctttccaggccagggtgagatggtctgaagctcaatctctggtcaggtcccccactctgtcttggatcatttagacccacaaactctgcctctgcaatctcagttcagggccttgaaacacctcttcagagactccctcctccccaagctctgtcttctggcaacctgcctggttgccgtggaaacaggttccactgcggacaaaggagggagctgggtcctgcttcctcctggtcttgtcgatgaggatttttagaccgtggagactgcgctgccctgccctgcacctaccctcactctccgtgttctcactaaggtggaaattgccttccctcactactgacgagaccatgtgtaaaagcgtgaccacagatgagtggaagaaagtcttctatgagaagatggaggaggcaaagccggctgacagctgggacctcatcatagaccccaacctcaagcacaatgtgctgagccctggttggaagcagtacctggaattgcatgcttcaggcaggtgagtagcccaggaaggtggatccctgcaggccgcctctaggtccctagctctggggcaccttccaaggagaggaagattacgtagaacccaagtgtttagcttcaatctcactattaggctggcgtagactggaagtcagagaaagagtccctaactgggaactacgacacttgagttggatttcagctcttctactgatcacctgtgttactcttcctctctgagtcacaatttttccgtctggaaaataaagacatagaatatacgtatgagtcctacacactgacattttacatattttctattttaacagtctcttaaaaagtagtttaaaaccagagaagaagggtttgaggcccactgggggtcgagacgtccgtgctctggtcctgggaccggtttaaatctatttaactcaacttaatttcacttaaaatattgaatacatgagatgtgccagaaactggctctatcattggctccatggctgttgaggaactcgattttcttcttggacctggctttctccttttgcacagtgagaggttagcctgtggtccacagagcagcaggatcggcatcacctggaatttgttaagaaagcagaatcttgggccccttttagatctgaatcagaatctgatttcaagaagagttctaggtgattagtatgtaaaaactatctgagatgaatttctagcactcttgttcatgggtccagagtgtaggggcttacctttgagacataagatggggaggctgagtggtgcagcctggaa

SEQ ID NO: 9720 - DNA, 6000 bp, Homo sapiens
agtagcagttggctctgggtgtcacacttcattttacttcttgtttcaccttttacagagcagttggccaccaagacagaggttggacaagtgtcctggggtaagagctggccttgccagccaagtgccatagacgttcatctctttcagtcagatacccaccaattcttatcactcttgtctagcctcctttcttcccaagcctaaaatgtccccaagaagaacatatttctatgtgttaagttttgtgctagccctatttgtgatgggtcatatgatattccaaaaatgggtacatgcctaaggttccaaaaactgaacttaagccttgattaacccaaatctatcttgacttcagtttttgtaatttgttggactattgcagaaatggcaaaaatgtttcatataccaatcagtttctagtggctgcctagaaagctgtgatgagggaaattcttaagtaacacccagaccccgagggaaaggtgagaaggttgattggcaatgtctgtcttacacaagaaaaggggagagacattgtttgccatcccaggattataagaccttgtagattcatttcagctctgaacggttaagaatctaaattttgctatgccccgcttcttcagaattcatcagtttttttttttttccagctgtctcttagcagttgtttaaccaatctgggataaaccgtcaacagttgaaagctcgaaggttgcaactatcacatcgcattccttgggtaagtcattttcttcactgggtctcagtgaaattggaggggctgtcacaagatatctaaggtctctttcaatgaccaagtcccacaattctattattctggagttacaatgccttggtgaaaacaaacaaacaaacaaacaaaccacccaccaagtggcttaagtacactgtagggttgcagaaggggctgtattttcttcttttccttctctttctttttccgttccttcttggtaatgaggaaggtaggtagtgggcttcatccagccctcaaatctcaaagtgatactgtaaaatatatatttgatcattgactccatttcctggcatacaactcttaaaatccttagaatctctgaagagatctttttgtatgctaatgaaatgacaggtggccggcagctcctaggtcgcttcaggatgagagctggtcgccagaaagttccaggcagaattagagtgttgggactttcagtctcatcccctaatctctaaggctgaagactaagttcatcaccagtggtcatagtttaatcaatcatgcctgcgtaatgaagtctccataaaagctccaaatggacagggttcagacagcttcaggatagcccaacacaaggaggctcctggaggatagtgtgcccagggtgggcttccatgccccttcccatacctttccgtatgcatctcttcatctgtatcgcctttaatacctttataataaactggcacacataagtaagtgttcttctgagttccatgagccactccagcaaattaatcgaacttaaggagggaatcctaatgtataaccagttggtcagaagcacaggtaaaataacatggggctttcaactggccccaagccccagcctgaagttgtaggggaacagtcttgtggactgggccctccacccttgggatctcatgctgggttggggtagatagtattagaactgaattgaataagaggtcatctagttggtgtcctctgcagaattaagtgactgcttgcttggtgaggaaactccccacatattaggttagaagtcttttgtgttgattgctactgagtgacagaatagaaaaagcactttgagtgtgtttcttcaacacatgttacccttaatcttcctgctgaacccccatgcaaaggaccaggctgacctgaacaattgggtatatcaaagggcacacatgaagaagaggcagaaggaaatcatgaaggcatgcaatgcgccggatcaagctaccttttgggaaaaacagagcatttgaggtgtcaggggtaaggggactctctgaaggtacactctgaagatacagaataagtagagtggacttgggatcctaaacccagcggaaagtgaagagaaagggtagagaaatgatttatgcatgggtggagcaagagagcagaacttgaagccaggccctgtattggcactaatttgctgtgtgaccttaggcaagagaccttattcctctgggtctcagttttcttttctcttttttttttttttttttttgagacggagttatgctcttgtcactcaggctggagcgcaatggcatgacctcggctaactgcaacctctgcctcctgggttcaggcaattcccctgccctggcctcccaagtagctgggattacaggcatgcgccatcatgcctggctgactttgtaatttttaaagtagagatggggtttcatcatgttggtcaggtggtctcaaactcctgacctcaagtgatctaccctccttggcctcccgaagtgctgagatcacaggcgtgagccacggtgcccagcctcagttttctcgtgtataaaaattaaagggaaaagggataagttgatttctaagggttttcccaactctaacatcctgtggatccaattacaagttcttagagcttcctatatcatgtgtatagacacaggtatccaggaagggaaggaaagagagagggtgtctctgagtcgctgacagggcacatggaagcctagaaaacccaggaagactgaggctgatcctgtctcagacacagaagctgtagcgggtgttctaaagacctaagtaagcatcctgcttgtcctatctcccctatttgaatttaagccccaggaggacaaagcttactctctggaatctccgcgttttagacttacaagtgtctttaaaggtcatctcatctcaatcccttaccccaaaatgggaattctctgtatcctaccactgaaagacggcccccacacctgtgcgtatttgcccttccacataatttacagagtggagggcagagtttgataatcccttcatgcagctgacctcctgcctcaggacccaggaaatctccctacggttcctctgacactggctccagtgtgccagcctggaacctgaaatgccattctcagcttctcttcagggagtgaggtgggcggacacatggcaggttttggagtcacacagacccgggttcaagtctcacttccactgctcgttaactgaggggatttggacaaagtaccccagctttctgtgcagttaacctgcaaaactccaagaataatccttcgcgggactggtgaggatacatggggtgtaggagatgagcattaaacacgtgctcccctacgctgctcctaacctccctgtctccacctgggtgtgagcatctgtgggggcaggaattgtttcttagctacaggatactcttttcccagtgccaaaaacagtgcttttgtgtccggaattggtgggttcttggtctcactgacttcaaaaatgaagccaccgaccctcatggtgagtgttacagctcataaaggcacagtgcccagagtttgttccttctgatgttcggatgtgttctgagtttcttccttctggtgggtttattgtcttgctggctcaagagtgaagctgcagaccttccgggtgagtgttaacagctgataaaggcagagcagacccaaacactgcgcagcagcaagattcattgcaaaaaccaaaagaacaaatcttccaccacgtggaaggggacccgagccggttgtcagtgctggctggggcagcctgcttttattctcttatctggccccacccacatcctgcagattggtccattttacagagagccaattggtctgttttacagagagctgattggtccgttttgacagggtgctgattggtgcatccacaaaccctgagctagacacagggtgctgattggtgcatttacaaaccttgagctagatacagagtgcccattggtgtattcacaatcccttagctagacataaaggttctccaagtccccactagactcaggagcccagctggcttcacccagtggatcccgccccgggggcagcaggtggagctgcctgccagtcctgcgtgtgtgcccgcacttctctgcccttgggcggtcgatgggaccaggcaccatggagcagggggtggcactcgtcggggaggcttgggccatgcaggagcccagggtggggagactcaggcatggcgggctgcaggtcccgagccctgccccacagagaggcagctaaggcccagcgagaaatcgagctcagtgccggtgggccggcactgctgggggacctggcgcaccctccgcagctgctggcccaggtgctaagcacttcactgcccagggctgggggcctgccggccgctccgagtgcagggcccgccaagcccacgcccacccagaactctagctggcctgcaagccctgcatgcagccccggttcctgcccgtgcctctccctccacatctcccagcaggctgagggagccggttctggctttggcctacccaggaaggggctcccacagtgcagtggctggctgaagggctcctccagcgcggccagagtgggcaccgaggccgaggaggctccgagagcgagcgagggctgcgagggctaccagcatgctgtcacctctcactttgcctattataaaaaatgagagagagaaaataaaagcgaatttatatgtgaccccagaatctagaacagagctctttatctctctctcagcaaggcctattaactaacacagttttgctgctgtctgttttcagaacaaagacttgttctgtgtactcagacagtctaaaatgaaggttgaaaaaaacagctcatgtccatacacagaaacagaaactgaaccgaacaccgaaactgaaactgtttgtctcttcctgagaaacgagcaaacctgaaagctactctctcagcttcagagggaaaaaatggttgtagatttctggacttgggagcagacatttcaagaactaatccaagaggcaaaaccccgggccacatggacgctgaagttggatggcaaccttcagctagactgcctggctcaagggtggaagcaataccaacagagagcatttggctggtgagtgtgggtttcccaggcaatagctcttctgagaagagaggctcaggctcagcttagcatgatttattcctctgagagcttgttgaaggagtaaatgtcaccagggcctccatcctattgtggtcatagtactctttagggtcgacatgataagacgactccaaacctccattttgtttaactgctggaagtttcttcttttactaggtttccctccgtaaatatttctggaaaaccctggagaaggctccctattccataaattttcccttctagtttctcaccacgtcatttgttccagactacctctagagtcttttgcagtctccccagcagtcctgaccagcttcccccagctgcaccagctctccaagccttggcactgttcagtacaagcctgggacggagccttttttttttttttaaatatcttaagaattggctaagatcaagcagttactctgaacattgctttactgaaggcctggggataatagtatagaatgatgttgcaaaaactaaatctaaaacccagttcatggagtcaccaagtaatactcctcccttactcaccacttccctctttaacccccagcaagcctccaggttgcaggaaccagtttccttgaccatgttaggagggtgagaattgctgacctggataatcaaatttatttttaaatgacacacaggaccttcggtatagttttcatctgacctattactcagcttgcctgcctgccccatcctgcctcaggtatggcctactccattccttatggactattagctatgccatgcatcttcagact

SEQ ID NO: 9721 - DNA, 6000 bp, Homo sapiens
cccaagaaaggagttagagtttaggagataatttttggagggagctattgatatgtactgagtaccacttttatgtcaccacggagggggcagacactgggagttcttgaatctcactttaagcctaaagaacaaggcttcagttcatctgctctgaacacttggtgtttgctccctggatctagagaaacacggtaaacctgtgcacttctccagctaagaaatctaaggaacaaaagttctagcagacacattgcctacatgatggaagatgactgcatgatggaggagtggctataaagagatttggcctatgtacaggggtacagatactcatatcactggaaggaagcggtatctttgtgctttgaaatgactaaaatacattatattacctgaaacattacctgaaaatgacataaatgtcatagaacttgccctatattttattcaagggtcaggggaagaataggcccaaaccaaatggatttgaaagcaccataggagacaaaaatgaaattgttttatgactacactttttctttcctttgttttcaacttagtaagttgttttatatatagatatagatatacatacacacacatacatgtgtgtacacacaaacatacatacatatgtatatgcatggcacatatataaaacagcaaacttataaaaatcatactaactacaatttattgcttatttattgagttctatgcacttcattaagacctttacaaacgttattcatttttcacagccattttatgggacaaaattcataattctcattttattgacaagaaggcagcctcagaaatgttaactagcttgctcaagatctgtcatatataaatgggcttagcctaaactcgagtcagcctgactatgaggtccaagcttttaaccaccgctttttttatattagttatagctagcatggcctttcagaacagcaactgattttattgtttagatttttccaatatgcactggaaatttcaaagggagttagaagactatttataggatatggtataagtcagtttactccttctaataactcttattatcctaataaatatagagggaacattttgtgacattaatggaaacaacagaactaacacaaaaatatgctgttcttgacacaagagcttgctgttctgtttaactgaaaatgcaaggctgcttccacctgcagaccaaaaggacaactgcaatacttccagttctacaattacttcctttaatagaccaacagccacggtgctagattaagggtgtcactcaactgatcgccaggtggctctaaagcctcatccaggagtagtgcaagcactgggtgagtaggaacatggtgcataatgaattgaccaaactgttggtcttagagatcttgcaaaatcaatagccctggagctgcaaagatgattaggacacttttgccagcctagtatccatcctggaggaccctgaatgtttcagaaggggaaagtccaatattactccctcttctgtaaaatgtgggggctctgagaattaaattattacacatttgctgagagcctaccatatgccaggtagaattttaagcatgtgggatgcactggtgaacgaaagatgtctgtcttcacagagcttagatgagataatatatctgaaaatattttgtaaaccttattgagcaacacacagtaataacttttcttcatgtttataataaattggaaaacacatcatatttctaactaatatgcctatatactcttattgggagtggtattatagcttaagactgttgtcagaattacctgaatggagttctttacttcctgcttctggtccactcactgaagagtaaacctctcaaggactaggatgagttcttccaaccgtttattttctctgtgtcccaagagaaagtactagagtcagagtacactgttcataaatgtgtgctggatggaatggaattaaactataaaagagttgataaaccaaaatgttgaagcctagggagggtcagaatgcaaaagagatgtgtctatatagattggtgagcagtttattctgcatctgtgccctccatcctcacaacaccctacacatttcttagaagtgcactcacatcccatccatgaagtgtttactgctctatcagtttgcatgactctcctttttgtatctcctattacattatggcctcactcacagaaattcacatgcaagcctgaatgttttatgttattctctaagagtagtaaacttaaattcaggaacaattctatagccacctgaataattccccactccctatcacatacaatgttcagtgaccattaggagcgaatgaatgctatagtctagatttttttttttgtgaaagaatctatgatttccagagatatgtatgcacatgtgtgtgtttgcatatgagaatgcatatgcttagcattttttggtctttatttctttccattaagttctgatatttggatttgggacctattggtgctagttagggaagagtttgtagcaaagatggaattctgataccctcttttctaaaactttgtctgtgatttgtagtatataactcttaaaaaattgtttttcttttgttgttctaaactcatctctcaaagtatggccatctgtttcaaaatcagaattttatacaaaacacatgtaaaatatgaattcctggcttccactcccaatttcctgaatccaaatgtctgggagtggaattcctgggtttgcatttataacaagtggccttacagagtccagtgtacactcaggttgaagaactactgccttggagtgcactgttagcaggtaaagtacactgtgaaaagtccctgtgtgaaatgtcagcaacaagtccaggacttttcctgcaaagggcatgtgcttttggaattggtttgctctcccagatcagcagagtaaatcttaatagcatttcagattttagggcacagggaaagattctctgtgactcaccaaagcagcatgtttgtattccgtgggcaatgacattctttgaatgagcacttaaaaaacaggtattttttttccaactgttaaacaaaataagtaaaataaaagcatctgtaatgtacctcgcagatagttataacgatcgctaatgtgtacagtaatcaccccttctccttgaggaatatgttcaaagaccctcagtggatgtcagaaacgaaggacagtactggatcctacacacactatacgcaacagtaggtcagatcaccgaggcagctattaagtgactaaggggtgggtagtgcatacaatgtggaaatgctggccaaagggatgattcatatcccatgtgaagtgggatggcttgagatttcatcacgctattcagaacagtgttcaatttaccactgatgaattgtttatctatgaaatttcccatgtaatttttgcagaccatgattaaccactggtaactgaagcctcaaaagggaaattctggatagcaggggtggtactgtagaccctatgtatagaaataattaagcttatattccacctatggttttccatgcagcttttacatttaaatttacgttttatatacttgaataaaatgaattaaaattagaaaaaacaaagtttagccacaaaaagtttattattgtaatatattttgaaaaatggtttatcaatactgattttagccttttatactgtatattatgatcaaataattttcaaatggaaaaaagtaatccttttataagctgttggtaaaataagaatcttagtagctgattcatgccagagtaattacctctttctggccttttctctgctcctttctttctctccctcccaatttctttctctcactctgtctcccctttgacattctctcctacattaagaatcaccactttgtttttactgttctcattcaaaatttttattttagtatatagaagtctacctgatgaagagaaaatgttgatatatgtgctttttaaagcatattaaagagtattggttatggaatttgtagacccattaaggatacctattcagatacagataaaattccagttgccccagttacatattaaaaacttttttttacaaaaaagaaacacactttcttcctaatataacagtttttttttcttcattagacgcgttttcaaacattggtccatgagggaaaagtaataatataggaaattcttagtcatgttaatattttccatttagctattactgacagatgctattctaagcgacttacaggcacaatatcttttattcctcatatgaagaacaagcattatataaagaaaatattaatacatgcattttcagaaactacagcccaagggctctcagaccataaattcagagcaagaatttccacccagagctgtctgcattaaaatgcacacttgttcccactctacgatgctgaaaggttaggagccttggctgtccctactgcccaggtgctacaagtccttcatggggctgttctacgcaacactttggaatgcagactcccttgagcgagcacttgtttagcatagtttcaccagtggcctgtctgtctaaagtagtcggcgaatattaaaatagtcctaacaataaaataacactcagtcaaccgtgtagccttcttccgagtggggaggagaatagctcactctccctagagggcctaagaaagatcagtttacaggttccagcatggggtgggacccttcctccttcccccgtcttggcactggcacttggtctggtgaccaccactagcccacagttgggtcagaaaacgttacagaactcctctctcccccacccgaaacacactcagcccttgcactgacctgccttctgattggaggctggttgcttcggataatgacctccaggaccccactgttggttacagcctgtttgtattattcttactgcaactcaagacacctgcagcagggcgtgagaaaaagtaaaagaccagtattttcacattgccaggtaccagaaacacagaagactgacacccgccacttaagtggggccagggctggtgtctgcccatgttgccatcctgatgggctgcttgccacaatgagggatcttcttcaatacatcgcttgcttctttgcctttttctctgctgggtttttgattgtggccacctggactgactgttggatggtgaatgctgatgactctctggaggtaagaagatagcagcttcttttcatgatccaggccagcccaaattttcgctaagtcccaactgccatgtacaacattcagtatctttactaaggctaatgataccaaaaataggcaacatggactatttattgagtctttacattattagctcatttaatcctcatagttaatttatgaggtaggtcttgttatcccattaaacagatgaagttactaaatagttcctccttttttcacaaggataaatttccacaagggtaattaagtgatctctgctactgagacctccagaaattcacgtcttccattgctgcatatatcatattgagtaacatttcagtaccacccttttttctaagataaattttttactcttgatgacagcattaagaatagtgtgatagactttttttaaggagtgttaataatctaaaacgttgagaaagaaaatgcaaggcatgcaaaacctacccaattaacatgcaagaggaaaaaacattatcttaatgatttccaagtaaaagaaaaaatgttgagggagaaaatgtctttccagtgcatcccaatgtacgggggacaggcatggatttaaatcctcccttaaaatgagttgctctagggaactgactactattcaaaagatgagtgagtgggttcacatttgaggattttatttttctcgctggagaagctcagaaagaagtaattttgaagttcaaaaccattacctgtggccataggaatctgag

SEQ ID NO: 9722 - DNA, 6000 bp, Homo sapiens
tcaaactgaaggaagagaggcttttgtcagaaacagatgcaataaaaaggaagagggatacctgacttggaaacccagggcaccacagaggaagtgggggcaggcataactaagtgctgcgaggggaaatgtgaacacccagagaacaggtacaagggtcagctggggatggaggagaaaagagctgaggggtataaaaggtggaaacgtaaaagggtttggaaggtgatataattactttttccttttttcactttttttttcttttctcttggctcctgcccttcaccttccttccaaaagctcaaaataaaatgtctctataatgtgctttctttactctgtacccagccaaatatatacacatatatatacgtgtatatatatatacgtatatatatgtatatatattaaacatatatacgtatatatatagacacacacacacacacacacatatatatatatataatttgttgttttagtttttgtcttccaatgattctgatctcccaaaaaaatgtaaatcaaaggaagagggcgatatataagtcacttaatatctttgtatcaaagtttaaccatgagagttttggactgaattgtaactcaacaaatgtttattcaatgagtactacgtgcaaaatattgtctgtttgccagggaaacattatattaccctcccggagttagcattctagtgaaaacagcattcaataagtaaattaattaaaatgttacgtaatgtattatttgacttggttgtcaggaaaagctttgctgggaaggttatagtggagcagggacattaatgaagatgtgagtaagaggagagaacaagcaacaggggaacagcggtccagcaagggggaacagcaggtgcaaacaccctagtatgggaacatgttagtgtgtttggtcgacagcaaggagcatgctatgggagattgaaagaagcaactcagtgctggatcatgtagggccacacaaggacttttaggccataaatgactatggaaatttatctgatcatgataagaaatcactatttgaaagcagagaatgacatatttcttgtaaaagaataatgaatatttatattgcatttctacatgccaatccccatgccaagtgttttacttatataatctcatttaatttaaaaacagcactataatgtatattattgtcattgttattcatatttttcagagaataaaactgtgaaaaaaagaaattaagtaacttgaccacattatgtaaacttgatcccaggtagtcgggcttcagattccttgacctcaatcactagcctgtatttattctattttcatttataagggtctctgaagtaagggcaatagactctttgggtaagagtttaagcagggacaccagtgaggggagagatggcaatgacttgaaccatggtggttgtgatggagaagaggaatagcgtggttggatttgagatgtgttttgaatgtagaggaagcagaaggtttgtggatataatgtgtacaggcaatgagagagagtgataactccaactttttgacctgagcaactgggtaaaagacagtgttgcttacaaagctctggtttggtgtggggcagaaataaagtttgaatttgaacatgtaaagtttgagatgtatttaaaacatccaagaaggagatatgaaggaggtaatatggtatacaaagtctggtttgggctttagatttagatttgcaagttattatcatattgatattttagaaggccatgtgtctgtctgagttcccctaggtagagaatataaccacttcaaggattgagctctaggacactggaaccttcagagatcatgaagaggtagaggattcaataagaatctgataaggaacagcagatgaaatacatgaaaaacaaagagtcaagtacgagagagtgtgaaagagcaacagattatctgtgtctaatgctgctgatacatgtacaatgaagacagagaattgatcaccacatttggcaaagtgaagatcattacagatgctgactgtggagtggtagagataaatgtctgaatggattgggttcaagagactagcaaactcctgatgcgtcttacagctacagcaagataattaaagataacctaaaaaaaaggtggagggtaaaagctgggagaagaagagaataataatacctttccaaatacatcaatcaattgcaaaatattttattgtgcatcttctatacatccagcagtattagtcactgacatcaatgaatttgtagcttcatttattcatttaggcaactattattcatcaaatgtttagtatgtgatggatatttaatgggtatagctttaaaatatttttctcaattgttagcataacattttttcatttttaattattacgggtacataataggtgtatatatgtatgggtgacatgtgatgttttgatacatgcatacaatgtgtaataatcacatcagggtaatgacaacagggtgtcatcaccttgaccatttgtcacttctttgaggaacattccaatttcactcttacttattttaaaatgcataattaattattgttgactgtagtcactctgttgtgctatcaagtgctgggtcttatacattccagctaattatatttttgcaaccgttaaccatcctcccttccccacaactcccttgcctctgctactcttcccagcctctggtaaccatcattctactctcatatctcagttcctttgtttaatttttagctcccacgtgtgagtgagaatttgcaaaatttgtctttctgtgcttggtttatttcacttaaatgtaaaaggaaaaagagatgtttctatttctgtaatcctaacatatcaacattttttcacattcctttcaattggtgttcatctctccacaacttttactcaaccttattttgtaagcctttttctttgtagacatatttccataatatgatagttatgatgcaaatattttattctgtgcgtagacagcgttggttaactaatcattttcatttccaaccatttatattgtgttcaaactacaatatactatgaatatttgtctatatgattattcatcttaatgttatcttccttaagctatgagtagcccttcaatgtccgggaatatacatctggttcaattctgaattactagcatctgtttggcttctaggtagtacatgagactgagtagcggctgagagcatgaacgtcgagtgtctctagtctcattttgtattctccacttgtaggcctgtagccttggtcaagttatttaaattccctttatctcctttatgaactggagataataatagcaccctccaggttgtattgagggttacctgaattaatatacacaaagtccttatgattgcacctttttattttgtaagcactgtgtaaatgcttcagtgtactatatatatataaaagtctgtgcccagaatatatttaaggaatgaataataaatcagaaaatgttttattgttgcttcatacaggtaacattttaaattcttttggattattttctctttggttcagtgacaatgttgtgagcaggtgctgggtcccaggtatcctgagataaataaaaattttgagcaattaattttcataagtgatgtcaagaagtaaagtatcatgaacatttctatggctccaattacactgatatttcaccttaggaactgaagctccgccagggcaggggcagcctctgagtttcgtactgctgtgcacctttagcagcacgggcacctgctggtttcatttccttcccactcacctgggcccttttcttatttcacatcttttttctccttttccttaaatgctttctctgaatcttgattcttgaaaataaattagtaggattcagttaggtaggaggaggagaaaagaagatgtgatgagcaagaagatgtgcgaagactcgtcagtctggtaggtggctttggttagggggtttcagaaatggggacaggtcatgaagggccttgccagtcaggaaaaatcatgaggcactagcagtaggaacacagcagaaggtgcctgaacaagagagatgacttaatgaaagcctttataacgcttcccgggatatattacagactaccatctacagtggcagagggcagctgaaggaaggctcttgcaaaaacttggggaaatggaaatgaatgaaggcaaatatttgttttgagattatttccttctatgtaacctattagttcttttattcgttccccatacatgtattgagtgcctactttgtgccaggcactgtgctaggcaatgggtatattaccagtggacaatacagatttagtcttgctgtcatgtcctgttgcttgctcatatgaatgtcagttcaagacagcaagagctcaggactgcggagatcgcatctacatcctgccgcgctctgtgccggcacagggtggttgcgaaaatcgtgcagtctgaattgattcaaggccttgcagcatgattgctaaatacgtcgagacaggaagaaagggcagggtggcaccgatctcaactgcgagagcacgatcttgcaatgagcgcatgtgtgcgcctcggtgtgtagtgaggggcgtagcttcccacagcgcctggcagcgtgccgagctgcgctgcaggactaaccctctcctttccccgcgcgctcaagcccgcacaggcggtggcagggagccgaaggggccgagcgcagccttgcatccgtccgcaggcgggcccggcgccgcgcctcctggcggcgggcgggaccgtccaggacgccgccccgcggccgcagctcctggaagcccagagcgccggtggatcgcgagccaaggcggcgggtggagcctgagccgtgaggccgtggccaatcgcgccgctccgggggaggagccccaaagggggaaaagaaagtgcggcggaaagtaagaggctcactggggaagactgccgggatccaggtctccggggtccgctttggccagaggcgcggaaggaagcagtgcccggcgacactgcacccatcccggctgcttttgctgcgccctctcagcttcccaagaaaggtgagtctcgcgccgccgtgagggctcagaagtcaccaagccgcagaatctcagggtagacggattcttagagatcctatcgttaaaccctcctactttacagaagaggaaactgaggcacagaacgaggcagcggctgggataggtcatactgctagttaggactggagcccggattcgaacccaaacgttcagagacccatctttgctttgcagggatttaagtaacgcggttgtgggacgtctgctcgttgccgcccccatcctcagccctttgaggggtctacccttgttttcctcctcaccgccccctccccgctaccaccccccgcccccatctcctccttggtttctccagaccgctgctggaagcgccgaggacagaaggaagcggtgtgtcccagcacgcccactcggtatcacgtcgctctcagcgcagagctgtgacagcctgggaaaatgctgcttgcagcctcactccctcttcccctgacctgctttctcagaaagatgccccttcagagggtgtcggaccagcttctggaggagcgcggggagagaggagcgaggcccgggcgccagtgacctcctatggtactgtttcttcccagccccggaggaagcggagctagtggccctgtggggcacagggtgcccctcacttgggaagagctgacttcatggaaccatagagccccttccctcttctaaatactgagagggagcaaggaagctgagttaaagagaaaatcacaaacataaaagcaaacttcggctgtttcctttaagagctagcccacagcctgtcttccctccaccttctggttgtgaaattgtgaaccagggcgccacgcgaagcattctgctgctctgctgtacagat

SEQ ID NO: 9723 - DNA, 6000 bp, Homo sapiens; identical to SEQ ID NO: 1087

SEQ ID NO: 9724 - DNA, 6000 bp, Homo sapiens
gaaaatatgacctggagaaacacatgggaagaaagttggtaattttcagccggcgctgtaatccctgtaatcccagcactgtgggagaccgaggcaggcagatcactcgaggtcaggagttcgagaccagcctggccaacatggtgaaaccccatctccactaaacatacaaaactagccaggagtggtggtgcacgcctgtagtcccagctactcagaaggctgaggcaggagaatcacttgaacctggaaggtggacgttgcagcgagccaagatcgcgccattgcactccaacctgggtggcagagtaaactccatctcaaaaaaaaaaaaaaaaaaagaaagaaagttgctgggtttttttgttggtttgttttgtttgtttgtttgtttttgagatagtttcgctcttgttgcccaggctggagtgtaatggcgcaatctcggctcactgcaacctctgcctcctgggttcaagcggttctcctgcctcagcctcccaagtagctgggattacaggcatgcatcaccatgcccggctcattttgtattttgtagtagagacggggtttagtcatgttggccaggctggtctcgaactcctgaccacaggtgatccacccacctcagcctcctaaagtgctgggattacaagcatgagccatattaaacttcctttataaaaggcctcaaaaagaagaaactgaggcagaaatttaaaaataaatatgcattcattcactccaagacaagtaacaagcaaggcaaaagttaaaaagaaaagaacaagttttcctctgcccagcaagctcacttcaaggacagttataagataacgctgtttaagaggccaaggccaaaagaataagctccagacacccctcgcctccagagcaaagttgaagaaaaaaaagaaagacaaattctttgactgttactcctttcccaggtttcttaagcatgattatgttttacaaatgtctgtatttagccagttcttgtttttctttcaatgcagctacaaagtcaccagctatgcaaggccacaagttatgctatagatgatgtgacctgtcatatgattaactacttttatttattggaagtctgcttataaaaaccccgctctgtctttgttcgatgctcagctttttagatgacagtccactaagccagtgcgtacctgaaataaacagtcctctcgttctctgtctcagtcttgccagtcctcagtttcctgcaacatctctactaaaaatacaaaaattagccaggtgtggtggtgcgcacctgtaatcccagctactcgggagcctgaggcacgagaatcgcttgaacctgggaggcggaggttgcagtgagccgagatctcaccattgcactccagcctgggaaacaagagtgaaactatgtctcaaaaacacagaataaaagaaaagaaaagattatgcaaaatggaagaaactaggcacaaaaagccacatattgtatggttccacttacatgaaatatccagagtagccaaatccatagagatcaaaagcagattcacagttgccagggtgtgggaggagggggactggaagagatgaggtttgttgttgttgttttgagactgagtctcactctgtcgcccgggctggagtgcaatggcaccatctcagctcactgcaatctctgcctcccgggttcaagcaattctcttgcctcagcctcccaagtagctaggattataggcacctgccaccatgcccagctaattttttttttgtagttttagtagagacggagtttcaccatgttggccagcctggtctcgaactcctgacctcaggtgatccacccacctcagcctcccaaagtacgggcattacaggagtgagccactgcactcggcctaatttttgtatttttaagagatggggtttcaccatgttggtcaggctggtctcgaattcctgacctcaagtgagccacctgcctcggcctcacaaagtgctgggattacaggtgtgagccacggcgcccagcctcttttttgatttttcaaaactgactctcatattaaggaagccaaaacttaagtgataactgaaatgatcgtgttactgaccacaggttctttaggctccgataaaaattgacacgaggccaagcaaatttcccagacaaggctttattaggggcttccgttccaccacgggggagacagcaccgcagggagaggtctccggctggctccccaggggactgcgttgtggcgtctcgaggagggcgacacgcgtaattcatgaggtaggtgagcgtccctgcaggagtgacagaacgcacagggatagttaggaatcgcggtaacacatacatcgcaggatcagaacacgacgagaaagcctctccctggcagaggcttttgttttgtttctgtctgtcacccagtctggagtgcagtgacaagatctcggctccctgcaacctccgcctcccaggttcaagcgattctcgtgcctcagcctcccgagtagctgggattacaccaccacacctggctaatttttgtatttttagtagagacggggtttcaccttgttggccaggctggtctcaaactcctgacacctcaggtgatccgtccgcttcggcctcccaaagtgctgggattccaggtgagagctgccgcgccgaggcagaggtcttggtcttgtaatgaggccgagggtaaagagtggtcgtgcttccggcttcctgcacacaaaggcaatggagttcattccctgaagtacaagattggaagtgcgacgctgcctatcttcatttttcaaggtcgtgtgatcagtggatgtggcattttgtgtaagatttacagtggaatgctgcttatcttaatgctttcactgtccttcaatgagcaggtaagaaaaaaaaaggaagaaagaaaaatgttgggggggggaatgcattagcgaatgcattagtggagttggcagccgagtcccatccctcctctgtctcaataagtgtcagatgatgctatcatataattttgtgggaaaaaataggccaaagaaatgaaattcagaaggacttattctttttggttctaaaatcagtttctgagagctggcaggccccaactgccaagaggagaccctggcggccacagctcatcctctctgaccaagccttagctggggatgggccggcctccaggcagggcctcccgctggctggatcccgggccacactgtacagaagacaaccccgtagagaccttgggtggggcagaagcccccttccctcactgacaccctgccggtctctcctggggtctcccagtctctgctgcccagtggggaagcacccgtctcagcccaaccgcagccccccccggctccctcctgccctttcacctttcctgccattccccactgtgtcctgaagtttctaagaacatccccagcgccctgttgtcagctctgggaagtctaaagttcagggctttgggtaattaaacccaaggcctctcagtgggctgggggtgaatgacctggcgaacgtgcctgcggagatgctgggaggaagctgagtcagtctgcgtctttgtcagggtgggctgaggccagtgaccctctgggggtcagggcccttgcaggcctcttccttccctgacctccaccttaggaggcagctggcccctgagacgcctgcctcacgacattgtcctgtcccaggaactggactttaggaggaggggaagctggagggggatgcagcttgactcttgggagagactttgaggtgtctgggcacaggagtggggagtcctccgggtaccccatcagggactgcttccactgcttgtatggcctcaccagcccagcgcaggaagccccctctcccttcccagaattgaccctctgcaccctctcctgggccctcttctcactacctccatctccaccatgccccaacagagcccctcccccaggcccctttggccgctctccacaccccacagctttctgtctgacctggtttcttagcctctctggacctcagcctccttatctgtaaaatgggaataaggatactacttcccttgtaacgcggtggtaaagtttaaataagctaaggaacacactgcatgtcctgcgggccctggcacaccagacatgctgacagacgctggctgctttcatcagctatgcaaccaaattctaaggggcccttcgtatgtgtcaggctgcgtgccaggaacctagaggtaccaccgtaccacagtacaagatgctgtgtctggcttcgaagagatttcagtctatgtggagagagagaaaagggaagctatcagccaataaaatcgtttgcaagcctgtaattcagcaggttttcaagacctgtcaaatgcccagcaatctcactctgcaactctgcctcttaaatacagcatcttccggcccagcgtgggggtggctaagcccatcatccagatgtgatgaactggggtctgggaaacccacaccggcctcatctggcttttccagcctgtcctcccttccacacatcaggctgacagcaccaaacacggccgaggcctcagccctgagtctccccgctgcagagtgcccaagcctgagttccagcaggttcttcaggggccgctgaccagggaacactgcggtgaggagcgaggacttcgtccccaccccggcccagggcaggggcttcgtggtgagcccaccccaccccagaaggctcctggaagggcagggcagactggcagcaaaatcctataggatgggccgggccagaggcaaggggtggccaaaggcacctgtccaagaggtgggagggaccacacctgggggcagggacgagtcaggcacagggaactccgccagcctagaggatcaaattcctccggggtgaactctgagatagaaagttggcccgggaagctcaaggagggagagcggcagaggggaagactctgcaattctgcttgccccccaccccggcccaggcaagccaccctgcccccggcccccacctgcccgccccgcctgcccttcctcaccccggtgcctgcgggattgctggagagaacgcggcgatggagccgggcaggacccagataaagcttgaccccaggtaagtgagggcggcgggccctgggccagtcgctgggcagcggtggcccctatcccgcggcctgtcctctctccctcccagagccctttggcggccgcactcagaatgagacaggactggaaatgctctagctgttcctaggtcctcagggacaacgtgggtttgggccagggtgtgacactccagggcctcggccttgccccccagcgtggggagagaaaggtcgcagagcgggggctgtggaaggcattcgcagaggaaatggcagcatccctcagcagcagggggcccgtccgtctgtaaggactcacccttcctctgggatcctgctcttcctctctggtcagtccctgggctgctgcccgacccgcatggagagaatccacggtgggctcttcaggcacggcagccaggcacagcctggctaggtggcagcttgtcttactcccccacctgggccagttctccactccctctaagaaaagggccctgaggccgggcgcctgtaatcccagcactttgggaggctgaggcgggagtccaggagtttaagcccagttccagtttgagtcctggagttcgagaccagtgtctgagcaacatggcgaaatcctgtctctaccaaaaatataaaaaattagccgggcctggtggcgtgcacctgtagtcccagcttactcatggggatgggggttgagtagatcacttgagcccaggaggtcaaggctgcctgtatgagccaagacagaccactgcactccagcctggacaacagagcaagaccctgtctcaaaaagaaaaaaaaagaaagaaaaaggaaggaaggaaggaaggaaagagaaggggaagga

SEQ ID NO: 9725 - DNA, 6000 bp, Homo sapiens
gggctgggagaagtggggtctggagaagtgggggctagagaagtggaggctggagaagtgggggctggagaagtgggggctgggagaagttggggaggctctatctagctcactgctccgccaccaaggtgaagggcctgtctgtggccagcggctgagagcccacagcacagcggagaaccccagaggcaggagcaagaggaccatgattttgcccggggtgagccgccagttccaggtccccatggctccactgctaggtgcaatccctgtgctcctctctcacagacctgtctggagtggggagcagccctggctcctcccatggctcccttgcacaccgagttgtgtcccctctcacaggccagctgtagccccctcccctggtcttgaataggttgccatctggaaaagcagtcaggggtcggggtggagggcagaagccaaggctccctttgatctccttgggaggctgagaagtcccacaagtgacaaactcttatgaagcttagtttaagaaagaaaagagatccccacaccctcagagggcaacagctagagaattatacaaagtgggttgaccgccatcattccttccttccctctcttcgtttctttcctccttctttcttttttgtggagatggagtttcgctcttattgcccaggctggagtgtaatggcacgatctcagctcactgcaactgccacctcccgggttccagcaattctcctgcctcaacctcctgagtagttgggactacaggaatgcaccaccacgcccagctaattttttgtatttttagtagagatggggtttcactatgttggccaggatggtcttgaatgcctgacctcaggtgatccacccaccttggcctcccaaagtgctgggatgacaggcgtgagccactgcgcccggcctcctcctcctttctttgagcaaatagtcaccaagcccctttatgtgcataagatagtatattttttggaataacacatgaccctgcctccaaaagtttgtagtgggccaggcatggtggctcacgcctgtaatcccagcactttgggaggctgaagcgggcggatcacctgaggtcaggagttcaagaccagcctggccaacatggtgaaaccccgtctctactaaaaatacaaaaaattagctggaagtggtggcgggcgcctgtaatctcagctacttgggaggctgaggcaggagaattgcttgaacccaggaggcggaggttgcagtgagccgagatggcaccattgcactccagcctgggcaacgggagtgaaactctgtctcaaaagaaaaaaaaagtctgtagtgtagttgtggaaaaaaggcagaagtccaaaaaattaaatcacaacacaagagatgtcatgaggtcggtggattatgggaacgctggcaccatgtgttcacaggacaaggtggcaattgcagtggggaaggcttcatggaggaggggagtccaagccatgcctttgggatggggagggttggggtaggcagaagaggccattccaaacaagggaaccctctgccagagagagtagagagtggggagcgtttgttctgtgtttgggaaaatcgtgatcagcccgggctgggtgaacccacctgcaggccatgtgtgcagtgatcatgaagcatgggcggtagtcgtgaagagaggctggaggcagctcaggccgaatggactttctcctccagccgggagccgcctgggttcttgctttcacttcggatcagagacgctgctgcgctgcttgacactagacttgctttattcctgttgagtggaatacagcaaacaccccaataggtggagcaggctcaaagcaagaggcacatggccccccagaaattctcatgatcctgtggaggggtgagcttggtcagggcaaccaggcctggatgcaccagggttgcatctgagaggaagcaccctggtctcctctgcctcgaaaagcatagtgaggggggagcccaaccaagttggaggatgctgagctgtgcagtcgggcttccagccgtgctggcacgttctcctttcagctgaaatctgcattggtttcagctggacgtccaggcttccacccactgaggcagcgtgctgctagcctaggggagggctgctggtgttgccaaccaactggcttgtctctacacatccatcaagagcactggggccgggtgcagtggctcacacctgtaattccagcactttgggaggccaaggtaggcagattgcttgagcccaggagtttgagatcagcctggacaacatggtgagacccctgtctctaccaaaaatacaaaagacatggtggtgtgtgcctgtggtcccagctactgaggaggctgaggtaggaggatcacctgatcccaaaggtcgaggctgcagtgagccttgattgcgtcactgaactccagcctgggcaacagagtgagaccctgtctcaaaaaaaaaaaaaaaaaaaaaaaaaaagaaagaaaaagaattaaaaagaaaaaaaaaagaccattggtttactagattttttttttaggggtagcagctgcctttctcaaaagaaattctatagagaatctcccaatgtataaaacatatcaaagtagaattcttgggatgtggagggaatggggtacctggatcccacctgccagtctttaggcattcatgaggaacccttgaacctgctgaaccctgtaaaagggctttaagcagagagtgagatgacccaatacacattttagaaagatgcccgtggcagctaggtggagttgacattggacagggatgagattaggggcagggagcgagtttcaggaggctatgaaagtggtccagacatgagctgatgaggtctagacccagggcaacagcctaaggatgaaaagcaggttggattccagaaacatttctgagttagaatcagcaggaattgggggtcaattagatatgaaggatgaagtctgtgagggctggactgcctgggctgaaacataccgtaaagtgtgacagccatacaggagagaaactgctgggacaaaggataagagttgagtttggggccaggcacagtggctcatgcctgtaatcccaggactctgagactgaggtgggcggatcacctgaggtcaggagtttgagaccaccctggccaacatggtgaaatcccatctctactaaaaacacaaaaattagctgggcgtggtggtgggcgcctgtaattccagctacttgggaggttgaggcaggagaatcacttgaacctgggaggcagaggttgcagtgagctgagattgcgccactgctccagcctgggtgacagagcaagactgtctcaaaaaaaaagagagagagttgagtttgggatacatcatgttatggtgactctgggacatgtagcagttgattgaccagtagacagttaaaaatgcaagtctggatcttctctcgtggaagagaatgttggagctagaaattaaaattggggagttaccaactgattggtagacacaaaagacatgaagtagagaatgtgcatacaagagagaaagaggcctgaatcaagcacctgggtttgcaacaatttgatctttatttagctttttcattggtgtgattgttattaccattatgagataatattttatttttaaaattatttttatttttttaaagacggagtcacactctatcacacaggctgaagtgcaatggcgtgatcttggctcactgcagcctcaacctccctgtgctcaggtgatcctcccacctcagcctcccaaatagctgggactacaggtgcgtgccaccaggtctggctaagttttaaattttttgtacatatggagtctcagtatgttgcccaggctggtcttgcactcaggcggtccacctgccttggtctgccaaaatgctaggattacaagcctgagcctctgtgcccggccatgagtgaatattgtagaaagcagagacaatgtgccagatgtttggagtgaaaaggacttggctcctgttctcttaggatggacaatgctacacacaatcccaaatcacaggctataagagaggtgacccaatcctgcaggacagttcaacgtttcagatttgaaggggagtgagagagatcagaactggaggccccttgtctgagcccccgactatggtggtccacgtcactccacacgcagcaggcactgtaaatatttcaccttctctagacgacagtagttcctcgagaacaggagcgctggggtaatgcatatgaagctcttagcacagtgtctggcgctgcttcaatgatggctatatgatcaattattcttactcctttgaattcttggcaagagctggcagggaactttgtacacatcaggtacaaaaaaacccatccgcgcagtctaagatcaagaagctcttggcactctctgacagtcctcgacaaagcaattccccttctttctaacacagggtccgtaaaggagatgatccacaaggaccggctgagtggataagaagacagactggctgagcggctgaccctgccagacgacaggctgtgcctctttaccacggtgctgccgttcccaaagtcggcctcagcttggtccttggctggaagctcgtagcaaagtttctgggtcagcagacctcataggcaaggggcccctagctggccgcccccagccctgccaaggcaccaacgcaagaaagccgggggagcctcggtcgcattgctggaagatcgtctaaacatccccgctgctcggccgctaggccggcaggtgttcgggccccgctcccccggcccgccccacccccgcgcccgcgccgcgcttccctctaagaggccgggtctgagtgagcctgtgctgagtcgccgagcagcccgctctccatgtgacttcagtttccgtccgttccttccgctggtgctaaaataatctgatgccccacagcaaggaggtagcccagccccgcgttcggctgctctcgaggaggccggagcccccggagacgatgcgccccgcgcagccgcctgcgcctgcgggagccgtgagtatttcccgcgtgggggcgtccccggggcacagccggggcccttctccaggtgggcgagctcgagcgaggttgggtggtaggaggtcagcgtccgcggcccgcagctcagggctcacgaggaagctgtggcttgctgcgtccaagcgccgccgcttttgtgctgggcgtgggggctgcagctctgggtggaggtggaaatacctccctccaggagcacttagagctgagaaaggtggtgcgacgtagtggaaaccacgagggcttcagattcagacgtgggtttgagtcctggctctgcagggagcatgtgagcagacagttaaggtttctgagcctcagttttctcatctgcaaaatgggaacagagatgctccctccctgggctgggcgactggatatgatgagaccgctctgtgcacactcagcatgctgagcactgggctctcctttcctgtcccacaacgtggattgagaaccactatctcatagatgaagacactaagactggttaacagcaacacctatcacagatgccgtccacgtgccaggcctgtccaaggccctggggatacagctgtgaaaatgtgcaaagccccttctcccacagaacgtttgtccttgggagattcactggggctctgtgacttggatcttagcctagacttagatccatggcttatcagagggagactaacaggagggcgacgaagactcggacgctcttccgtagccctcgtggcccctgcatgtgggccggcttctgaaggggtcagcgtacttccccacgtacccaggagctagacggaaagaagtaaggagccactggtgtggctttgtgctgcctctgagagaaggtggacacgtgccagttggtggctgcgactggaggaggccggatcgggggtcctagg

SEQ ID NO: 9726 - DNA, 6000 bp, Homo sapiens
tgaggctgaacaggacagcagctgttagggaggcaaaggcccaggtagtgaagagtgttctgaacagacacatggcacatctgcaggagtcaggcatctgaggtattctaggcaaactatggggtcctcagttctgtcaatctgtgaaaagatcatttgtataatatcatacaagtagcttttgtgctggtggacttcacatttttccagcaaatcttgctgtcagagcaagcaccaaagtgggctctacagcttggaatgaaaaaacaaaatgcccagaaaaggggtgacctcatgtttgcacccatgagatgaagcagggttagggaacaagccacatcagaagaggtagagaaggaagtatgagatcagtcgccttcagggtggagttctgatttttaattgattttgttatcccagagttctgtccctctatactggctcacactgttttccttctgcaccttttactagcagacagttgtgtatttcagtttcttcatgattcatctttttattaagtccttctttacctgaagaaaaaaaaatccctacttggagctgagaggaaaggcattcctggttaccccgggccagttcaggtcttcctgctttgtgtgtccacagcacctgggggtccccatgatggcaaactcttcaagtcatagaaatcactaatttagttgtctctcttcttcactgtgggctcgtagagggcagagttcctctctggattgttcagtgcctggcactgtgtagtacccaaaacacaatcattgaatggatggttggatgggtaagtggatggatggatggatgagtggatgggtagatgggtcggtgggtggtgggtgggtggatgaatggatggaagggtcagtgagtgagcgagtgcatggatggatggatggatgagtggatgggtgggtagatgggtggatggatggatgaatgaatggaagggtgggtgagtgggcaggtggatgggtgggtgtgtggattgatgggtgggtgggtggatagatggttgaagatcatttttcatcttatcacagtagtcattaaaatcaacagtagcccactaactcatgcctactgttgtgatcacagatataattgctgctaacgattctcatagcttgcttgtactgtcagagacgtaattatcagtgcctgtaagccactccgcaggtagcacaggcacagatagaaaacagcagctcgggtttagaaagtcccttgtggattgcaaagcactttcattcacatatggcacttcatttaagtgtcataagaacctcatgagggagattcaccaggggaagcagaaaagcatcctgattaggaatgtgtctctggacccagactgcctaggttcaaatcccagatccaccactcactaatcttgtgatcttgagcaatttacttcatctctcttggcctcagtttcttcatatgttctagggataataggtctcataaagcgcttttatggattgacaataataatcacaataatttgagtgctgactatgttctgggcttggttctaagtattttaaacgaaataactcatttaagcctcataacatctatgaggtagatactcctattcccctctgctttttgtaagataatgaaatcaaagttaatttccttcccattcagctgggagatgaaggagccagaatttgaactcagaatgagtggtttccagagccctatgcataacgccttgcagcgtctctgagatagatatttctgtaaaacactcagagtgcttggcacctaataagcactcaataaatgcttatcatgtgccagtcaggcaatgttatatatcagtagccccaaattatagatgctgaagctaagacagagaatccaggtgactagctcagaatcacaggtgatttctactgccagtaagtttagtgcaggtgtgggtggtaaatgttcaccagctttgccttcacccaatccagacttgttgcttaagcgtcaaggactgaggcctcctggggctccaggtcagtcccaagttccttctggacagaaggtctgcatctcctcatctcaattcttttccctgagtaagcaaagcctgttctggaaagttcttagtcaaatcacctccccagcgctcacccctccagcggggttcagccttcccccagcatctgagacccatctctcctacaagccccagccactgcattggcctgaaggacccctgacctcatttccttccttctgccccaattgtagcccatttgcctcactctatccttgtcttactcctgccatttggattttctctacccagcttcctgaacatacaccaaacacatttacactgagcaggcagcaggaagagcactgcttaatgtaaaagctcccgccccatccctgcacggacctagtgcctcatccaaccctgaacaagggcccacatgttctcagaggtctctccttgcctcctgtggctggccctagactggggagggagccgtattgaggctctgcactagcttgtagcagggggaggagagcattcggcccaaacccaaatgccaacactctccccagagaggttcagcatcctagaccaggcccctgccaggcccttcttacagggtagtggacaagagtccaaagtctaaggttgaaaagatcttccactccgtggcatctccccactgtgtgaccttgggcaagtgacttcacccctctgaacctcattcgcttggtctataaaatggaggtaattctagtatccacttcacagtgttgcacagaatgagacagtgtctgtttgcttttcattcattcacttattcatttaacaattgtttactaggtagctacaaggagccaagtgcttttctggtcaacccttatagaatttaccttggatggatgatacagaactcatcccacagtgcctggtacatagtagatgcttaagaaatggcaggggagtattgttgtttgtttttattcacattcttggtccctgcctcacctgcttctccgaggaatacattgttggggtcaaaactcatggattctgtggatggtgtgtgttccatccatggccaaggaacatggcctcttttgagtattgtaggtgggagcaccaagcgtgcagtttctttggtgtctcatgtctctgtgcctcttcttgaggtatcacatccattttatgttctattccataagagatctgttagtcccagtgtaaaaataatcttcctactgcatccctgagtaaaagcgtcccttgtgtaagacatttaaggtttctcctgtggctccagcacccagtgacccaagactgggaagccccaaatccagaaacacactggatttgaatacagtttataattagttctcagtaaactgggaagtagtcaggggtaggggtaaggaagagagactgttttgcccccaatttgcagatgagtgaaccagggctccaaaaactgaaggaacttgcccagggtcccacagccaggatttgaacgcaaatcgctccaatgccagatactgtgttcttagcggctgcctggcacagtccacccacccaccagggctcttcggagacaaacgcgggagcaccccctaggggaaggggaggagcccagggctatgagccaggagaccatctccttctgcactcctcagcactctcactccgtgcggctctggaagagtgctttttccctctctgagcttcaagttcccggctgggaaagtgacttagccctagaatgcctccagctctaaaatgtgtgaaagacgaaaaggttatgaaggtgataaggcaggggaggagttggagctgaggagggggtcagtcctgccttccttctctcagcccttcccctcaccgtcctgggcccaggatggccagctgtccatgactgcggggcagggccactccctgtgccagacccaaccgagctcagctggggccctttgtcacccaacgcttgctggggcctcggcctctggtgttgggtgtcggggtggattggattctctcctggcagccccacagatgccgcactcctgtaagggtggccgggcgggcagggagaagccagagctcccacctcctcctgggctccagagagggacgggaagccgctgtccctggtgctggtccatagggacccccctccccctgccaggtgagggctccatggacctgaactcatactgggaccaagctctgggctcaatgacattcttgtgactatgtatgacctggcttctttggccaggccaagggcctcgattaatatggtgggggcctgtgggtgcaggtgggggctttctcccatccccatgcctatgagacctgagtggggagggatgtgggagaagagtgtattggtggacacaggtggcatgggtggagggaggatttgtaggggcggggaacctgggaaccgtgtatttgggggagagtgtcccagattatttgggcatggggcgtgtgtaaacatgttaagggtagtgagagaaagagggaaatggagtctgggtgtgctcagagggcctgtgagcacagcaattcttgagggaaaggggtggggaggttaagttgtatggctcaaagctggtgcatggggcctgggtgttgacgtgtgtgtggcagtggcacaggacacaaggacatgccagaaggtatatgtcgggggatgtgtgtacacacagtgtgtgtgttgtgaagccagtgtgttccacagcacaacacacaaatagggagttagagtgtgttatggggctatgccttgagggtggcatatcgtggagtgcctgggttggcgctagtagcattggatttacagtgtgagctggtgtgttagggggcatgggtgtagtcagtgttgtttaggttgctgtgcgtgtgcctggggccttcctgagcacctgtcccatgtggcctccagtgcctggcctttgtcactcactctgtgcttgtcccacaggagccaccacccctgaccatgtagatgccagttccagggagcagcatgggccccactgaatggagactcctgggtctacagccctgagcccctccggcccctggacctcgtcccacaccggaggacacctcttggagctcaccaccactgtcaccagcccgcctcggccacccccaccccccgggacccggagtcggccgcctggtgccacagctgaccagtgagggtgtgctgaggacagccacaagcagccatcacccggcagcctcttgtccagcgctgacccttgggcccagcccgagcaaggaccgcagcaaacatgggtgacatgaccaacagcgacttttactccaaaaaccaaagaaatgagtcgagccatgggggcgagttcgggtgcacaatggaggagctccgctccctcatggagctgcggggcactgaggctgtggtcaagatcaaggagacttatggggacaccgaagccatctgccggcgcctcaaaacctcacctgttgaaggtaagtgttcaagacttgaacccagggctgcagcctaggtggccaccatctgaattggccacagggaccatattcataatatgtaacagcagggatgtgtcagagaaaggctgaaatgccagaatggccattgtagtgcattctagctgagtatcagcccctctggataggctggggagcagggcttcatcaggggttgggcatgacccaagccacctgcagagagaatggcaggaagaaagctgggtcaagactgtgttctggagacaaggagccccacagccgcagagtggcgagttcaacattctgttactatgggaggcactagtttctgaggcagaggcagaagggccactgggtagaacaaacatggaacctgcacccaggcccaggaggggcttttgctttccccgcttagcccacagtggatggatttgggggttccaaccatgcaggcccggtccttccttccccaggcccca

SEQ ID NO: 9727 - DNA, 6000 bp, Homo sapiens; identical to SEQ ID NO: 3388

SEQ ID NO: 9728 - DNA, 6000 bp, Homo sapiens
actcacaataggacactttacaaagacaaatattcttagtcctcaatgaaattccaaaggaagatctcacagctatttgtcttctctaaaatagtgtcttaagtactaaattcacatctaacatctcaggaaaataaaagataagaaagtgatgtttttccttggaagtaagactttcctagggcccccattttcagtcatttatgttcacaagatctgctgactaccttagctaagaaataaacttttagaaattagagctggccgggcacagtggctcacgcctgtaacctcagcactttgggaggccgaggcaggcggatcacctgaggtcgggagtccaagaccagcctgaccaacatggagaaaccccatctctactaaaaatacaaaattagccaggtgtggtggcgcatgcctgtaatcccagctcctcaggaggctgagacaggagaatcacttgaacccgggaggcggaggttgcggtgagccgagatggcaccattgcactccagcctgggcaacaagagtgaaaactccatctcaaaaaaaaaaaaaaaaaaagaaaaagaaagagaaaagaaaagaaattagagctatgcagatggcttaaaaattggttgcaagcactgacggggcaatggactgtatcgtaattaattaaccaaaaaacaatttcctttgcaaaagcttcaatatccaacctaaaagaaactactgggctattatcaatccagcgaagatccaattcctgtcttaagaaaacaagcatctgtgccaggcaccagaaaatcaaagaagacccatctagaagtagctgcattctcctagcaagaccttcaatattgatttagttgtcttggcatctattcttgctactagacacccatctatgaacctgactgatagcaacccaaatgggttaaattttaatttcttagaagaaaaggagtacatctagtagttcctcaacctaatgaagaaaggaaagtgaaactacaagtcaccaagtacctactggatgtcaggaataaaatgacacaatttcatcctcacaagaagaactctgtgaattaactttcatcaaatcattttttaaacaaggagctcagagaggataagtcagccactaagtggcaggccaaagtttaaagtcaaggttgtccaattccagagtacaaacttatttggtgagaagacctgagcaagcaagtcactttcaatctttctaaacctgagtggtcttctataaaattggaatatctgccacttattacaagactgaaatgaaatggcattcataagtgcttttttcatacactgtttttgatgataaagtaagaagagtaaaaatccccaaaccagcaagtcccaacacctccaagaaacaggcagtatgtacctctttgaaaccctgagctaaaattagctgaagcagtcttctctattttcagttgaaagggaccctggacctgggccaggttcccaggctagggcttacccagtggtcaacttcagacaagccttaagtcaatatccaattttgtactgctaggaagcactgatattcctgcatatattggggtcttcttacccattttctacacttgtccatcatcaaaaccctcacacttcctctgtccaccatcctggagattatgtttgacttcaagtcatgactgtacttttctgccttgtgacttagaacaaaacattttatcaccaagaagctttagtttccctcattttaaaagtgttataaataatttctactccaagggtggtagagtagatctaactgaagcactaaaattccaattgtgtcctaggtgtcagggctccagagaacagcatggtcctttccctaaaatgccttataggccaactggggaaacacctatgttattaggagcaatgtttcacacacatgattgtgactgctgaggatcatactaaagagggcagaaatcaataggggcaaacacatccaaggttgcaatatctaagtggggaattgaagactgtttaaatcatcaaaagagacattttttaaatagggtgacacaaaaataaatggtgtgttttttgttgtttttttttttcagacggagtttcgctctgtcacccaggatggagtgcaatggtgtgatctcgactcactgccacctccgcctcctcggttcaagcgattctcctgcctcagtctcccaagtagctgggattacaggcacccgccaccacacccggctaatttttgtatttttagtagagacagggtttcacatgttagccaggctggtctcgaactcctgacctcaggtgatctgcccatctcagcctcccagattgctaggattacaggcatgagccaccatgcccagccaaatcggtcttattttataaaatagacattatttttatctccatgtaaattactggagaagggaggtcaaggtgtaatctaatgtctggaaataagccagcatgactaaagagaggactgatgaaactgggaggccctgcagatgactatccttttccactagctataacctacatatatcactgcaaattgagtggggatccatacacatgcagtatctccttcaccctcaagaagacaggaccaccaagttgcgtataaatcttcaaatattatgcaggctaaagtacattatagcacagtagttaacagtttgtgttcccaagtaaattttgtggattcaaattctggctctactacttgcctgagtaagttatttagcttcaatttacttagccccgcatcattaagatggtggcaacggcaccttccttcatggaattaacatgaggaacacatgtaaaaggcctggcacagagtaagaagctgatgattatttttttgtcatcattatactagaagagttccaacagaatggttcaaaccaaagtaactaatcctccctacccattattcacctcattttttaatgtgtgttaaggatccagtggtttctttgtaggttatttccacactaccttttgaatctcttaaccctactgaccagtagagcaacttttcttcaattcttgcttttccttgctccaaggaaagatttctttgctccacctctccaatttttttccaagtcttttactccactgttttcacttgttactcatggggcgaggagacatagagatgtcacgaaggacagtaagattacaggatcactggttgaatgtttgtcaactgataaccaaactagagggaagggtagaggtgtgccacacagcgctgaatctggccccaccttggtcaatgtttacaaaaattcgaaagttaaaaggcttttttttttttttgagatgggagtctcgctcttgtcgcccaggctggagtgcagtagcgcgatgtcggctcactgcaatcttcacctcccaggttcaagctattctgctgctcagcctcataagtagctgggattacaggagcccaccaccacgcccggctaatttttgtccttttagtagagacggggtttcaccatgttggccaggctggtctcgaactccttacctcaggggatccgcccggctcagcctcccaaagtgctgggattacaggcgtgagccactgtgcccggccagtttaaggcaattcttattagacctcctgcttactgatagatagcagaaactgtaaacatggtgggtaacagcttgtaacagctttgaacttaaggccaaatgaacgagagaaattttaagaatggtcattgtaaattcctacacttcaagtcatgcaattatctgcacaatgaatgaaatctaacttcataatagttcacgtgaaaggtcctagttgactgcaaggttactgtgagtcagcaaagcaacatgccaaaaatactaagcctgccagggaattcatttgcaacaggattcaagacaaagagggcaacttggaacttgataatcatccaaccacttccacaagagcctgttcacttctgggtgctccatcccaaacggcaacaaggatgatgagtgatcagaaaaaacaatgctgggcaaggacaaagagatgagaactgtaaatggaagaactgaagggggaaggggatggtcaacattcatccggaggaatttttataatgtgccttgctccacgaggcaagatttagatcagcgaagtattggaagagggctcaaaccagagaaaaacttcctaattgagccagcccttatgaggttactaaagctattagaattcatgctaaagggtgggttagaagaggttcaccctgatcacctctgaattctaacatgtagaagtttaattctatgataaactcataaaattttaaaaataccctcaaaggctaagtaggccgattaggtaatcaaaacacaattagatccagatttttgtgagacaacaggttaaaaaaaataagtaaattctaaaaatacgtaaataaaattagaaagtgactttatttttacttttggtgaaaagttcacaatacatttgttatcgaggcaagattcttagaggcgcattgcaactcaaaaaataaaacaaaagctggctgtttccataacctcactcacttcagatctacctcatcatttggggcagacaaaaggagggaagggcaccctgttgttccgttgcaatgtaacaaaatgtgacaagaaaaatatttataaagccaaattctcttgatcagattcaggaaaagtcagcgacccacaggttaatttttttttaatttaaatgaagaatgtccagtcttacatatggtgttggagtcacctatgatcacctgagtcatcctgaccatacgtgagctgcacgctcagctgcgggtgtgacccgtttactggaaaactccagcccgaagggatctggaagcagtttttaagactgtgtgtgtatgagacaggtcgcgtcctagagcaaacggttttttttgtaaacagacggcatcctaacaggggcggtgctacccagtctgcggggagtcgctcgggatcgaagcacctcagagctccttcgagcgtatcccttcgggaaagccccacgccttccccgaggcgcctcctccggcctgcagcacgccctcgtcctgcacttcctcctcggaatctgcaaggtatgcagctaccagcctccccaggcgccggttcgtttggtttgcgcggggtccgcgccttggggtcacctcgcgaaaagagcgtgcggcgtccggtgcactgcggtgtcagcgcccgcttcggggacgccccgccgcgggggctcagcgggcgcgcacgcgcggcctcctccgcagtgtgcaaccccgcgggggaggagggaatcgcggcgacgtcactgccccgaggcttccaaaggggcggagcctcccgggaggctgcggcgctcccagccagcgcgcgcgcgcgcgcccccgcccccacgtgtccctgcggccccggggaatgtgggtcagggagccgagcggcctcacgtgtccccgcccgccgccgccgcctcagcgcccattatgtaatgccgcgtcacgcgcccgcccagccaaccggcgcccgcgcgccgccgaacgtaaacacagcgcgcacgtggctcgcgcggccgggccatgtgaggggggggccgggccgggcgccggcaggccgcgctgcggctttgcagggagacaagagggcgggcgccgggcggcccggggggcgatgggaaccgagccagaggcggacacgcggcgcgcagcagcccaccccgccccaccggccatggggacaccccctgccgccgccccccaaagtgccccgcgggctctgagcgctccctccggccatcccccacccgccgcagtccggttcttacctgcattcacctccatggtgccctcgcggaggcggccggggccgcccgcttcccgcagagggggcagcgccgccgccgccgcctcagcgccgcgccgccccgggctggaagcagcggtggtcgcgggg

SEQ ID NO: 9729 - DNA, 6000 bp, Homo sapiens
tccacaggtgctggccccaagggtgctctgtgataagctggctcacaataatctccattgctttctgccagccagaaaaccaacctaatacacaccctggacccaagtatagaaagaagactagaagacattgccctaaaatactaacatttgtcttggagcggtaagactaagcctgccattttaattcatctgttgactttttttaggcttctgttttcttaaataagtatgtattcttttataataaaaatatatgcaaacagaagaaaatacgaggacattttttctctcaaagattaattccatgaggttcacaagagaaaaaagaaacttaagatcagaaaacacagaacatataaaatatatacctcccttctcttacggcacactaaatgaatttaacaggtagaaagaagtgaaatgggaaggtcaaaataaaagaagaaagggagaagggcactgagtgaaactaacacagaggcagagagaaagcctgagagggtcaaggaaggatagaccttaagaaagtgaccctgagaagacccccatgcaaatgagacagaaactcagatcaagcaggaagaaatctgagaagtagagtggaccttggactgctgtgtaaccctggattggttgctgaacctctctgggcctctgctctttatctacgagatgaggcatctggagactacgagggtttggcctgggggtacctggtgggtctctggttccagtggcctggccaggaatacttccacctctcccttttccactgcccacctttcccatcagccccagcacatctttggtgtcctgaattccttgttccaggtactcaatggctttcttcgcagtgtggggcttgtctgaggtcaggtccacccagcctctgagcacataggcctgggatgagaacaagatgaaagatgaagtccttggtcctgcacagaatcaactcagcctgcacatgatccacactttgccacccaaaaccctgaggccctgccaggcacagtcccgtgcagatcccagggcagccagctctctctcatggccaggactcccattgttgctttgtctggaaatgccctggacagcgcccctcccactcccaaccaaaccccttcacctaatgtccattaccactacttacaactcagcctcagaggcccctgcttaggaggcctccctccctgtacccctacagctctccatgacccttactgaggcacactcacctatcctgtcattgcctgtttacactggggtcaggagccaacatgggggcctacgcaaggccactcttgatgtctccactccttaggccagcacgaggcctggccctgcataggaagccaaggaatgccctctgagtgggtgagcaggagccgttctgagctcgtggacctcgctggttccatgttagccttcacccagcctctccaggcagatggggagggccaggcctgggaagcagacttggaagagccctgccctaaagcacccctcttgatggcctagatcagtatttctctattatagttctatttctctttttctattatctatcctaaggagtctctttagatactgttttctaatcaatccctccccttccaagaaatgttagtgcctcagatataccgtatctgtgtattgtgtactgtatatatatctgtgttttatacataaagagtaagatttttttcaccctctcccccagggaccatgtctacacccttgaaaattggtatcagccctgctgagaaggcatggcctagactgaggcttcaaattccatattagtgcagatatacagtatatgggctgcactgcatgagccaccattcagttccagcagagcattacagggagggaatggcccagtgtggccagctcatctgggtcttcaaaagaaccagtaagtctggaccagcctgggcaacatggcaagacccagtctctacaaaaaatgtaaaaactagctgggcatgctggcacacacctatggtcccagctacttggggggctgaggtggaaggattgcttgtgcctaggaggttgaggctgcagtgaggtctcaaaaaaaaatttcttaagaatatggtgcaagccatagaaaatctatctaaagatcagactctgtgtacaaatgccaatgtgtaacctctgctaagcccagagacaacacgcgtggggcaactgtgagacccggtgttttgccagtgcctgggtgtggctctcccccagtttcagggccctttgtgggaatgagggccaccctgctattatgtgtttggatgctgctttcttcgcctgttgtccccatggtgtggtaagtacctctctgaagcctctagaaatcttcagcatgcggtcaatgtactctttggccttgtcatggcggcctatgagccagaggaaaaggccagcatagtacagtgcagtcccactgactgtcttgcgtatttccttcaggctgtactcaagctcctgaattgcttctcggtctgtaaatccaagagcgaaggaagagggagagttaggatgtggaagtctgcctggttctgcatgggccaccgagggcccagggaactacctcggggtctcccccagacactgtggatctccttcaacatatgcagcacaccgcatgcagcccaaggcctggaaaccagcagtacctgcccttgagatgctgcaggggctgccctggtgtggactcacgtgtgctgtctgagattaccttctcttctctgtgcccagcagtgtgctgagcaggcaggccaaaccaaaatccttagcctcaggcccacaacttattgtgagtagggaaatagtagtctgtagtctctcttggaccctctccctgactctagaaatgtggagattaggggtagaattatatatattggcttggtttttctgacaagatcttggcaaagaagaagggtgtttccccaactcttgggatctggagcatgggcccctcccactgtcatgggctctgcctgcttccactcagttgggcccaggcatggagtcttctcccaggcctccagggggagaggagcagcagccacttctcactggttaacagcatctgcacagccaccagggcacatacctcctttggcagcccttgaggggctgtgttatctctggggcagggctttccttcccctggtgggtcaggcctggttgagcatggtggcactcaccaatgatttcacatcttttgtgagcataaatgagggccatggtggagcacagggacacgtctgggtgatgcctgatgctttccaggtcactgatggcatcctggatgtgctctgcaaagacagtccacatagttatactctcaagctccaggactagaggacatgagactctgtagctgacccaacagctcagcactactacctgctggactaactggtctgaaaggtccccagtgacccaagttccctgaagattggggctctttgaaagagttgctggtaacatggtccaggctgttaggggctggaaatcttggacttgaaaggttcaccctgtgagtacttgtggggatatgtgtgaggctgcaattattagctgcgtcagttctgaagaaggacctcaggcagggcattctcagctactgctcaagagccactgattacatttatccctccatgtcctcagacatttggccatgggctattctgccagtcctcagcctaggaccaccttctgaatgtcagcccatctgcacctgcatgggtctcactcctctccctgtacctgtaccatacccacctgtcctcacacctacctcttccccctcctttgcctgcattaccagttctcagcttccaggcctggaattacttcaagaatcatgcagctatctctccaaccactcattttacagagagggaacccgaggtgcagagcagggatagtcagcgctctgaggtctcaaaagtcaactagatatggattacgtaggcctctgtggattcccgtgggaatccagccgctgagtgtgaaactgtttttatgggaccataactaggatacaagaaggcatccaggtggagccagagtgttagggcccagctagtgcctggggtcacaagaccaacactgccaagtccttaccttctttgaggactccataggctttaaagaacttcaacacagggtcattgctgaatttttccaggcccacagctgcagcctgctgcacatggtggaagtacttttcctggctatagtaaatgatcccagcctgtatgaaggaagacataactgcaatagcccagtcccttctctgtctctgttctgtcccagatgggatgagacctgctcccttccctatcccctgctcctcctcagttctgcaaagggaagagaaagaggaaacattcaggcctcatcctgtcctctaacagccctgggagcagctccatgcagttttcccaggaaagagtttggaggtgtttgtttgggggattaccaacagattctggttcaactatgatggggaattcaaccaaggctttgtcttaggaagggaataaggggggaaaaatgaggacaaataataagaaaaattatacgaattgtagttacaagttattgtgggcttcatatccactatcctgtgcatggtcctctcagtatctttcacagctaaggaagcttaagcccatggaaactacagcttgacaaaggggctgagattttaaagttaagtttcacttcctctaaggtttgtgggtgctaggttgggagcagatgtggttggactgtaaacatcctcatgggccatatgaaagagcccagacaccatcctaagggtaacagaaagcagaatggttttaaggcgagggatgttttcagatgtacatttttgcaacaaccactctggctgcttttgcatgtggggggtgtgtgccgtggtggcagcagggactactgatgctgaaaagagccacagcagagaaaccagatgggagggaggctgttgcaggctctcaggggggagagatggtgctggttctgggctagaagataaaaagataaaaagaaaacccaggagacatcaaggagctggcatttcttgtagacaggattagaagatgagtatagggaagaggtatgagttaaggctaggagattaaatggtgaagccatcaactggggtgggaggcgcaggcgagagtgagctgggtggaagaagggatgatgacaagaagggataatgatagtgattggatgagctggtttggggtagctcaagaaacggggatgctaatttggggctcagggtgcgcagaagccaccggagaagacgcccttgccagggggagtggggcaagaaaaggcaggaccgcctgatataactgaggacagcgaagggtggcaggagagtagcagggcagacggtctctgggtcaggggcggggagtcacgagggagccctcggacagcgcccgggccacgcaccataagggaggagtcattgctgctcatctcgggccgctcgcggctccgagtccgggtctggtggggcggtgcagagcgggattcccgaggcagggtcgtgggcactctatcgcggcgggcggttgaaggcgttacagtccttggaaaccgagctgctagccggttgctaggagcgtccagtgtctggagtgggaggaacaaaacgcctcacgtcacaaggcgcaggaatcgagcgccgagagagcgagtcggtgctactggcgtcgggtcggtccgggtaggcgcagcgggactggacctgggtgccgagcggagccgctgccatgggcctgggcgtcagcgctgagcagcccgcaggcggcgccgagggcttccacctccacggggtgagttgccgccgcggcgccggtgaccttggcgaggcgcccgcaaccccgcgcccgggcgtccggtcgccggctggctggcgactgcggcggggtcccggcccgagtgtttccg

SEQ ID NO: 9730 - DNA, 6000 bp, Homo sapiens
acaatagtggagggaaggtcagcagataaacaagtgaacaaaggtctctggttttcctaggcagaggaccctgcggccttccgcagtgtttgtgtccctgattacttgagattagggattggtgatgactcttaacgagcatgctgccttcaagcatctgtttaacaaagcacatcttgcaccgcccttaatccatttaaccctgagtggacacagcacatgtttcagagagcacagggttgggggtaaggtcacagatcaacaggatcccaaggcagaggaatttttcttagtgcagaacaaaatgaaaagtctcccatgtctacttctttctacacagacacggcaaccatccgatttctcaatcttttccccacctttcccgcctttctattccacaaagccgccattgtcatcctggcccgttctcaatgagctgttgggcacacctcccagacggggtggtggccgggcagaggggctcctcacttcccagtaggggcggccgggcagaggcgcccctcacctcccgggcggggcggctggccgggcggggggctgaccccccccacctccctcccggacggggcggctggccggtcggggggctgaccccccacctccctcccggacggggcggctggccagccagaggggctcctcacttcccagtaggggcggccgggcagaggcgcccctcacctcccagacggggcggctggccgggcaggggggctgaccccccccacctccctcccggacggggcggctggccgggcggggggctgacccccccacctccctcgcggacggggcggctggccgggcagaggggctcctcacttcccagtaggggtggccgggcagaggcgcccctcacctcccggacggggcggctggccgggcaggggagctgaccccccccacctccctcccggacggggcggctggccgggcggggggccgacacccccacctccctcccggacggggcggctggccgggcggggggccgacccccccacctccctcccggacggggcggctggccgggcagaggggctcctcacttcccagtaggggcggccgggcagaggcgcccctcacctcccagacggggcggctggccgggcggagggctgacccccccacctccctcccggacggggcggctggccgggcagaggggctcctcacttcccagtaggggcggccgggcagaggcgcccctcacctcccggaccgggcggctggccgggcggggggctgacccccccacctccctcccggatggcacggctggccgggcggggggctgaccccccacctccctcccggatggggcggctggccgggcggggggctgaccccccctcacctccctcccggacggggtggctgccgggcggagatgctcctcacttcccagatggggtggctgctgggcggagaggctcctcacttctcagacggggcagctgccgggcggaggggctcctcacttctcagacggggtggttgccaggcagagggtctcctcacttctcagacggggcggccgggcagagacgctcctcacctcccagacggggtctcggccgggcagaggcgctcctcacatcccagatggggcggtggggcagaggcgctccccacatctcagacgatgggcggccgggcagagacgctcctcacttcctagatgtgatggcggctgggaagaggcgctcctcacttcctagatgggatggcggccgggcggagacgctcctcacttcccagactgggcggccgggcagaggggctcctcacatcccagacgatgggcggccaggcagagacactcctcacttcccagacggggtggcggccgggcagaggctgcaatctcggcactttgggaggccaaggcaggcggctgggaggtggaggttgtagtgagccgagatcacgccactgcactccagcctgggcaccactgagcactgagtgaacgagactccgtctgcaatcccggcacctcgggaggccgaggttggcggatcactcgcggttaggggctggagaccggcccggccaacacagcgaaaccccgtctccaccaaaaccagtcaggcgtggcggcgcgtgcctgcaatcgcaggcactcggcaggctgaggcaggagaatcaggcagggaggttgcagtgagccgagatggcagcagtacagtccagcttcggctccgcatgagagggagaccgtggggagagggagacggagacggagacggagacggagacggagaaggagggagagggagagggagacggagagggagacggagagggagagggagagggagagggacggaagttataagattctaaccctccctaaaatgctcctaagatcagtgcttgagatattttgcagaccctgcacttgatagaccaactggcaccacccagatcaataaactggctcgtctgatcttatgtcccctacctaggaactgactcagcacaagaggacagcttcaacttcccatttcatctccaacccaaccaatcagcactctgttctctggccttcccccacccaccaaattatccttaaaaactgatccctgaatgctccaagagactgatttgactaataataaaaatcctggtctcccacacagctggctttgggtgaattgctctttctctattgcaattcccctgtcttggtaaatcagctctgtctagccagcgggcaaggtgaacctgtttggcggttacatgatttctcttttttttttaaaaaaaaaaacaacaactaatttttgaacgattaattactttagtgtttatattgtattattcagatatatagtgagtatcttgaaccttgagcttattgaaccttatatataataaagctcattacttaggagtttattcagttaagaagtaatggagtacaaaaagaaggtttaagtccaatctaaattttcttttatttagctaagattttcttctatgtcagatgacagttgagtcttctcaatgaaggtgaggcttatagggatgaattcactttctaaactaagcacaccaccccctccggagttgcatttttgttgaggaccttaactgccactgactccccttgagtagcaaggtgttgaatgagaggtacttttatcaaagggagcataatgcacatgaaaaacccagaagtgaaagtaagattttatatgggtgttaggatgggcatagacttttaagtttattgtaattgacactaattagagacttgtatgcttacactatgcttcaggcccttattttatctgtgagtaaagtttattgcaattcaaaatagttcagtgaagaaagtatactttgttattgtggctaaaatgaaatagcatttgttaatgcctcattgtgataaaagggctattcacggagatgactgaaaaggaggaaaggagcctttgatccctgtgataatgaaaatgaatcctttttttttttttcctatccccttactcatacactatcaggctagatcttgcctttgggataccatttaaaggaattataaaaagagggtagagttttaaaaggaagcctaggggatataaggtatgtaaatgaaggcagatctgaagcttagaagatattaagaagaccctgagggtaattcagttttgtgctgcagtgatgttaaaaggtgctaatcatagggccaggtgtggtagctcatgcctgtaatcccaacactgggaggcaggtggatcacctgaggtcaggagttcgagaccagcctggtcaagatggtgaaaccccatctctactaaaaatacaaaaaaaattagccaggcatggtggcaggcacttctaatcccaggtatttgggaggctgaggcaggagaatcacttgaacctgggaggcagaggttgcagtgaaccaagactacgccattgcactccagcctgggcaacaagaacgaaactccatctcaaaaaaaaaaaaaaaagctaatcataagctggcacagtggctcacacctgtaatcccagcagtttgggaggctgaggtgggtggatcacgtgaggtcaggagtgaaaccctgtctctactaaagaatacaaaaaaattaggcacggtggtgtgtgccaaatggaggttgcagtgagccgagatcgtgccactgcactccaccctgggcaacagagcaagactcagtctcaaaaaagaaaaaaaactaatcataggtcattaaaaaaatctaaaaggctatgaaggagacatttctaccaatatttaaaataaaagctttgttcttaaaatgagtaaataatgagctaggtagaaactttggctattcagaataatcttttccccagaggcaaccaccatggataacagattactgtaatagactggaaactaatctgaagtgaaaattgaagcaaggaagcacattggaataaataaatcagcagttgaaagcaataaagactgcatttaactacaccgaaaagtgctaagtaggatttccaacatgatattgaaggttcaataggagttgtcagtttggtttgagtaacttaaaattgtcaagttaaatagttgattaaggatgaagatagccagaaaattagtagctactattttaattgataaaagtaacatcaatttaaaatttttcactatttttaattaacatggtgctaaaaatgaatgggttgtacaggggaaacggcaaaataatagggggaataagtgtatacaactctcccttgagagtgactgtacattaaaaatacagttaatttctaaaaatattttttaactttaggattatggataacatatactaagattctcatggaagttaggaatattttaaatacatccagatatttaataatgttcagatgcttttaattacagaacctcatagaaattctttctcagggagattcttcaagcaatcactatgtcaacagacacaggtgtttcccttccttcatatgaggaagatcagggatcaaaactcattcgaaaagctaaagaggcaccattcgtacccgttggtaagtttgactgacattttagtagtcttgaatatggtagagccgtgataatttgttcatttagcaatatcctgaaagaatgtattttccatttttttcttatgttgaaatatgctgagattggcatgatataaatctcatcataaagattcttctgtatgtattcagactttttttttctttttggagacagggtctctttcacctagactgaagtgcagtggcttgatcatagctcactgcccccatccctcgacctctcaggttcttgatcctcccacctcagcctcctaagtagctgggaccacaggtgtgcaccaccacgcccagcgaatttttgtagttttgtatagacacggggttttgcgatactgcctaggctagtcttgaactcctgggctcaagcaatccgcctgccctcagcctagtgctaggattataggcgtgagctgccactccagctgagacttcttattttattgagtcttatttcagtgcataatgttgtattgggggaccccaagaccatcctcaggttagatgattgggccaagactcataagactcaaaaatgcttgttacagtcatagtttattacagcaatgggatataggttaaagtcaacaaagacatatagaatgaagtgtaggataaaccagacacaaaattctaggtgtccccttcccagggagtcccacagggggagagggggtgcatttaattcttcagtactgatgtgatatgtggcaatacatgctaagtcttgccatctagggaagcccaccaagccttggtaaccaggttttattgaggtgtcagctgtgactgaaattagctattcagtctcctatcccccagaggtcggactcgcaggcatattaaaattcatttaatatgcagttaaaacagatgaaaggtgaaatt

SEQ ID NO: 9731 - DNA, 6000 bp, Homo sapiens
gagctgttgggccataggagctggtgtgagtgggggcagagggctgtcccccaggattagggcactttgagttgatatttaaagaagggtagggaggtggttccacactccctgatctgattcctacctccccaaactccattggtaattcctggggcccagcctacagaggaatgatgcttgctgctttgcaaggagggagaataggccatggccctgggctcttccaccagctccagggcagcagaggtaggtaagaaggaggtgctttgtccagcaggcacccccatgtgctcctgccaggccaaggccgaactgtgcagatgttctttcatgaattcttaagtattcccctgtacagaaaggaaaacaaaatctcagaaagcccaaacctcttgcccagatccttttgttgtcaggcactgtcccaaggctggttgtacagcagtaagcaaaacaaagtctccccgctcctggagtttgaagtgtagtgggagaggcacctatcaaaccagtacagaaagaaacaggtaattccacaatgcaaaggacaggaaagacacaggggctggaacagaatattagtatgggccttgtagttagagctcatgatcaggaattggtgccaggatttgtacctcgtggtgtctgccagatgtcagagcctctcattctccccaataccctgcccagcccaaggccacccatacttgtagccacccacggccaggccatcaggctggtggccaccccaaccaagccctgccccacaaggagccaagaagagaaatcattctgaggcatcgataagttcccagggaaacctgaggagatatgcattgtggatgagatgtttcttacctgtcacccacatggtgcttggtatctttccaagctcattcccacatttgacctcccttgcccctcctgacattcccgtgggggagccagcaggacagcttggatggagtgcttactcccttaattcccagaattaatgaagcccgactctgccctccaggatctgatctttccagccagggaaacaggcacaagtatggaagcaacgagaaataaaccacagcccaggctcagccagcatgggccgctgcactgaggcacagaagtccttaggtgaagagtgccaaccaaggggcctagcctgtctgtcagcaccatcttccaggcctggcatttcccaggccaccttgcttcagggccttcccctccctgctcacccccaccatctccacagcacctttgcctttctcttccatgcgctgggtttctgacttagactttgttcagacaaaagattctgcttaaaagcaaaccatacctctagtcaaatctcactgcttcacagtgcagtgggtggaggcctgaagatggcaggactggcctcaggtccccggggctggaggccaggacagtgaaagtgcctactctgggcccatgcctctttggtcgactccctggcctttggcactgttggcctcggtgctgcaaatgtccctgggagcgggggcagtgcattacctcacactgtggtcaaggctgagacccagtagttcagctgcccctgccaagcttaaaatcccaaagccaccaagtgatcctccacagctgcctgtgagctgatggggcacagaggggcagcacgtcatacaggaatgcccagaaaacctatggccatagcaggactggacaggcctctccacctgtgtacctgcattgtgctctctgaggagagcagggtcccctgtggtgtcgtcaggcgttcatgcctcacttcagaggccttcctgggcccttccatgtgtcaggcactgtgcttggcactgggggcagtgaacaaggaatgatttgtgttagggaagggaagccctggctggggcctggcctgttgaggaggcctccctgagggattgagagatagccagtgtgggccaggatgattctcaccgtagcctggaggccagagacctatggcacccaggaggaatgaaggcctgcaagcaggaggcagagtgggcgcctagtggggcagtgagcctgggcagcaggcagtgggtgacagtaccaatccctgtgtgctgcttctctttcagagtgcagctccttctctccacccaccacagtgattctccttatcctgctgtgctttgagggcctgctcttcctcattttcacatcagtgatgtttgggacccaggtgcactccatctgcacagatgagacggtaagcaggtggctctgcccaccatttccacacctggggatggggaggacccagggtcagtgttgctgggagagctgctcacagtcagactggagcccagtggtcaggcccctggtgtgcagggcacagttctttgtttgcagttacacttgggtcatcttcatccacacacaagtcctccagccttggggcagccatagcagatcacaccaggagtgcggcccagcagccgtggctgaaaggctgcctttaccacatttccttccatcccccccatggcaggtcttcctttatactgtactgcattagacactccactaggcactgagggcacccttcccatctgggggccacaggcttgaaatagagtggttgacagggtgccctaacccagctgggacaggcaggtcagcttgccagccatgcctgggtcctgagggcagagtcaggagacaggtctgccttgagcccccagggcagcaggcttttacctggcctctgggtcatctctgtctggcccagccctggtcctcatccgctgccttctcctcacccctaccatcacctcccatctacccacagcatcttcgctggaagctttgaggctgctggctgtgccagactggggcctactcccttggtgcccctactgctgtctcctgaccttcctaaggtgtctgaaaacctcaaggtggtcaatccctggctgcaatatgggcatttctctggggatttacataggaagaaggggtggcacttagctctgggtgtgaggaacaagcagagccatgaggttgagagccatcccggtacgattcctggtgtcctgaggccacctcagggtcagctttcaccagtggtctagggctctgggtgaaggtttgggcctcagggtagtcagcattagaagcgggctcataggatgacaacatcctcccactgctgctgggcgccttcccctgtgggcttagaggaggacgtgcaaagaaaagaagggacagtgctgcccactgccagagcaccattattcgggtcttccggcaacttttagaaggttgcggggcttttggcaactttttttcttttataagaaatgatgtcattgcaaaagagtttctgtaaaactagtagccaatggtatagatccagccctgtatccaagcagtaaccgtgaccaacttctctacgtaagatatacggggaacccgatggggattctttcaggaccagtctgccattgggatactgccgggccacggtctgggggagccagaaggcaagctctcacggccccagtcctagccgttcttccctgagaagaccattcctaaagagaattgtgttggaaggaaaggagaaagctggagggccctgccccacctgggaaggggtgtcttccctttggcctgtgcccttcccaggtccctaggctgtgaagaaagacccagactcagctgtcctcccagcacccctttactagagaccacagcagacagacccctggccaggcttctgccaggctgctcctgtcctttccctctgggcaggggccccgttctcaagccctgccctttgaccagctccatctgaagaagagagagagggaggaagcagctctttccccagccccagttttttcctgagacttagcaggggaagcagcgctggctccgtgacagctgctgcataggtctgcgccatgcttctccccaaaggagccactaggaggacctttgccatgccatgctggctggcctggccatgccaccctctaacctgtactaatccctcctccttcctcctctggtgacttctcccctcattcgtggtctgtcactcctattcaaccttctcagtttgtgtctcaccaggcccactaagcggggtgctgcttgatcccccaggctggtgagacacacaacgccagagcagtcatttgatttgttactttttttttgtctgcaaggtggtcatggtagcttcaaacttcctaggaacctatcccaaattaatggccatcattggttatgatgattgcgagctccccaacagctctgaggcctctcacgccaaagccttcatagtactccatccacagcccagcacagagtttctgaagagtgcctctgcagagctcaacaaggggccagggctggagagacgcgctccttatcttagcgacacaccccggcctggcatacttacaagcagcagtttctgcgctgctgatagtgcttctttttccctcccttcttggagggacttgtgaatgagtgcccaccaaaaaaaggagaaatttttttagtaacactttttatgagaaagatatattaggtagatagctttgttgctttaaaaaggaaacatttactccattcacctgtcgctgcggacatccctccccagaaaccacagcaatgcagtgcttgactgaaagtatgattgttcttgttttcagggaatagaacaattgaaaaaggaagagagaagatgggctaaaaaaacaaaatggatgaacatgaaagccgtttttggccaccccttctctctaggctgggccagcccctttgccacgccagaccaagggaaggcagacccgtaccagtatgtggtctgaaggaccccgaccggcatggccactcagacacaagtccacaccacagcactaccgtcccatccgttctcatgaatgtttaaatcgaaaaagcaaaacaactactcttaaaactttttttatgtctcaagtaaaatggctgagcattgcagagaaaaaaaaaagtccccacattttattttttaaaaaccatcctttcgatttcttttggtgaccgaagctgctctcttttccttttaaaatcacttctctggcctctggtttctctctgctgtctgtctggcatgactaatgtagagggcgctgtctcgcgctgtgcccattctactaactgagtgagacatgacgctgtgcgtggatggaatagtctggacacctggtgggggatgcatgggaaagccaggagggccctgacctcccactgcccaggaggcagtggcgggctccccgatgggacataaaacctcaccgaagatggatgcttaccccttgaggcctgagaagggcaggatcagaagggaccttggcacagcgacctcatcccccaagtggacacggtttgcctgctaactcgcaaagcaattgcctgccttgtactttatgggcttggggtgtgtagaatgattttgcgggggagtggggagaaagatgaaagaggtcttatttgtattctgaatcagcaattatattccctgtgattatttggaagagtgtgtaggaaagacgtttttccagttcaaaatgccttatacaatcaagaggaaaaaaaattacacaatttcaggcaagctacgttttcctttgtttcatctgcttcctctctcaccaccccatctccctctcttccccagcaagatgtcaattaagcagtgtgaattctgactgcaataggcaccagtgcccaacacatacagccccaccatcatccccttctcattttataaacctcaaagtggattcactttctgatagttaacccccataaatgtgcacgtacctgtgtcttatctatattttaacctgggagactgttgtcctggcatggagatgaccatgatgctggggttacctcacagtccccaccctttcaaagttgacatatggccatcccattggccagaatccacagacacacctaagcctg

SEQ ID NO: 9732 - DNA, 6000 bp, Homo sapiens
tgcattccagcatgggtgatagggcgagaccctgtcaaaaaaaaaaaaaatcaaagaagaaaaattggctgggcgtggtggctcccacctgtaatcccagcactttgggaggccaaggcaggtggatcatgaggtcaggagattgagaccatcctggctaacatggtgaaaccccgtctctactaaaaatacaaaaaaatagccaggtgtggtgacgggcacctgtagtcctagctacttgggaggctgattcaggagaatggcatgaatctgggagacggagcttgcagtgagccaagatcacaccactgcactccagactaggggacagaacgagactccatctcaaaaaaaaaaaaaagaagaagaagaaaaatggatctgggaaccatactttgagtagacctaacatataaataatatttttcttatgctgaaagaagtagagaggtttatttggctacatatctttatgtaaggccttgttattactggtggttgtataatttagagctgtctttctcaatctaaattatattacagtccagaaagctaaattcactcccttagagttgaggtgggccacagagatggggagggagagagacaaccagcaaaagggagccagttcactgaatgtaacttggaggggtttgagatttgacatcattttcctttttatctccaaaggcttccaggcccagaacatgactgcctctgaaatttttgagtaaatgaattaataaccagcaaaaaaaatgaatgatttttatagatgtccaatatcccttttatttctaatttgctgagagtttatatcatcaaagggtgttgagctttgtcaaatgcttttctacatttatcagaaaagatcatatagtttttttctttattctattgatatggtgacttaaattgattttcatgtattaaaacaatctcatatttctgggataaactcaacttggtcatgttatattattcttttaaaatgtattgctggatttgatctgccaatatttcgttaagaatttttctgtctatgttcacgaggaatattgttctgtagttttctcttattgtaatttgttggtctaattttggtatcagggttattctggcctcataaaaggagttagaaaatattccatcctttatttctatttcttatagtttgtgtaaaactggtgttatttcttccccaaatgtttaaaaaaatcactagaaaaatcctctagttctaaagttttctttgtggtaaggatttatatagttaattatatttctataacaaatgtagggctattcacatttgccatatcatcccatgtcagttttgatatgctgcatgttaaaagaaattcatccatttcatttaagttgttggattttttaacataaaattgatcataatatttatttgttattcttgtaaagtctataagatctgtaacatatttctctttgttctcaatcaatctagataaggcttcatcaattttttggtctttctctctctctctctctctttctttatttcttttgagacagggtcttgctctgacacccagactggaatgcagtggcgccattatagctcactgcagcctgaaactcctggcctcaagggattctcctgcctcagcctttcaaagcattggaattataggcatgagccactgctccttgctgattttatcaatgtattaaaatgttgtcaaacaaccaattttgatcttgttcattttattttctattttattttttctgcttttatttttattaatgccttccttctactttaattagctcttctatttctagcttatgtcactgatttaagtcttagattttagacgtttattctttctaatacacgcatttaaagctataaatttctctccaagtactgctttagttgcatttcatgaattctgatatgtggtattttcattattatcaatgcaaaatattttatactttgccttttgatttcttctttgactcagagtctagaagtcagttgggtttttttaataaaacacaattactttattgatttcttacaatcaaatactgccaactagcattacttccactcatgcatcattaaaaacaaaggatatttcctccttggtattttcaaatgatgcattatacaataaacaaaattagaacttaaaatgcaccctgattaatcatgtaaactggtaatttgtttaaaaaagcataactaacaattaaggtgtatatcttacaactaacaaataaggtgtgtatcttacacaccttatttaaacaaaatgggcattaacaaaatgcatacagtcaatacatgatagaaagcatgtttcaaatacaaggcagcccctcgggccaccatattatttaggttttgcattatcatttatggcattatagattaattacacataacatattttatacattttaaccctgaagataagaaaaataactgttgcttgaaaaaaattattccaagtagccatttggtttgtatcagcagaaactgaacctccatgagtttagtgtttatcaagttggaatcattagctcaagtcagtgaatgagatatgcaacgcatttcacagtgactgtttcccaagtcctggcaatgcctattctcccacagtccaccagatgatgaaacatttccgggaccaggatgccccttctacgtggttttcccttttcatttttttttttttttttgctggattaactattactgtattatttcctcttctcccctcttctgtggccttccattttaattattcataaatcctttcagaatattctcagggagatccataaggggaagttctggagatgtaaaatccaagggaggaagactggggattggaatgtccttggctttcccggcatttgctgcaaacttctgccaggttgaggaggctgtagcagtttctgaatgtggcggcaagctccgtaattctgacgtttctacaaaatcagcatctacatccagctccttttctactggacctttttagaagtctggccttttcagcctttagttattttctttccttaatctttcattctcagccacaaggaattccacacgtctcttcaaatctgcaattttggttgcctattcctctataattgttttatcatcttctggggctttgcttccaatacatggctctgctgtctcactcttttgctgaagtaaatatagtagtgtgtctggatccctgtcaaagatcccctgaatctcaagcaggcgtttctctgaagaagggctgtacttctgagaaagggggctctggccctccgcatcctcggcagagagtttgtgagatgcctgaagatgggcagctacatccttgtctgtgttctgctaggctttcaatctttcctcacgctgggcccttttccatctctcttggatgaggaggagctgtttcatgtggctatccctttgcaattccagtgaaagacgagcctgctcagattgtgtcagcttcatggcttcagaaagatatgccgcagcctttttgtgacaagaaatcgcctcttcgtatttgcctgcagctaataaacggtcggctcgtctgctctgctgatgagccaggttgaggggtccttccattacttccatagacagcagcagccttaggaaggggagcggtggggccagggaacatggaggggatcgcaggggagcgcgacgcagccgcgtcctctctgggcgcagagggagcaacaatctctccacttcctcctcaggccccgcgccacgggcccgccccctgcgccgccgccgcgaccccgcacggcgccatgacgtcacacgcgctggtgtttttaaaattatttccaaattattgaagcttttcttgatatcttgttattgatttgtaattccttttgggtcttttatataacttttctttctctgctgagactttctatctctccattcattatgaatatagtttcctttatttccttgggaacaggtataatagttagttacattttgatacatatttacaaattccaacatgtggcccctctcacaggcagctgcttgattgtcttttcttttgagtatgggtcatgttttcctatttctttatatgctgagtaattttggattgtgtcctaaacattgttatgttgtgtagactctggattttgtttcatttttctgaaaagtgttgattggttatttggtgtttgtcttaacaagcatttaagttttataaataaaaaatataattctaagcctcacaactaactgaacggactcctcagccaaggaagggcattctaaagaaatattagttcaggccatgatgggaataggtagtcagacatgcctcattatactctcctccttttgtaattcagcacagctgaccagtattaacattaaagcagcccttaagcctgatagaatagactctttgtagcaataagataccaacatgacagataggaatattttgaaatggtcttggaaagctatctcttgtggggaaaatacactctgtagagaatccccttcccattccaggtcttttctctgatccaggagagaattaactaagagtctggcatcttttttgggttttttgtttgtttttgaaacatggtttttctctgtcacctaggttggagtgcagtggcatgatcacagctctctgcagtctcgccctcctgggctcaagcaatctttccccaccccccggtttcctgagtagctgggactataggcatgcgccaccacacccgggtaatttttaaattttttgtagagacaggggtgtcactatattgcctgggatggtctcaaactcctggggtcaagcaatcctctccctttggcctttccaaagtgctaggattacaggtgttagccactgtacccagccaccacatggctttaaactccatgtctctatcatttcagatgctctaaacgtccctgccatctggtccagatggagtcctcaggcaacccagagagcaccacctttttttactatgaccttcagagccagccgtgtgagaaccaggcctgggtctttgctaccctcgccaccactgtcctatactgcctggtgtttctcctcagcctagtgggcaacagcctggtcctgtgggtcctggtgaagtatgagagcctggagtccctcaccaacatcttcatcctcaacctgtgcctctcagacctggtgttcgcctgcttgttgcctgtgtggatctccccataccactggggctgggtgctgggagacttcctctgcaaactcctcaatatgatcttctccatcagcctctacagcagcatcttcttcctgaccatcatgaccatccaccgctacctgtcggtagtgagccccctctccaccctgcgcgtccccaccctccgctgccgggtgctggtgaccatggctgtgtgggtagccagcatcctgtcctccatcctcgacaccatcttccacaaggtgctttcttcgggctgtgattattccgaactcacgtggtacctcacctccgtctaccagcacaacctcttcttcctgctgtccctggggattatcctgttctgctacgtggagatcctcaggaccctgttccgctcacgctccaagcggcgccaccgcacggtcaagctcatcttcgccatcgtggtggcctacttcctcagctggggtccctacaacttcaccctgtttctgcagacgctgtttcggacccagatcatccggagctgcgaggccaaacagcagctagaatacgccctgctcatctgccgcaacctcgccttctcccactgctgctttaacccggtgctctatgtcttcgtgggggtcaagttccgcacacacctgaaacatgttctccggcagttctggttctgccggctgcaggcacccagcccagcctcgatcccccactcccctggtgccttcgcctatgagggcgcctccttctact

SEQ ID NO: 9733 - DNA, 6000 bp, Homo sapiens
acctctgcctcctgggttcaagcgattctcctgcctcagcctccagaatagctgggattacaggcacacgccaccatgcccggctattttgtatttttcatagagacggggtttcactgtgttggccaggctggtcttgaactcctgacctcaggagatctgcctgccctggcctcccaaagtgctgggattacaggcatgaaccaccacacctggcctttttttcttttttcttttcttttctttttttttttgagtcagagtctcgctgtattgcccaggctggagtgcaatggcacagtctttggctcactgtggcctccgcctcccgggtttaagcaattctcctgtctccgcctcccaagtagctggtattacaggcactcgccaccacacccagccaattttggtatttttagtagagaagaggtttcaccatattggctaggctggtcttgaacttctgaccttgtaatccgcccacctttgcctcaccaagttctaggattacaggcgtgagccaccgcgcctggcctttttctccttttttgagacggagtcacagtctgtcacctaggctggagtgcagtggcgtgatcttggcttgctcaacctctgctttctgggttcaggtgattctcagcgtaccaagtagctgggattacaagtgtgtgccaccacacccagctaattttttctgtttttagtagagaaggggcttcactgtgttagccaggtctcacactcctggcctcaagcgatccgcccacctcggtctcccaaagtgctgggactataggcgtgagccactgtgcctggtccagacaactgctttttgacaaagatgccaagcaattcaatggaggaaggatagtcttttcaccaaatggtgctggaacaattggctatctttagaccaaaggggaaaaaaaggaatttatatctcacaccttatctaaaaattaactcaaatggatcacagatttttatttttattttttgacacagtctcgctctgttgcccaggctagagtgcaatggtgtggtcatagctcattgcagcctcaaactctttggctcaagtgatcctcccacttcagcctcccaagtagctaggactacaggcatgtgccaccctgccctgctaattgttaatgtttttttttttgtaaagacacggtctcacagtgtccaggctggtctcaaactcctggtttcaagtgatttcccacctcagcctcccaaagtgttgggattacaggcatgagtcactgcacccagctggattacagacttaaacaaatgtgaaactacaaatttttaggagaagacattggggaaaattaccttatgaccaagcaattccactcctaagaatgaatatactcaaaagaaaacaaaaagaaaaaaaatacaaaaaccccaactgaagaacaacaacaacaaaaaaagtaaacataagaattgaggggggccaggcacggtggctcacgcctgtaatcccagccctttgggaggcgaaggagggcagatcatgaggtcagtagttcaagacaagcctggccaacatagtgaaacttcgtctctactaaaaataaaaaattagccgggtgtggtggtgagtgcctgtagtcccagctacttggtaggctgaggcaggagaatcacttgaacccaggaggtggaggttgcagtaagctgagactgtgccactgcactccagcctgggcgacagagcgagactccatctcaaaaaaaaaaaaaaaggttggccaggtgcagtggccatgcctgtaatctcagcactttgggaggctgaggcggtcagatcacgaggtcaagagattgagaccatcctggccaagatggtgaaaccccatctcttctaagaatgcaaaaattagctgggcgtggtggcgcgcatctgtaattccagctactcaggaggctgagacaggttaattgcttgaacccaggaggtggaggttgcagtgagctgagatcgcaccaccgcactccagcctggtgacagagcaagactctgtctcaaaaaaaaaaaaaaaaaaaattgagacagggtgtggtggctcacacctgtaatcccagcactttgggaggccaggctggcaaatcatctaaggtcaggagttctagaccagtctggccaacatggtgaaaccccatctctactaaaaatacaaaaattagccaagtgtggtggtgtgcacctgtgctcccagctacaagggaggctgaggcacgaattgtttgaaccaccggaaggcggagtttacagtgagctgagatcgcgctgctgcactccagcctgggcgacaaagcaagattccgtttcaaaaaaaaaagttggagttcgagaccaagtaaacaagaataatgtggcctggcgtggtggctcatgcctgtaatcccagcactttgggaggccgaggcggtggatcacctggttaggagttcgagagcagcctggccaacatgatgaaatcccatttctactaaaaatacgaaaaaatagctgggcgtagtggcgggcacttgtaatcccagctactcaggaagctgaggcaagagaatcgcttgaatctgggaggcagaggttgcattgagtggagattgtgccacagcactccagcctgggcaacaagagcaaaactttatctcaaaaaaaaaaaaaaaaaaaagaattgaaaacaggtattcaaacaaatacaggaatgttagaatgttcatcacagcactattcacaataggcaaaacatagaaactgcccaaatgtttatcaactgatgaatggacaaacaaaatgtggcatacccatttgatgaaatattcagccataaaaagtaatgaagtggctgggctcggtgcctcatgcctgtaatcccagcactttgggaggctgaggctggcggatcacttgaggtcaggagtttgagaccagcctggccaacatggtgaaacttggtctctatcaaaaatacaaaaattagccaggtgtggtggcgggcacctgtaatcccagctacttgggaggctgagtcaggagaatagcttaaacccaggagacagagatttcattgagccaagattgtgccactgcactccagcctgggcaaccccatctcaaaaaaaaaaaagtaatgaagtactggccgggtgtggtggttcgtgcctgtaatcccagcactttgagaggctgaggcagctggatcatttgagcccaggagtttgagaccagcctggaaaacataatgagaacctgtctctacaaaaaaatacaaaaattagcagggcatggtggtgcacacctgtaatcccagctacttggaaaactaggtgggagaatcacttgaacctgggaggcagaggttgcagtgagccaagagagtgcccactgcactccagcctggtcgatagagtgagattctatgtcaaaaaaaataaagggttcctggattggaaacttgcatgtgcgcttaacgcttctgctttcggaaaggtagaacgagcaataggcattccttttggcttttgagttggctgtggtgtgactccttttgcttcttgtttctgatcttgacacttatgaggagtcatctttgagtctgggttttcatcagtgagtacagtcaagccaagaaatgtgtctgggcaggttccctctagcacagaccgaagaaaacagcaacatggaacaagagaagtaggtttaaacttggattccatcagagggctcagtagggaagataattctagatccctgggcctcctagagttttctattctgattttattggtttaatgttatttgtttgaaagcaccagaaattaactttggccaacataagcaaaaagataatttattagaagggtatagaatagcttacaaaacggaaaaaaaagttgatgagccagtcctcagaaaggatgggagccagaacagcctggggatcttgggagcaggaacctctgtgggatgaataaacatcatgaatatccaagttcctgtttgtttgtgtttagaagtcaaagtccagggagagaggcccaatttgtgtagcttgggtcggcacggggcaccttgactcatagttaatccaggttaaatcctgtggagcgaggtggttcccctgagccataccaggctgctgttaacttatggaaggggacgggtactgggcaggcaggaacaggagctgctctctgcctttgcactcccaggaacaactataggaccaagagcagagagttctaccagagtgaattttgcttggtgaccattatgtcagagacctaagctttttagcgtttttatgttgagggctgacctcgctagaccttcttcacgagtgaatcactatttgtacaacagtgtgttttgaggaggccatccctatgtaaagggtttctctgtatccctatgtaaaggacttttctcagtgggatttgtgcatagaggaggggggggaagaatgcctgtttgacagagagcagctgaaggtgacgtctgttacacaggcatggtttcgtgtgccacacatgagaaaaatgccctttggggagtggccttttagcattgcctaatataggagggagggagttgggcggggagggagagagagagagagagagagagagagagagagagtgtgtgtgtgtgtgtgtgtgtgtgtgtgtgtgtgtgtgtgtgtattttgggattgaggtcactagaccttgcatataggcattctgaaaccattccccagccacataactatcgcctccctccagcagccctagtgtgcagagccaagtactctttgttaactggcttttctcccttcttaccaggtacctgcacatgttgttctttgtcagtgctgtcaagtgtgtgccagggtgatccatggtcactttccgggatggcagcaaggtgacttcggctgaggatgaccctgactgaaaggctgcgtgagaagatatctcgggccttctacaaccatgggctcctctgtgcatcctatcccatccccatcatcctcttcacagggttctgcatcttagcctgctggtatgtttttgggttgccttggatatggtgggccagtgtcttaggacagtaggttttctaaccctaaccactatggagcccttggcctctgtatgctttttacacaatgggagcttgggctccttataactgtgagtggagaactctagtcctggcctggttagctaatataataaaatagtcctggctggccctgacctactgattcaccagatttattcatatcactggtactctatctcaaaataatgtttagatacttctaagacactgaaataattgaaagatatgatacttcagttttctttctcaatagtagtggtttcgttttagtacctggttaagtgcaagagccttttttgtgtgttgcgaggcaaagtccattagaacagtatcttggacaacctgtggcaggctaacctcagagacttgcttctttgctctctagtcattttcttgtgttcacatggagcttgcttcagacttcttgttgattcttgtggccagctgcacttgccaaggacagttgtgagagctgtagctgcccttgttcctgtctgtctttctcaaggcctcatagaagcctgaaggctatggctgacaatgacgtcgtaaaggaggagtttgatatgagatgacatctgatgacccttttaactctaaaatgctgacagctgtgaaaagagcccatcttattcttttctctggaaagaattctgttcttcagattcattgtctaaaacatttatagatgttttcagtgctatgctgaagggaggatgagaagtcaggagggaactccctgttcagttcagttgctaatgatctcaagctcttccctgattatcagtaagaaagatgaactttggccaggtgcagtgctcatacctgtaattccaacactgggaggctgaggtgagagaatcact

SEQ ID NO: 9734 - DNA, 6000 bp, Homo sapiens
aaattctgtgactcgggcttccttcccgactgcccaccttcatgatgtgtaaggaacatacattttgagggtacctcacccactgttcatttgcatggtcaaagtgaaaatgagtggaagttctccaaaaatgatggccaacatcctggcacctccaggtgtgagaaatagctttgcttggtgaatgggataatgtttgtcaggatgcagtttagacagtcccaagttggaggcaggccttgagggcagaagattctgtgaaccttgggggacagcttttgggtactcacagatataaaccctgtgcagaaaaaaagaagtgattgttttcaggatgcttataaatcgagtgaagcaaaagaagaggattctgtgtctgccatgagatgaacgccctgctcttcacgaaggtgtgcctctaataaagagagccaaagccagctgggtctcaccagattcctatactttctcaaggatgttgggggaggttaatcctttatcgaaactaaagactggtttataaacttgtgtgtgaattatttttagaatattggaggacatgcaagatcaaccagtcttacataggttccctgggtccttaccatggagtaattcccccacattcaattaagaatagtttaggctgggtgcagtggctcacgcctgtaatcccagcacttgcattttgggaggccgaggtgggctgatacctgaggtcaggagtttaagaccagcctggccaacatggtgaaaccctgtctctagtaaaaacaaaaaattagccaggcatggtggcacgcacctgtaatcccagctgctcaggaggcagaagttgcagtgagctgagatcacgccactgcactccagcctgggtgatagcgagactccatctcaaaaaattaagtttatttttttagaggtggggttttgctctgtcacccaggctagagtacagtggcacgatcataactcactgcagcctcaacctcctggactctagtgatcttcccaccttagcctcccaaagtgctgggatcacaggcgagagccaccacgcccagccaaattttgcatttttaacaagttcccaggggatgctgatgaagctggtcaaggaaccacccttggagaaccagtggttaagaaggtcgtatgatagagcaagatccctatagttccttacagtttattgtatgagacctttcatacagtaaacatttgaggggctactatgtgccagacattgatccattaatacagtgtaattgcagttgtgaatacagtaggcaggacccatgccatccaggccacttattctaatggggtggggtacaagaccataaacggttaataatattttgcatacttccaagtgttcatgaagaaaatgaaacaatgcaattaagagtttcctggggacaatgtggatagtctgtgaattgggtggtctcccatgatttctgtcctgctggatatggtagcctgaggggttgaccttcattccagaaaaacatccatctgaatacccagagcacccttttgtctatataatgccagtttgtgagagtactctgcaaactgctctgcctgtgactattacaaaacccctgctttctacagttccaagagcatagttctttcgctcccgttaaagggggatgtcttcctggaaacagtgtgaaagcaccctcaatcccctgttgatggattatctccatttaaggaggtggtctcagaatgggatgcaaaggtatatccctgaaggaagtgctacctgccttcaggcccaaacctcctttgttggatctccttgtgaacagctcctccccccagcttcatttccctgtggcttgtttttaggcatgccagcactctggccattaggaaacacgtgatcctgaagtccttgggacaaagttgaggcaagactatcatacccaaagggtgactaaagggatagagaaggtgctatgaatcaacctaaacagaggttccaaaaccagctgcagctagctagctagctctaggaccaccaattcctgttccagccctattgcaattcttatggaacccctgcctgtcatgcagaattgtagtcatctttactaccactgcccccaaaggcctttccatgcgcttttaacctatagagggcagccagttgactaattctgacagcaactttacccttcaggggagataatcccaccacccctctggaaaatggccatgccttaatacagtgtgacaaccaccttcagacaagtgacaaggaaaatgcctcctgctctggttctgtggtaatctaccatctaaggtgccttcttggggcagttggtccagaagaatgtaaggaagtggcagcagtcttggatgatgatagccactcagtttcattctgatcctccctagcagatttctatagcagtttcagaactgggcaggtggtagaaggtgggtccaaccaaaccggcccaggctgattgatgtgtctggtttgtttcagacatggatgagtttcctgtggcatccctgtttacagtcagcttattccacagtagctacaggatgcccgagaagtgcttaggtcacctgctgaggcagcaggtctcttctgcagacaaacttagttgcttggccgtgcgcggtgggctcacacctgtaatcccagcactttgggaggcccagctgggcagatcacctgaggtcgggagttcaagaccagcctggtcaacatggcgaaaccctgtctccactaaaaatacaaaattagccggtgtggtggtgcatgcctgtaatcccagctactcgggagcctgaggcaggaaaatcacttgaaccctggaggtggaggttgcagtgagccgagatcatgccattaaactccagcctgggcaacaagagcgaaactctgtctccaaaaaaaaaaaaaagttgctccacatggtgaggccctgtgtttgcttgtgctatgtggctttctcccagctggtttggctttggggtaatgaaattcaagaggcctttccaatctgtttgcagacccattgcctgaacaagattatcaccttcaggttgtgatgtccttagatgacagcacttgctcaactgagaatccagagttttctgcagtccagaggtggtggtcagcacaaagaactcagaccccctacctcttagcccttccctttctgggggatggtgtaaagaggcacatcgcgtaaaatggtcacagagcagattgccatgcagcctagaaccaggagtctggtcttgttgctgtgttccctggtaagagatcatggcattatttcttaaatggctaagtgaaggtgggagagttggggaggggaggagggaggtcctctgttctgccaattaatagtctacctctgtgtcctgattcctcttctcaagcaggaatgaaaagcctccatattaaaacgaaagggtttggaatcagggtcttagttcaaatcctgtccttaccacttcactagcgtactcttggacaaaattgctaattctctcagtttgcagatgtgtaaaataggactgacgatatttgtagtgtgattgtgaagaataaggcaaattagcacaaggaaaactaaaaactcaatatgtttgtgttagcctgtttgtgttgctataaaagaataaagaatatctgagattgggtaatttataaggaaaagtgtgtttggctaacggttctgcaggctgtacacaacatagagccagcatctgcttccagtcagggcctcaggaagcttacaatcttggcggaagacaaaggggagccagcatcacatggtgagagcaggagtgagagagaaagtactaggttcatgtaaacaaccagatctcacatgaacccatgaagcaagaactcattacctcgagcaccaagccattcatggggagtccacccccatgacccaaacacctcacactaggctcacgtccgacactggatgtcacatttcagcatgagatttggagggaataaaacatccaaaccatatcaatgttagtggttaatactgaggacttaaagccaggaatttccagtccacacagctatgcccccagccatggcaactggagcactcctctggactgcagccccctggtcaagccgggggtttttcatgcagtcggaggctggctgcattcgtggcaatggaccttgagcctacctgagctctggaggcaggctgccaacccagtaagaacctcagaggcatgaagaaactgttgacacataaaacatccctgatgcccaggtgcaagagacataaatacggggacatggatataaggacgtcagtttccctttctttcactctgtggttcctacatcttctatctcttctttaccctaccacagtcctgtgctcagaagaaatactcatttgactctctggttaccaagcattttcacatatgagagacaggttgctaactcaaagtcacgctgcagctgaatcctgcccttcccatcacgttccactgactgaattttcccattcatcttgtggaggtgttacccaaccaagtgtgctatgctcagttctcaaactgctagtgagatccactagggaagatcagaatgaaactgagtggcaacaattgatttaaagtctcaagttgggccgggcacggtggctcatgcctgcaatcccagcactttgggaggccaaggcgggcggatcacctgaggcctggagttcgagaccagcctgagccaacatggagaaaccccgtctctacaaaaaataccaaattagccgggcgtggcatgcctgtaatcccagctactcgggaggctgaggcagagaatcacttgaacccaggaggcagaggttgcagtgagtcaatatcacaccattgcactctagtctgggtgacagagtgagactctgtctcaacaaaaaaaaaaaattccaaattgaaggaagcgttagcagacttcatctccaggaaagggaagaagaagatacttaaataattaacaaaatatatttaaaatgagtgggagaacttcctccattaaaccctgttgaaaatgtgtgagtggttgtcatgccccagacatcaaggaacccatccatgaggtcttcccacacagactggcctcaggaagggaaggaggaggtaggccgctctgacagccacaacccgagttgaggaaacaagcaaaggaacacagagagtctacatacagtaaaaggtgacaggagttaagctgcacacaagggaagcagagatgggttggaggcagttaagggtgcgttgctgcctctgtggctgaggtgagtgcaaagccctacatggtcccctgtttagagaaggctattgtttcaaacatattttacttggtccccggaggcagcatgaaactatgaaagaaagagccttaccccttttttcaaggctctccagaccacagttctgggatgggtgtgggtggttgccattcgttcatttatgcctgtctgatatggagcctccctctgttaccagccctgtgcactcaagtgccttgcagtccagtgaggaataactgtagataagatgagatgatgggcattaagtgtaactgctgagaagccttcatagagggaaaggtgataagaactgagtttttctggcatgaggagtttaccaggcaggagaggtggagacgctaggctaggcaaataggctgcagccatagttctgctgagaaacaggttttgaaccaaggcaactccatctggagatatgtatcagaaagattaggagatagaatctccatcttggtcacttatttggtcttctaagacagcaatgggaccgtctcttaaatactggagttgtcctatctccttgggctgataccctgaactgtcatttgggtgagtaacacattaaggggtagacggtcggtttgggggaataaactaagtaactaggttgcggttcctcctgccgactaagcagacctcctggtgc

SEQ ID NO: 9735 - DNA, 6000 bp, Homo sapiens
cccaagccagcccggagagaaaagacctgaggaggtggccctggggctgcaccaccgcctcccagcactgggaagagccctggggcacagcattcagcaacgagcgacctccacagccaagacttggtgggacagatatgaagagtttgttggactcaacgaggttcgagaggcccagggaaaggtgacagaggtgaggaggggagctggggtggctggccccgccctctgacttgggaaatgtgccaaaccagtcacgtggtgctgggtagccacatccagacttgtgtttagcctcatttctcacgtggaaacctgggcttgatgcttctggggtgaaggtctccatgtaactgtgccacctactttccccgaaaacagttactgtgtaccagtaagtccctggccactaacatccactctgtgaggccagcaaatacttcctttgtggaccatttggggattgatggtgagagttacgtggggcttgctgcggtactgttactgtgtgtaattacaacatcttttgtgaagatagagggcactaggaaatgtcacagtgtgaggtggaaagagctggtggtggttgtcaagtcctttgtggtggcagaaatgcattctgtcatctctgttcccactcctgcttaggcatgtagtagtgtagcgtggtgggaagaacctggggttcagctgggactttgagacaaacagtgccatctctttccttggagattgtgagcttggctgagctggtgtttctgggtttataaactggaggccacagcagtgcctttcatggcattgttataaggcataaataaggcaacacacgggaaacagcctaccaacacaggtttgatggacacaaattgtgtgcattgttagctgttttcaagttttttcaggggcatgttatttctgcttgaatggctaaatctcgtgattctgatgggtgtggcccaaggctgcactttgagcaccactgggtgagccaggattagtgtctaaggaattccgtttccaccctttgcagctcacaccccagtgacctcttctgggaatgcctcgctgggaatgcagctgagcctgtgtgggtgtggagagaaggtgcagatggcctccggttttctctttgcaggctgagaaagtgttcatggtggctcgagggcttgtccgagaggctcgggaggacttggaagttcaccaggccaagctgaaggaggtgagggaccgcttggaccgtgtctccagggaggacagtcagtacttggaactggctactctcgagcacaggatgctgcaggtaggcacctcaggaggcagccctttcgcacctggacagtgaccctagcctggcagatcatggaggggccgggtgggaaccctgactggtctgtagtcagaggcctggtacagaggtgagccagaagctcctatggatggacagaaccccaagcttccagagtctatccatatactttcttctggagtactggggccaactcttcagggcagcgtagcctgggactcagaatgctgaggaaggagaactatggaggggctggcctagggagtgctggacacttccctttgtgtagacataagtgcacctctggtcaaacccagaactgctcaggtgggacgatcatgcaactcactttgatcactcccaattcctttgcccttctgacccagccaggttggtgctaccttcattcattcagcatgggtctatggaacatgtactctgccaggcacaaggtagtgagccatctgctggtggctatagctgcagggccaccttgtgcccatgtaatccaataacatggctttgcttctgcaggaggagaagaggcttcgcacagcctatctgcgtgcagaagactctgagcgagagaagttctccctcttctctgcagctgtgcgggaaagtcatgagaaggagcgcacaagggctgagaggaccaagaactggtccctcattggctcagtcctgggggccctgattggtgtggctggctccacctatgtgaaccgtgtgcgactacaggagctgaaggctttactcctggaggcgcagaaggggcctgtgagtctccaagaggccattcgagaacaggcgtctagctactcccgccagcagagggacctccacaatctcatggtggacttgaggggcctggtacatgctgctgggccagggcaggactctgggtcacaggcaggtagtcccccgaccagagacagagatgtagatgtcctttcagctgccttgaaagagcagcttagtcattccaggcaagtccattcatgtctagaaggcttacgagagcagcttgatggcctagaaaagacttgtagccaaatggctggggtggttcagcttgtaaagtctgcagcacacccaggcctggtggaaccagcagacggggctatgcccagcttcttgctggagcaggggagcatgatcttggcactgtcagacacggagcagagactagaagcccaagtcaacaggaacaccatctatagcaccctggtcacctgtgtgacatttgtggccacactgcctgtgctctacatgctattcaaagccagctaacccctggcccctcctccagagggtctgaggcaatagctgtgaatgtggatttaagtagagaatcgtagcaatgaagcgagcctttgggggcatgtacaacctcaatctgaaggagcagtatctgtgtggctcaccagcaggcatgcttcgctttgtagacaaggttcatttacattaattatcaaaactttgtgctaatgtccaattaaaatatcctgagttttattatttaaaacaatcagactgagtttttttcattaagaatcaagatccaagacttgaaggttgggcctggagttggggtagtcaccccctttagttcctctctcatctcctctctgtcctcttttctgaactgttatggatgcactcctgaggcctagattttcattttggatttcctccagttacctgactgtccggtgtcagatggcctgggagttccagtgagtggaacctagcctgctgcctactcatttcgtgaccatggttgcttcccatctcctggatcactttctctaccatgtgggggagaacttcctggttctagtactggaggagtgatcagaggagagcagggaagggagattgggagaatggttgataaatgttgttggggacataagtatagggattggtggccagtctggatccctggtacagagattgctttgggcagcagtggtgtgccacgggggctgggtgcacacccccacacagcccggggatatcttccacaggcataggcagagctcaggacaccgggagtgtgcatggagaggcagtgatagggagggggggggtctcccacaggtgggaggtgcagtggggcatatgtatgatctcttttcagaggggaacagtgacccttgaccttgactaaatggccatgggtggccttgtgtgccctgagtaaacaggagctttgggctggtattcagtcctggtgttggagtattggaagtcaggcacattccagagaacccactcccctttgagagcgcagggtagctatatgcaggggggccgcaggtggggactcgttcactggtgcctgtgcagagctctcagagcctgtggagtcaggagtgtttcccataaggcatactttcttcttggagcctgtgttcagtcttgggcagtgagcatggcccaaatgccccccaccccaggttctcagcacctggtccctcagtcaatctatccttggcgagtaatggctccccagaatggcatgggatggaaagacccctgtgcttagagtgttcacattccttgtagggcaggaggtagcgtatctgtgtacagatgaaaggggttgtggggtttggaagtcccagtttcctctggggtgagataggtcctgaagtgtgtgcttggatgaatggatttggggagggagggattctgtgcatgtggagggggctgctacaagctacataggcaggaaagccaaagtgggtgagggactggggcagactgtcctggctggggtggtgatgggtgtgggggagttgtgcagaatgatgtcacaggcccggggtgccaggttggcagtctgaggtcagaggctaagggtgagggatccagggagggattgctatgctggtgcagacaaggtgctaagcacctggactcaggtgctggaagtgggagtggaggaaaaggggtgacctgacaggagacccttgatagctggtgggaggtgggaagagggtgtctctagctctagggcagtagccagtgtggatgacctgaacctcctgattgaggctcccctagcctgtggaggccttggaggctttcagatgatgcctgtgacgtttttgcctcccaggaagctgtgccaatggctttgagccaaagtcctccaaaagtcctaataggatgggccaggttctggtcctgagttagccgtgggcatgccagggtgtgaagggccctgcacagggtacaaatggtccccaggagagaacctttctgccagcgtttcctcccgcagaaggcccaggtgtttgccagtgagggagcccagacttgcccaacgcttctcagcttggggtgggtccaggtctgggtcctgggctgggaagaaaggaaggaagtgagcccttgcttgtgcgcctctgcagcccaggttccctgccttcacagccccgctagaggtgggatcacccccacttactggtgagcaaataggctggggggggttggtgtcaggttacatggtttagttgatggcgcaagcccaggtccaaagcccatgctcttctcaaacagccagaggtgggggccggaaggagggattggctgttggggagtagtgggagcaggggcggtgagcaggggcggtgggcagggccaggtgcgcaggggagaaacaaggcgccttggagttcaggtaaagaaagttggggaggatgaccaccggagccgggtaaggaagggaaagggagctccgggcgcggggcgaggccgggcgctggcagaagaacgggtcgggctggtgagggactcgggtgctacccggctctggacgggcgggaagaggccgggacgctgttccaccagcacctgcgggtgcggagcgcgaccccccgcctcggctcctggcaaccaggaaagttcccagttccggttccaaggaggcgagcaggtgaggccgacggggcggggcggctctggctcccggggttcactcctcacccctccgggcgacccgcgttgccatggcgaccgccgcggtgcagcccgcccccgccctcccccgtgcgggaggggtcgggtccccagccctcggccgatgcggagcccgcggggctggaatgcggggtcccgggcggttcggggccgcgcgcccggctctccgggctgcttccggcctggcccgggcggcgggcggggggagggcagcccggcaggcgagggggaaggagcggagacgagcccggccgacgcggctttgtctcctttgttcccggcggtggcagcgccgcgcgggaggggcgggcagcgggcgcagttttccgcccctcggtctccgggtaacagctgcggctccaccagacccggggagaggccgctgcgcgcggagcccgagcccggagcggccgacgcccgcctcggcgcgcacatcccgcggggcccggccgggtggtgagtgcggggctcggggccagggcggcgaggaacggggctcccgaggtggaacgggccggggccccgatcccgccgggcaggggcggcctgggtgagtggtgggcggctttggttttgagagttgggaccacacttctccgcgcgaagggaaactctggcgactccgcctggaacgcgattgggagactgaggaggtggagctgctcctccgcgccccctcctcgccgtcgccgcggggg

SEQ ID NO: 9736 - DNA, 6000 bp, Homo sapiens
ggccttcccttcttagcccagggtagcagtgggtataggtagggaggctaggtgactgggtttaggaatatttcatttgggaggctgaggtgggaggatcacttgagcctaggagttcaagaccagactggggaatatagtgagaccccatctctagaaaaatgtttttaaaaattagctgggtgtgatggtgcatgcctatatagttccagctactcaggaggctggagtgggaagatggcttgagctggaaggttgaggctgcagtgagccatgatcacaccactgcattccagcctgagtgacagaaagccagaccctctcaaaaaaaaaaaagaaagagagagaaaggaagggaggaaggaaggaaggaaaggaaggagggagggaaggaaggaaggaaggaaaggaagcaggcaggccgggtgcggtggctcacacctgtaatcccagcactttgggaggccaaggtgggtggatcacctgaggttgggagtttgagaccagcctgactaacatggagaaaccccatctctactaaaaatacaaaattagctaggcgtgatggcacatgcctgtagtcccagctactcgggagactgaggcatgagcatcgcttgaacccgggaggcagaggttgctgataagattgcgccattgcactccaacctgggcaacaagagcgaaactcggtctcaaaaataaaaaaggtcgggcgtggtagctcatgcctgtaatcccagcactttggcagatcacgaggtcaagagatcgagaccatcctggccaacatggtgaaatcccatctctactaaaactacaaaaattagctgggtgtggtggcacatgccttagtcccagctacttgggagcctgaggcaggagaatcgcttgaacccaggaggcggatgttgcagtgagccaagatcatgccactgcactccagcctggcaacagagcgagactccatctcaaaaaaaaaaaaaaaagagatcacgtccaggggcggtggctcacatctgtagtcccagcactttgggaggccaaggcaggaggctcacttgagcctggagtttgagaccagcctgggccacatagtgaaatcctgtctctacaaaaaatataaaagttagctgggtatgatggtgtgcacctgtgttcccagctactcaggagcctgaggtagaaggatcacttgagccagggcatggtggcgtgtggcgtcccagctacttggaaggctgaggcaggagaattgcttgaatccaggaggctgaggttgcagtgagccaagatcacgccactgcacttcagcctgggtgacagaatgagactctgtcaaaaattagcgatgttggcatgtgcctgcagttccagctactcgggaggccgaggcaggagaattgcttgaacctgggagatggaggttgcagtgagcagagatcctgccactgcactccagcctgggtgacagaatgagactctgtctcaaaaaagaaagaaaaaaatagagatcataagactgagagaatgaaccctttgtagcaataagataccaaagtataaacaagacattaaggccatgccaggcaagagttaagccgttcaccaaagaataaactatgttctaactgctgcaaggtttttctttttctccagcagctaaacaagcactggccttgagataagcaatatagaaacaattgcagttcatccatcaccagacactgaccccacaagccataactatagctttgattgcacaagagatggattttggtgactttttcctaataagagaccactgaccagggactggcttcagttggtttatggaacctgtgcactgagtgcttttgtatccttcattttgacatatggtgctaattgtatttcttttcttttttttttttttttttgagatggagtctccctctgtagcccaggctggagtgcagtggtgcgatcttggctcactgcaacctccgcttcccggtttcaagtgattctccttcctcaccctcctgagtagctgggactacaggcatacgccaccacgcccagctaatttttgtatttttagtagagacggggttttactgtgttggccaggatggtcttgatcttctgacctcgtgagccacccacctcggcttcccaaagtgctgagattataggcgtgagccaccgcacccggcctgtaatgtatttcaatgttaagtctccaccccaaagtgaacatgggtcatatacaacacacatgtttattcagtatacttgcattaggacccccttcatgagtatctatagctcttcctgtaacctgttgaatatggtattttttgtttttgttttttcttttttgagacagagtctcgctctgtcacccaggctggagtgcagtggcgcgatctcggctcactgcaacctccgcctcccaggttcaagcgattcttctgcctcagcttcccgagtagctgggattataggcacatgccatcatgcctggcagattttttgtatttttagtagagacggggtttcaccatgttagccaggatggtctcaatctcctgaccttgtgatccgcccacctcggcctcccaaagtttgggattacaggtgtgagccaccgtgcccggccgaatatgtatgtttagccaagccattcgacataaagctcctgcctctttttaagggtctgtctctggttttgaccagaagcccacctcccagcctgcaggttgtaaccctttataagaaataaagtcagcctggcacggtggctcatgactgtaatcccagcactttgggaggctgaggtaggaggatcacttgagctcaggagtttaagatcagcctgggcaacataatgagacccccgtctccacaaaaaataaaaaaaaattagctgggtgtggtgtgagagcctgtggtcatggcatctggcatgatttttataaagatagttttattttaagtataagagtagtttttgggtaaggtgtggtggctcacccctgtaatcctagcactttgggaggctgaggtgggtggattgcttgaggccaggagtttgatatcagcctggccaacatggtaaaaaatgcaatgatcctagcccttgcctcttcctgtacttaagatactgtctgacaggattaatgattatgcttctgtgacctataaacagatgtactcttgcacccaaaccttgatgagatttatgctctaatgtaacttctgagcacatttgatgtaatttctgagcacatggagagccgccaccaccagtgtataaactgtcggaaacactgctttggagcagtctagcagaaactccctgaaaggctctcccgggttgcaattcttggtaagacttctgaatagaactaactttaaatatttaaaagcttgtttttttttttctttagttgacataacaaagcataccttagaagtctttttttttttttttttttttttttgagacggagtttcgctcttgttgcccaggctggaaatggcgcgatctcggctcaccgcaacctccgcctcccgggttcaagtgattctcctgcctcagcctctggagtagctaggattacaggcatgcgccaccacgcccgtctacttttgtatttttagtagagacggggtttctccatgtcggtcaggctggtctcaaattcccgacctcaggtgatccgcccacctcggccttccaaagtgctgggattacaggcatgagccactgcacccagccagaattctttttcctcttacagaaaaggaaaggtttcaccatgttggccaggctggtcttggactcctcgcctcaagtgatccacctgcctcggcctcccaaagtgttgggattacaggagtgagccaccgctcccggcctgtacttagttcttttaaagagaaaactggcagggcgcaaaactggccaacatggagaaaccttgtctcttctaaagaaacaaaaattaccgggcataatcccagctactcgggaggctgaggcaggagaatcgcttgaagccgggaggcggaggttgcagtgagccgagatcgcgccattgcactccagcctgggcgacagagcgagaccctgtctcagaaaataaaaaataaataaagagaaaaaaatactgactttcagcaccaacttgtggtcccaggtaagtttccacgctggtactttagccctgggctcgaacctgcggacacgctgtggctgcaactccccgcccgccagacctcagtacgcagcgcggctggtgagaaacataatgcactctgacttccacgcgtggaatggggagatggactgcacggcgggcggacctgctcgggctgatggacggcaggtggactgatgtgcgcagggactggcggcagcgcggtcagagccagtcagccaaagccaggccagcacaatagactgtcccggttcccgccaggaggcggccgagcaccaactgtacggtactgcgcctgcgccgcgaccgccaacgcgcccagtctacgcttgcgcggcgcaacagggccgactgcagctggaagatggcggcgtccgtggtctgtcgggccgctaccgccggggcacaagtgctattgcgcgcccgccgctcggtgaggtggtggcgagagcgcggggcttcgggacagggcttcgggaagcggacaggtgtgggctgttagcagtggcaggtcgaggtggggaggacgcggggtcagggccgtgggaaggtcacggcggagggcggggaaaggtatctcgccgcttgcctaggggcggggttcgggggtcctcctgaggacctgggaggtggggagcgatcccctgaccgagtcctcactcgcggctgttcccttccacagccggccctgctgcggacgccagccttgcggagtacggcaaccttcgctcaggcgctccagttcgtgccggagacgcaggttagcctgctggacaacggcctgcgtgtggcctccgagcagtcctctcagcccacttgcacggtgagttggggacgcttttggggagagggcctccaggttgggcctgccgtcttttccctggttggggtgtgaccttgggctcgagtcttcccgtttgtggtttgggttcggacccaggaccactcaccccgagaatggccccattccctaccctagccacgccttggcttcacgggacaatcttcactataagccaacattatttagcatataatgcccgttaagtaggcggccaaattcttttccagccttttgttaaggagcccatataagggaagtgatcatgtctcctcttataatgcggaaaatgggattcagacaccttaggtgacttgcaggggtccaggtctgtcagcctcactgcccaaggtcataatctccaggctagaccagaaatacattttaggaagcaaatgcattttaacagtacaatgaaatgtgtgattttccaaaaaatacaaattctctaaattgacacaagaaatcttgagtcacagatagatatatgaataggtgagaagattcccaagaaataattatctcctcctcctttcagcccccagccccagggccagatgtttttattgacacatccttttagttttccagaaacaatgtcctgcgatttaaattgttactaagcataggaaaaggtggcctgcaacttccttgttatatgtcacttgttatagtaaagaatgctatattacatgaactctaaaatgtgctagattgtaaggagctgtctgtgctccagtgccagagaaagaatctcaagaatcttgccaattttaatcaaaggatactatagattgtaaaatgcctcttgcattccaagatgttagatgtgaaatacatgttcatctaagattgtgtgatatatggtatatgcattgacatctcttaggaaagcaaatatcacatgttctcacttatcagtgggagctaaaaaatacgtacatacagatg

SEQ ID NO: 9737 - DNA, 6000 bp, Homo sapiens
agacctccataagatctcttcctttcatcccttccggctcagcctgcatactgaagggtcctagcctccctttcccccccagttattccaaggggataataaccctctgtttaggctgcttttcctgacagtagtggggctgaacctttgagcgtagtggctgggaaagcagggataggcctcagtattgggggtgaggctgaggaaaaaagaccctcacccagttatgttctccagatccagagcgctgacctacccacccaacccccagcccagtctcccagaggcccgcacaagagtaccagattggcttggctctagtgggctcctggagatgggcgctccctgtgctagagatttggctgtagacaccaggaagacccaacagtggcaattcaccagccacctggggtgtggggtcaggggagacgcagccttcattcctttgtgcttcttcctagcttaggcttctgctatttcagtctttgacactgggccagcagcatcttctggagtgagaccaacatgcccaggccaccaccctgcccactctagaagtcctgggtgaaggcaaagtcctgatattagaatggctgcccttgctgaacaaatcaaggatgagaactggccttggtggctgcctggatggtgtgctctggtgtgggctctcttcttgggggtctgacatagtagcactgcccacccatcacctcacttcccactttcttctagtagaccccaaaccccaggcaaaggattctccaggcaggccaggcaccgtggctcacgcctgtaatcctaacactttgggagatgaagacgagtggattgcctgagttcaggagttcgagaccagccagagcaacatggcaaaaccccgtctctactaaaatacaaaaaattagcagggtgtggtggtgcatgtctgtagtcccagctacttgggaggctgaggcaggagaattgcttgaacccaggaggcagaggttgcagcaagctgagatcgcgccactgcacctccagcctgggcaacagagtgagattctgtctcgaaaaattttttttaaaaaaaggattctccaggcatattatcctcttttcttcccacttggggttgggaagaccacagacttccccgtgacctgtgacatttgccatgcccaggtgtggggctccagcccagcctgtttccttctccctctacacagctctatgttctatgatgaggatggggatctggctcacgagttctatgaggagacaatcgtcaccaagaacgggcagaagcgggccaagctgaggcgagtgcataagaatctgattcctcaggtgaggggctgggcagcggtcacagagcctacactaagcgtgtggaggtggacccagatgggatctgttgtcatggtgggggcttttgcggggggatctgggaggaacaaggaagcttcctgaagtagaggccctgagctgacccttactagcctctgtttccatggcagggcatcgtgaagctggatcacccccgcatccacgtggatttccctgtgatcctctatgaggtgtgaccctgggaggtggcagacagaagcaccccctgccccggcaagaaactcccaggctcaatcaaggtgtggcttccattgaggagcccaggctggggccacaaccctgaataaactctgttggcccataaccttcagctgtgagcgggtcggtcccacagtattggttgggtgttggtttgtgtgtggacaagaggtggttggtgggtggtgaaggctaatggcagagttagcaccccactctcccaagccacccctgcaagcagcacagcagggcatataccagtcaggaatgcccgttacctggttccttgcctggtctgctttcttccaagtttgcctggggcctagccctgctagaggctacagcactttacaagcaaggtatgctttcttccagcccctaggctgtgggcactgtatacaagtaggaacttcctttccttcacttcccttttaacccctagtcagagcatttcagccgtttgctacctcgattcctcctgtgttggacagaggctgggggcagtgccagcctgattcttccgacctacctgccatttgttcccgccttcagatggatggacagtttgctggctattgataggagtggggactgggtgggggcttctccctctacccagggctgggctgatccccctactgcaactaactgttgccccccaaccccgaacccccagttgaggagttgagagagtgcaggctggggtcaggacaggctgcggatgcttgtgcctatggggagttactccaacccacctattctgtctaatctccatggctttgcaccaaatcctccacccctccaattgggaggggactgttcaccaccttgtggtaagggacaacaccctaaggctggtgccagtagttatgagtagcctaccaccccctcccttacagtaacccccaccccttcaggatcagtcaagggaaagcactagaacccctgggtagggaaagaaaggagggaaaaaccataaaaggaatacttataatgtgaaggtttgtaaatagtccatgatgatgtcgtggcagagtctgatttctatatagaggtgactttttttttaagtactgtgcaagctctgtgcttctataatgtgggaaatggcttggggaggatggcccctagcttaggaagactgttgtgttatttgttcaatttcaataaaatgatttgtagatcctgcacatgagagtggcatcctgtgggggctctgacacccagtgtctagactaccacctgggttcaataggtaggcctggcacaggactctggcaggccccctatgaccagcaaagcccaagagtaagtctgagcccagcctgtggccatcccaactgtggccagcaggtggctgtgtgttcacacagacctcactgcaggccccctgcagggtgggagggcactcatttatctgttgtgatccatgtggtggtgacccttggaatcagaaggccctgggatacttcactaaggattggccccacctgcctgatctaaggtgagagagtgtgacccaagatagttctggaatatctgtcttagctgtagcatcgccagctgatcctaagtggggtcatggcctgacccccatggacctcaaaggcccagctttaatggacagcagccagataggtgtccccacgcctttggcctactgccaggctcagcaacccaaactcatgtgcctcctctgaggcctgcctgcggacaccatgggagaatgagctcaggctgctgtttcagcaagcaaggctcggcccactagtattgcccctgctgtctgttgcccccatcttctcatcacctgcagcctgcccactgtggtcattctgcctgcacttctcaggggctgctataaggcagattctctactaggcttaggctttgactatcagtccaactcccagttaaagaggggagatttcagggacaggcttctgagtgtagggagctggtctgccagtctttcggaggtttgaacttgtcaaggctagggcaggatcaccatatccagcctggacttgcagttctgtggggtgcctccccatacccccataagatgccaaacatgaggccctgtcatcctccatggtccccctctactggctgttcaaggcccagggctctcccatgccagatagcatcctgtctcctaccaccactgtcccagcctgagggaactccctgtgctgggcctacccagctgaccccatcgctggaaacaatgggggtcaggcaacacttccccactctctcccgccgggctgtgctcacttccttcctgctggctgcctgaggaagtgtccctgccctgggacagtctggcctagcctttgtttccccgggggtccccacccatggagctttcaaggcttctggcccctgtgaagccagcacagtggtacagggacactgcaccttcccctaccatgtcttggactccttggtcctcagggccagactcctgggtattcacctacccctcacacagccttctgttgggggagaggctcctgggcattgggccattgggttgttgaggggttggctctgggtgatttgagggtaggtagatttgcacccctggagaggtctgctggaaccttgctgcagtcctccctagggccagccacaggaacacccctcccagaggagtatacccctttcctcatccatgttgtaaggagccccctactctgtatagtggactctgaaatccatccaggaatgaactccagcaggaaagcactctgcagaaccctcccagtccatcccctcctccccaacccacacagtcacactcactaacacattgtcctgtcacacaggatgcggaagctctcagtggaaaaaaacggactcagctactggaagtccccccgaccctccccccaaggctagttcccttcttgggcacctgctctgggggaccatcagctgaacgacccccaagtattttgactcccaaaagcaccaccacctgaccccatcctctcacaccctactggatttgaggatgggccccaatcctagggaaggagtgaagaggttccctagtgttggaagctgtgggtgtgggggagattggcacctgatcctgagcccatagccttcctgtcacctggcgcagctggcggggccagatcctactcgggaagggtggggagggcagccagccagcagggcattctggagggaaacagggtcaaggcgatctcctcccccacgcctgttcctggccctttcctctcagggggcagcaggaagtgaggagaaagggctgggatgggaggcgggagcggatgggagggaatggggtttatcaagtcctcggcgagctgcccaacgggcagcagctggcgcaagtagcctagctggagaggctcaccccaggaaggagggaggccaccgacctactgggccgacggactcccacacaggtgagcccagagcagacggctggtctgcacccccacagatgcgctcgcagttgcactccctccctctcctggcgcccgggagggttaggggctggtggtgcagacgcgggcccttttgggagttgagtctcgcacaagggagcggacctaggaagagccgaggtggtttcgcacggggctcgccagggtctaagcctgccccccaccgggagaggcctgtggagcgtagggggcgctggatacgggatggaggccctgggagacccctcttgctggctttctcggaggtccagccagaaactgctgcaaggaatggaggcctcctcggggttgagagggagccgggctcccaaaggacctcagagactgggcagaaaaggacgggatctcagggatgactgtcccgccctgatgcgagtcagggagaggggcggccaacctcctagacccctctgagcttccctgaccccaaccctgcggccacgccgcgacccagagccgggctgccaggataacgactgcctcggcccttcctgggccggctaagaagcggtgcttggccccttccctcagtctggcagggggcggggcctccctttagacggcggaccagagaagggggcccctgattcgtgggaggcggggcactactctccaggagaccagaggtcgcctcaggtcaaagtccctttttccacacaaaggggacccacggctggcgtctacgttagggggtgcagagccagatctggtgctgccccctgccaacctcggagtaccacagcacctcctgatggccgaacggggcaacgcctcctcctattcccccccccccccttcccgtccccctgccttgtccctcacactgtctctttaaagggctggcggcgccgcggagctgggaggactgaaccaccggcctcgggctgcaggggaaacatttcaggctgactggcgctcgtggctg

SEQ ID NO: 9738 - DNA, 6000 bp, Homo sapiens
gggaaaagaaacgggaagtggccgtgggccggtgaattccgtgtagtggccaaggtacgcaccgctccagaactatggggtgggcgtcctgggatttctgggcgcagggttgggtccgccgccccaggttttctgttgtccgccgccctgggtctctgggctgtgcaggaggcgccaaggctgggtttaggaaggccatgtttttggcgtcctagacaggaagagtctggaggaatcagctgagtctggggcctttcgtcccaggcaaggcggtcccaggccaggcgatcggggtccggtttgaaccccagctctgtgaccgcgagcagacttcccctcgctgagcatcagcttccccatctgtgcagtggggatgatgacgcctaccccattggagccaagactgccaggtagcctgattgacatccaggcagtcttgtggggtctcagggactaagggcttgcaggtgggtaccagttctccacatactgctccctccaaagcctgggaaaccttgcaccctcagccctctgggagactggggtcaggggtacagtgacactctttacctttaatgtctttattaatacagaaaacatacactaatttctcacaataccaaaataaattagaatttgggccgactgcttctaacactgttcattaaaatagtatttagttattccctgctcaaaatgattcatgatacaaattacttccaccatcactttatctttttttatgtttcacgggataatttgacccctaacaaaatccaatccttgcgttaaggatttttcttatctggctaggttataattagagtgggaaaatatatttacatttcatcaacagcttattttaaggtgattttatctgtttaattctcagctttgttccaaagagggggaggtggtgacagtctcttgcccactgaagcgtgccagacagagtgctaggcatgggggcagaggtgaatcagatgacagccacctctcaccacgaggagtggctgaaagtgtgactggactacaggcaatcctggccttggcaggtgagaccaagtgttgtattgagggagggtttccctagctcatcttctggtcacctccacagctgagctccactgtggcctggaggaaactgtgatccatgaaaggcatgtggggcctggtcccctcattttagctcagcttccaggacagagaggtccactccctgcagccttacagctattctgaagggttgggataaaaagaggagatggagactgggagcggcggctcacgcctttaatcccagcattttggaagtccgaggtgggtggatcacctggcatcaggagttccagaccagcctggccaacatggtgaaaccccacctctactaaaaatatgaaaaattagccaggcatggtggcaggcacctgttatcccagctgcttgggaagctgaagcaggagaatcgcttgaacctgggaggtggaggttgcaattagccgagaccatggcattgcactccaacctgggcaacaagggcaaaactccgtctcaaacaaacaaacaaacaacaacaaaaacaacaacaacacaaaaaaaccagaaaggaggagatgggagaatcaatgggaaagaccagaatacagagaatgttgccaaatgccaatttacaaccttaatttcctgaccagatttgaccctttggtgtctgtggctctcctgccactcacatacatgctggtggccttcctagaaaggaaataggagggcctccccatccctggtcctgagggatgtcattctaggcatgttttagactggacgcttaaggcttttccttcttgtgccctccacatggcttcaggaaagcttgtgctctctctgaaccctgcagcatgttttcagaggctgtcggttgccagattctgcagtgagctgtggatgggagggaattcaatagtgggtgggtgtgcagacagaaagggagcaggagtggggctctgccttccctgtcatgcaatcatatggtgacatgagtaaaacccagggagaaacagttttctctaaccaatgttctccttgaggttctctttctcttgtaagtgctaagtactgctccttttcctggagtccaattcctgaaagaggacaaatgggccaggagtggtggctcacgtctgtaatcctagcactttgtgaggctgaggcaggcagattacctgaggttaggagttcgagaccagcctgaccaacatggtgaaaccacgtctctactaaaaatacaaaaaattagctgggtgcagtgttgcgcgcctgtaatcccagctactcgggaggctgaggcaggagaatcgcttgaacctgggaagcggaggttgcagtgagccaagattgcatcactcactctagcctgggtgacagggtgagacttcgtctcaaagaaaaaaaaagagaaagaatacaaatggccaacaaatacataggaacatgatctacctcattcgcaaccagagaagccaattaagatggtgataataccataatgaacagtttgacaattttaaatgtgcataatccagcaattctgattctagaaatgtataaaatcattgaatcaatgtgtcaaggtaagtgtgttagggtatttttgaatcactgattctaacagatgtcccttagcatggggttgtttaataagttataaagcatgtataggctggaatgtcacatagattaaggagctggtcgcctcattgtttcctccctgtttcaccaaaacccatatggtcctggcctcatctcagcccctggcacccctgactctcatggccaaacgctggacatccttgctgtgggggctgagaacaacccagggacagtaccaagaatgtgagggagggtagggaggcactgaaccagcagctcctccaaaggagtgatgtgcttcctgaggtctattcacagaaggctactccagaacagccttctgtggatcctagctattctggtgtctgaagagggtatggtaaacctcactgggtctggctgaattcctgaattccaggcagtgaggtaaaaaaaaaaaaaattctgcccagcatctgggtcttgaggtggatgctgttgtttggggaacccagcacccattctccctctccctggcaataatgtcagtgttcctttgggcaagcactgtttcacacttccagcccctgaagttcaggtgaggctggctctactccttggttctagatgtagctacttccaagcaaatccccaagacttctgctagcattaccaagaagagttctcttcctccacttaagccctccaaggacgtgtgggcagggtggtggagacacaagccacaagagaaagtgcaggaatcctgtgttagcagtggctgagcttaggccaggccagagaaggagagggaggggattctgggccctggaaggagagtcatatagaggaggctgccctgttgaatggacggaggtgacaatttccaaggtttcctgaggcaaaaagaccaagataaggctggggctggggggagttctgtgcagcaggagccaggtggtaaagacagagtggaagagaaagccagtatggattttattctaaatggcctttgcataagagccaccatagaacagttttatttattgattttatttttattaatcctcctccaaacacagaacacataattttactgtttttttttgttggtggtggtggtggtaggtttgtttgtttgtttgtttgtttgtttgtttttagagacagggtcttactgtgtcactcaggcttcagtgcggttggcaggatcatagctcactgttacctctaactcctgaactcaagcgatcctctaggattggccactgcactcagcctagagttttaattgggataagtcagtagtctgatttgtgtttttggaagataactttggatccaggctggagaaatgtatcggacacggggacaaagtcagaagtagaaaaagcccttaggaagaggaggtggtattcttgaggaagggggtagtggagagggacaaagtgggagagtttaggtgctcagataaaaggcaaagcgctgggaagagtgcggtgaaactctggatagcttgggctactccacttctctgagcctcagtttcctcttccaaacagaaataatatccacttcatgaggttatgtttgacaagtgtagtagctgagagtattgtttttagtcaggtctggattggatctcaggtctggcaggtaacagctgtgtgaccttatgagagtcagttaatgatagattgtagcctttatggagcacttgttatgtttcaaccaacagaactctccccagactaggatacttattctagcttccaggagggtgagggggacggggggttgtggtgaggaagtattgtggagacagcaagccttttgtccaaagtcctactagtaaatgtggagccaggatttctctgtcacgttcccctaacttttctgcgcctaaaactgggataacaataatacacttccttgtgtggttgggcgtatacagaaaggggtctggcacatagcaggtgtttattaaattattattaaaattattattattacattctttgtgttttcctcaggttttgcatagagtgagcatcacttggacaaatcctttggattaaaaaaagatctactaagtgagggggaagaaactgcggctgccagagtctcagtgggggcttggggggcgtgaccagaggggcgtggtctacgggggcagggccacaactggagggccaggctgtgggggcggggccagcacacgaggactgagggtgggggcggggcccgggctggcaacgcatgcccagtgcggtccccttcgctgccgccgcggccgccgcggccaccgcccactcggggctggccagcggcgggcggccggggcgcagagaacggcctggctgggcgagcgcacggccatggccccgtggctgcagctctgctccgtcttctttacggtcaacgcctgcctcaacggctcgcagctggctgtggccgctggcgggtccggccgcgcgcggggcgccgacacctgtggctggagggtaaggcgagggcggcgggtttcttgccgtcgccaactcgcgggggacgcagcgcgcacaggtgctcgcggggaggcgagcccgcgccaacctgtctgctcttcgcggggtccgcggccggcctgggtctcactcctcccgcgcatcctcctggtttccctccccggacgcgtgtcctccggccctggccgagatgaaagcggctgcccgaccccggctttgtgttgctaatgaggtgcggccgccggccggggtcccattcagagggcgggcgtgaggggcggcggggctgggccgggcgccccaccctttgttcttggcccgggacctccttcgtcccagggctgcgtgtcccgggctgggatcccccgagccacccggaccgggttgcgctttggagagggaagggggtattctcccggactttcagtccacaaccctgctaaggcccgggcggccggagaggggacttggagcaccggggagggatgcgccccgctcttctagtagctttgttcctcctcgcctggggccgtcaccccactcctacccctcctctgactccgggacctcctgagaaacttcgcctcccggttcagcccttcgtcttgtgaaggtctcgcggctgatatcctccttccctgcttcgagttgcggatatttttccgccaaagggccgcgtgggtgtcatctgggtgaggtgcctgagacgagactggagaggtgcccagactttcgccgtgtgcattgagccgtcttcgtggaaccgagcgctcctttgacactgtctgggcgatgggcgcgggtgattgccattcccctctcagcttccctgctccctacctgggcttctggccttgggcggccccagaac

SEQ ID NO: 9739 - DNA, 6000 bp, Homo sapiens
agagatcactctgactgctgcatggcagagaatgaactgcagaagagaaaagggactgaaggctgccttggaggctttagcaacagttgaggtggaaatgatgagacctgagtcatatgcccaccccctcggcaagagtgtggataagcacgtgatctagtacggtgtgagataagagacattttggaggtagactggacaagctataccacctaagtccttacagggaaaagacaacgatggctccaatgaaaagcatgggaaaaatccatgatccatccaacagcctgtattaacacatactttagactgacctagagctggaaccttttgaaagggagtggatattggagaatcaaggggatcaagtatacataacagacagtcccactaaataaattgtattagatttcaaccttgcatgtttttggcctatgtagccatcattttagggaagctgggtattcaggatagtatgatgtggctatctgctaagctttctgttgctacttgagcttttatctacccccacccccagatcatagcaaattgctacaggctagttattttctgtaattgcataatacaaatactagcatcttcagcaacacatcaataggctggaacttggtaataagtgagtttccatcaatcatattcatctctcatatgatatttcagggactggcaattcactagctagagccagagttggtcaggttatttaagggctaattggagtgtctcttgctcctggatgcatctcttccttggcttagataagcctgctgcggaattctctttttgtttttctgcagtcacatttaactctctctctggaagccaagcagatttaattgtgtaaacatgagcaatggtaattgggtaaatgaagttggaaaccaaggtatgatgtttttgttttgctctttgaggaaaaaaaaatagggagcttgtttttctatggtggcaaacctcactgtcagaattctggacagacagttggcaggaggaaatccctttatgaatttctcatcaagacccatttagctgaaatatgtatctgctgcctcatgggtgacagatcaacccagaggcgccttattgttttattcaccaccagatcaagtctttctctacccaggttcagttaactgggtgagaatgagtcaggaatttctgtgagaactgcacatgcaggtaacatgcattcactgaaagagccatgaggatggattaccagaaatgctcttaactttaggcagtgctgtcagtggaaaaccagattttaacaaaatatacaatatggagtactattttttatgatgaaaggattagtagttgcctccttttaaatggttatcatttaaaactgagtcttccaaattctatttacacacatttttttcccaaacaatttcaataagaggaaactgttaatttttttgtcctgtattctaaacactgaaatggtccagcaagaagaggatctcatgcttttaatagatgatttttgccagaatattatattttatccatatttttcaatcttttttattaatgtcactagaattccatttcctacatgcctgcagtaaaattcattttcccagttgaaaattcaagcaaaccaagaaggaaacttggcaatggagtatgtccctctcaccatacagattgctttataaaccagaactattagaaaggagcaggtccaaggttaatgagacactcattaaagagagagaattgcagaagctgatagtgctctgtgcctgtactgaaggagaggctattgttataggatgtttgctgtgctgatattgtaaaccacatgacagatgggtcaagtgctgattacagtattctaacatttggaatagcaagtaacatatttgataagctggcaagtttttatatatgattcaacccacaatataaaagccacgagaattccaaattgaaaataattaaatgagctggaaacaatcagataccacacattttcccccaaaatgacagattttgacatgttgaaattccacaaagggagcaagaatatttcctagctcacttgaactaataacggcccttcatctgcttttgcaaagcaattaattgcagccttctcacaatgtggaggtagcaataaacatgtgtaggcatcttgagctttacagagatcagtcccatagattgctttctttgctcttatcagcagccctgtaacatatacaagaaaagatactctcaatttatagatgaggaaactaaagcacagagaggttcaagtagcagatgcaaggttacgtagaaagtaagtaacatatgggggatgacaagccagatcttccaactattaatatatcaagtcctatttctggtcatctgtaaaaaagaagcagctattaatgtataggtgttcttcattgtacgaagtgtatctttttttggtcagtgctgctgctgccatcattcatgtgtatccatctggataaagcatctggtatttgcattcagcctctgagtgtctcggtggtggtggtgggtgggggttgctggtgacactggtaagagtccttgtcaaacaatgtcacacctctgtagtgttgaagaattgccaagaaagcagcagctctccatttgtgttttatcatttttgcttatttggttgttcttttcagagtttgtcatcttacttgtcaccctttgttaaagtcactttgtctttacttttttactgtctctcttcacctacccaagcagctcccctgccacatcctgggcctcctcctccacccacccaaacacagaccagcatgttatatcagaggctcaaaggcatgcctaggccaaaatcaagtaccgtaaactttcatcattcctctacttggcagctttctagtttagtttgcttttctgttcacctttcttcttgaaattttgtttcagtttggaacactaagctgagactcgggctctcaagtataattttataggttttgagatactcaaaagagagcatttatttccaaatgtccacatattttttgtctagctatgtctgacatatgcaacattttcaaatctcaatgtcagcacaaaataacattgttgttgcgtaacattttgcatgacaattttttctgtgttatgagcttcaattctattgtatgaaatggttcttaagtatactatatttttagttccattttatcagtgctccagctagcgcaagcttgggggataggaatattgtaattcatctgaagacagcgttaagtggccaaaaaaaaaaaaaatcacttctaagcacaaatttctccttgacctctgttggggagagggaagaagtgctaaaggattttgcacaatattttctttaaagacaacatcttagggaatttacttttagttccattttgccatttagctagtagtacagcagctatgcaaacaaacaggaaaatagtgcagtgtctcactaatgtggcttgatctacagatgatggaatcacagctaattaatagtaaatgaaagactggctacatgggttaattggcagatcaagtgttctagattaaaggatccttaacctgcttactttaatggttttatgttcaagtaaaattgcaaagggttttattaaacatactgtctgtatatatacatcaggcatacacatatctgcgtacatgtgcacacactcatagaatggctgcatgcacatgcacaatttatgtgtatctattgatatctattgtagtcaatctaagagtactgcctattaaaacaaatcttcaggtggtcctagcttcaacatcttggatttttccaaacataaaaattattgacttttttttaaaaagtgcataaaaatattggtatgaattatttatttatcctatgtcataaacagccagaattcccctagatttggggagtgtttcacccaaaaggacaaagctctctatttttaaagcaagagatttcaaagatgtgccccaagtgggatttcctgaagatttgtattaatgtgcaggcttgtctgttactagaaaatgtatgtaagtgtgtgatgtgtgtatgtgggtgtatgtgtcgaatgggtaataagcataggatgaggaatttgcaaattgatgtgtaaatgtgaatatcaacgaacaaaaaatagtagcctgtgcatatttactatcaaaatgcaaatacctcactctacacatattacccaaaaatatatacacagtatgtttgtagaaatgcctgaaagtctacgaatgaaattatgatagtctatttatcaaattactaacaggtcagatgccccaaaagcacagaagtcaatcttgtcatacactctttctctaaatatatgttgctctagaccaggcaatgggctctcagcacctaagctcccacatctacttattctgagtgttggttgttctctgcctaatccacatgtttatgtttcccacagccccaccttcaggctctaaccagatccagccacatttccatctgggtttggcagagataatggagctttccattgacttgaatccaggaagcccattttcacactagccctcaggccctgttagactgagactttcaacacctggctagtcttaccctgtcccactaatcaccttacatcccatttgctagaacactcttcttgcatagtgtctcgctgaatttatttttcattattaaatcctaaattactaatgacctgatatgttcattacgtaagaaatgcataaaagaatattaagaacctttttttttgtaaattagcaatctcttatgattttaagtctgcctacttcctcccacccactgctgcctgccagaaaccttcctatttagtaataggtaattctttctagcaagaaacatcctgaagccaaaatatacctgtttcagatgaagagatgaaaagaaattttgccagttcttttgcaaatgtatgtacctacttggggaattctactaaatgatgtttatttcactatatcccatgtgctctgactctgagacttcaaggtttgaagggggctaaacatgaaatacaagttcccctggaattcagactggttgaatccaagcagtttcactggccaagaaaacctttatgttttggccgggcacagtggttcacgcctgtaatgccagcactttggaaggctgaggcgggcggatctcctgaggtaaggagtttgagaccatcctggccagcaaggtgaaactctgtctctactaaaaatacaaaaatcagcccggcgtggtggcgggtgcctgtaatcccagctactcaggaggctgaggcaggaggatcacttgaacccaggaggcagaggttgcagtgagctgagatcgcaccactgccctccagcctgggcaacagaataaatgagactccgtctccaaaaaaaacaagaaaaagaaaagaaagaaagaaaacctcctttatgttttaaatattactgttttcccaaaggaaaaaagtttgtaatttttggaacataatgacattgtcaaactcatgaactcagctctaaaaagaaggcaacataagccagggttcagattcttcttgagctgggtaaaaatacaacactttcagtttaagagaaactaaaaacaaagaaaacaattaagtacattgtttcagtttaactgataaaatttcaattgtaacaaccagtagcacaaactatcacaacccattcaataatctactcctaacacccttttaagaattattattcctgactaatggcccaggcatatccaatttttcttttctatctcctccctggacaacttgaagcagacatttgaatctgcattttcaaaatgagcgttccaacatacgcgagcctgcaatgaaaaattacgctgtagcatttaataactaatctaaaaaacaaatgtaacagcaatcaatattaaacttctgttaatcttcccacttcaggtagcataat

SEQ ID NO: 9740 - DNA, 6000 bp, Homo sapiens
ttgaagaggcggttgcctgggctggcgctgtccttcctggcacatgctgtgttgggaagcggggtgctagcacacttacacggtgggcctgagagctcaggcctagagctgcactgaatcctgatgtacccttgtttccttcttatagtgaccccatggagtcagtgctcttggatatctccatgttagtagatgtgcaggtttattcagccagcaagctgcaaaattaggatttaaatccaggtagtctgacgccagagctaaagcgggtctcctagcacagtggcacagagtccagcctttggtaggcagacccagggttgaattaattctagccccttccctactggctaagctgtgtaaagtcttagacaggttacctggcttctctcagcagcacattcctcatgtgtgagatgcgggtgataataagagccgcctcctattcgctctcctttctattcctttaatgggctttgcccttgcctggaactcctgtgcccgtttgttggcctgggtcactttttgttttgtttttggtagagatggggtttcgctatattgcccttgctggtctcgaactcccgagctcaagcgatcctccttcttcggcctccccaagtactggatgggcataagccgccacacccagccctggttcacttttactcagccaaaaaagtcacttctaggaagctccctcttgccctatgaacactcgagtcggccttggcatgtgctgtcatccattttgatttgcctgtcttctcccagcccctactcacatgcacatgtgtgcgactagactccacagttctgtcgtgcactgttctagccttggtgtgaccgcagtgtcaggtacagcgtggctgctcatttgctgtctgtccagtgaagggagtgaaagctcctcttcatcctgtgcatggctgtcattgcaggcacctggagtacaacagcctggtagaagtgaacagcggctcgctctacggcctcacggccctgcatcagctccacctcagcaacaattccatcgctcgcattcaccgcaagggctggagcttctgccagaagctgcatgagttgtaagtgtcctcggctctgggctgtggcagtgtttttagacactgcttggaggtgaaagtgctaggcctggttcgttccaccacacagtggcctcggggagggctcagagacaggccagtagccctgttcccaaaccagccaggcccagggtggaaccctcagcgatttgagccccagtcccttcctcatctccccttcacttcctctgcatttggattagcaggggctccaggagtagcagctaggtccctgcagggagccttggcccccaaggtcctgttgggtttggagacagttccaggggtagaaagttcctggggaagggcagctatggcagagtgctcacaggagccattttgagagtgactgtgtgttaatggccacaccaaatagcatgtgcttcttcagtgagggggtcatttgggctcaaacagagacagtgaaacgctgactgtggatgaatttgtgtcctcggagtcgccaccttccttcctgtagatgagctgcccaggttcttggccccttccctttctctgttttgcaccgcagtggcctgctggcagaggctcctgtgcagtcgtgtgcgtgcttagttcagagatgtgtggtgtggtcctcttgctccttttggagatttccagacaggggtcccaggttgagactgagaactgagcttgtcttgcccaaagttctgagattagtagtgacagactgtcgcctgggtagcgatgggcagtggccctggccaccccatcatgtcagggtggggttactggacagtgaacgcagcattcctaaggactcagagaacatctttacaagtctatagtttgtgttttcactgttctttccatttgatatgctccagtttagtctactgtgtttctttatttttcacaagagttgggtgggtttttttgttttgttttgtttttttcttccttttctaggcttggctgttggaaaaaattcacccactgaagtgaatgattgttaagagtgccaagcctcagtctgtcctgtctctctcttgacctcaccaggcaaactcaaggggatgcgtgaatctaatgtggattcttgcagctggtgtttgtgtctggtcttctgtgttctcctctctctccctgtccttccttccctcctcctccccccctccccccaccacacacacacacacacacacacacacacacacacacacacacacacactgacttggagtttatattttggtgactccatcattatctaatgcaaaacacagtggtcctgcctctttcctaacttttcttggattctgtgagtgttaaccctttggtttcagcttcctacgcttcagggcctgcagttgtgcattccatgtggtgctggatggctcctttcaggctctgtagtcaagctgtgaccccaccaggggactcctggttttgttggtcagggccgggaggtgtgggaagcaagagaggtcttttaagtccccgaagcctgagccagtccaattcttaaagtgaggggccatcctctgactcaccagtgtatcgtggccccagggatggcatgctgtcttctgcggggtccgggatcccctctctagctggtggaaggcatgaagccctcttccatgccctctagaaggggcagcaaagatcacagaagtgcgcttgagcagtcctagcagtttgcaccatatccaggtaacctcagaggcagatttgggattgcttcccagcatgtgtttcccacccctcctttaagctaaattctttaattgcaggtgaggatataattttgatctcctgccaggtctgtttaactgacagacaccctgacttatttgtccaggagggaaagaatgctgctcctagctgcctttaaaagctcattaatcttctctgagtttattttccatcttcctatccctgccccagccccaatttttcaacgatagatgaccaatatgtcacgtaagcaacccagaggtgcaggagtgctgggaggaagctttgattctgaggttcgggcaaagcatgtgcttttaccgcctgcagtaggggatcatgctctgaggtccacgtggatgggggcagggaggcctgagcaggagcctcctgccctgggggagttgccccactaaggcatgaggcacaggtgtggttgtcccacgcaggggctagtggtgccctctgctggcagatgcagggagtgtgactggggctccctggcttgctgcggggtcatctccagaatcccaggcttctgctatgagagaggtcttttgtagcctgaatcaggagctgccttggacagcatgaaggcgctggagcttgagagttgttgtgtgtcatgacctcgtgtgtagtcttcacagtttaacagccaccctggcccctgtgacctatgcacccattctacgagtcagactagtgtgttgggcactgatgagtttctagctgcatggccacttttacccccaggattctgtgggtgtgggtgtgtgtgtgcacgcacgcgcgtgcgtgtgcatctgtgtcatttcccactgaaacccagctgactgtggcccaatttccggtggggtggggttggggggcaaccacactagatggtgacattgctgccctccctttcctcagggtcctgtccttcaacaacctgacacggctggacgaggagagcctggccgagctgagcagcctgagtgtcctgcgtctcagccacaattccatcagccacattgcggagggtgccttcaagggactcaggagcctgcgagtcttgtacgtctcccactactgacaggataaaggggtccccagtggggagagcagaatagagcaaaccatctgctttgttgaactccatttgcgttggcttcgagtcagaattggatccaaagctggcttgctctatgtgcagagtctcaaacttttatgtaatcaactgaaaaagaactggttaagcagaaaaatctctcatttccccaggatggtgcctagagagggatggcagctcctaaaaagtagttgttctcaagcagtgatgcccacgttgtgctggacaggatgctggctcctagtgttggaaaaagcttccccacgctgagcgcctggtgcagcctccagttcggcagccgtgggtcagtctttcccatcttgagtcttcagctgcaacttccaagtcctgaatattttttctctaaaccatgggaatactgcagtgcatctctcgtctgagcatttgaacttcttcagcataacctgtaccaagatgcctcctttccaaaagcagcacttagggaatcctgtgtctctccttgtacctcgtcgggggtcagttaacaaagtggaggtgctaatgccatttcccttgaagtccctaattagatggggttggcaaaagtggctgcaggatgcttttctgaggcttgtataaaacttttccatggttggcttcatagaacttccaagcagctgtcagcataaaacccccagagaggggcatgcaggtttcagaggacagtggtggcgggttctagggtctccttctcaggcgtaatccactgcacagagagggatctgttccagtgtgacagggagggaggcctttgcacttgcacctggcagagccggctttaatgtggagccattgccagggagtgtgaaagaggccggagccaagctattcaggccaggtcagcctgtgagcccatacaaggcccaaataacaaggctgggaacattcagactgagcgggccagaaaggagagaaaaactttggcagccagggctaggagcagagagacaggcacacaaagccacagccccgggtccctggttcctggttttttcagtatgcagatgataggaaggaacccattgagaggagaagtcccttccagcagcagaatctccactatttgaccttcctgctgtgacaagaaaggtcaccgccagcatttcactcttcagtcagagctgccctctctgctggcagcattgattcctgctgcagcttctcacaggagacaagagttccttttctctccctggcctgtgtctgcaagggctcggggggaaaatttaagaaccaagaaccttgtggaaagttggagagggcaggatgggggcctggtctccaggtgtgatgtctcgcctgggcactgtgacctgctcctggaagctgggaagccattgagtcatcggccatgggatttgcattgttggaggggcctgggctgagttggcctcatccctctgatcctggcgagtgggtcacaagtctgactcagcacccagatgtcctccctggctcagagtcagcgccctgcaggccttgggaggagatgggctccgggctccagacccactggctggtacggaggcgcccacgggccggccctgtgccgggtctctttcttccatgtgctttctgcagtttctcggtcatgtccagaaaagggactctggttggtatgagagcagacgggagccttaaggaaccttttgggttgattctcagtgctggggccagatgtccgctctctcggggcagaatacagactgggctgtctgcaccacctcccttcccttgagtgtggcctccgcagacagggaggcaggtggagcccagggaagtttcttgtctaaggcatgtgtcatcttggttggaaggctgagaaacagggcttccctcccagggccacgtgtctcttcaccctacgtcccggctgtgcctccagggtgcatgcacccaggggacttcagcttccgagcagcaggctgggtgagagtttgctttcccttcacgccccgactgctcggtgagctgctttctgtcctctccccagggatctggaccataacgagatttcgggcacaatagaggacacgagcggcgccttctcagggctcg

SEQ ID NO: 9741 - DNA, 6000 bp, Homo sapiens
ttgcaaattagacctaagccaatactattctaatatgaagcaatgtgcaaatacaaatacacaattggttccgtcattaccctggaggaatttcaccggatgctatttgaagttggtgataatgttgatatcaatattagcagatatcaggaaacagagcaggcatttttataagcactctgcacacatctcacccaatgatgtggctattcttctccttcacattttacacttcagaaagatgcaactaagagagtttaaattgtttgatataagtcaaacaattatctgagtggtgagctaggattcatggtggaacaatttgaatttacattctgtgattctaaaacactggttatattacttccatacacttataacttacaagtaaattatatttttaggcatttaaattaccctaaacaatttggtaatcacatattttcaaaaaggtatgctgtaaatctttgtcttttctcatatagtgttagttttcttaattcaaagccatatgtatatacactcttagtattttaaaaataggcactttatgtacacatccatggaaaacgtgttcatatggtattcaaaggtgttgtgctttttcttgttggattaactatttttaatactgagagaacatacaaatacagttatatcacattcttcactaaaatcaattatcttattgataatatgtcaaaaggtgtggttttaagggttagtgtggtttaggggttagtgtgtttgctaataacgttatatcctaaaataggggactttcttgttgagaggattcttaaagaccaaaaattcaaggtattgagaaataattgatcatttgaacttcattaaaattgaaaatttctactctgtgaaagacactatcaagagaaaaataagacaagccacacactggaagaaaatatttgtgaaagacatatctgataaaatactgttattcaaaacatacaataaaagtaaacaaaacaaaaggccaggtgcagtggctcatacctgtaatcccagcagtttgggaggccaaagcgggcagatcccttgtgctcaggagttcaagatcagcctgggccacatggtaaaatcctgtctctaccaaaaaaaatatttaaaaaattagccaggcgttgtggtacacttctgttgtcccagctactcaggaggctgagttgggaggattacttgagcctgggaggcggaggttgcagtgagccaagatagcaccactgtactccagtctgggtgacagagcaagacactatctcaaaaaacaaaagcaagcaaaaaaaaaattcttaaactcaacaatgagaaaaaagacttaacaaatacctcaccaaagatgattatgagatgataaataagccagtaaagatgtttcacatcatatgccaacaaggacatgtaaatttaaaacactgcttaccattgcatgcccactagaatggccaaaacctagaacactggcaacaccagctgctagcaaggatgttgagcaacaggaaatcttacccattactagcagaaagacaaatgctgtaacaactttgaaagacaatttgacagtttcttgcaataataagcattgtcttaccatataattgaacaaccacactatttattatttacccagatgtgtttaaaacttatctccacataaaaacctgcaaacggatatttattccagctttattcataattgccacaatttggaagaaatcaagatgtccttctataagtaaatggataaataaaccgtggtacatccagacaatggaatgtttttcagtgctgaaaagacattagctatcaagacatgaaaagaaaaacccatggaggaaacttaaatttatatgaattactaagtgaaagatgtatgtagccaattttaaaaggctgtatactctatgtttatgcctatatgacattccaagaaaggcagaactatggagataacaaacagatcagcagtttctaggggttcggaagggggagggatgaatagatgaagcacaaaggatttttagggcagtgaaactattctgtatgatactatgatgtttgatatgtgtcatatacatttgttcaaacccataaaatgcacaacaccaagagtaaaccttaatgtaaactatggactttggatgataatggtgtgtcaatgcaggttgatcagttgtaacaaatgcatcattctggtgggggttgccaatgggagaggctctgcaagggcagggagtggaatagtgtcagggaatggaatagtgtcagggaaggaagtgaatgagaaatctctttaccttccactcaatttttctctaaacctaaagctactgtaaaaggtaaaatctattaaaagcaaaccaaaacttcaaagtactgaaatgataagtgtacaatagctaataatgcaattcccatttctgattcataatttctgatttctgggtactaccttaaaaatcatattatgtttttagccacttactacataaattcacagaactagtcctagatcatgaaaatttatttgaggaatattaatcgtaataccttacagatatttgaaataatatctgcctgttgaataatataacttgggggaattcaatcaattataataagtgtttctactttcaggtttaatttcttataattattgcattctttttaaggtgaaaatgtgcatgtttgattaggctgtttattttatcaatagctgcctgctacaaataagctatatatggctattaataaatgacaattaaaatgtaattagccacagatacaaaaatctcattttcaattaatgtactatgaaatatcatttaacaaatataatccttctaaatttttaagtaataagcaagttctaaatagccttgagattcatacatgtttttatttacatcaagagctaagacacaactgcttatacacatttaagaaatcagaggtctagggttttttccaaacaggactctatgtctaggacactcagtaatcaattagagagaagaggaatctgagaaactccttaggcaagcagaaaccaagaagatagggcaactgttatatcaaaagccagccaagcagaaatgaccagtacacaatatacttatacattttctctggaggaacaaatcatttatacttcactgaggaatgtgatcataagccaaaacattgaatggataactctgtaaaagagcttttggacaaactaataactgcatagtatggattaaagagtaaaaatattaatctaggtttataatgtagttatataatatcagtgatgagtgatatactagggtaaggagagttacaagaacattaaccccaaaacaaagaagtgaggcaataaatatgaaactacagtaaccaagtatattctttgaggcaagtttctagctcagatcaaagttgcttacagaaaaatttagagagaggaaataatctccaaatatctcaagtaaagtcaggtgattatagctgtctggcaagaggattagacagctttgctaggggaaacttagcaattaactctgctttggtaagtcatacaataaggacagctcaactcaaatagacaaaatagctatgtccagttaacctacagcaataatttagtaacctttttttcaatttgttattctgagtgtcacaaaaataactgttagaacttcattgaggtggacaaattactttttatatagtactaggtttgtttatctatttttgactgaatagtaaaactattgttaaaagattaagtctttccacttcccaactcgcaaatctaaaatttgtcaagtactgccaagtctattgtctattcctaccagagttatcttctaaattatttagatcattgtataatctattattaaaatctcagtggctcctcattacctgcattacttgccccagtttattttttaagttccccatcacattacattctggcaaaccccaacatccagccaaacaactactctccttataatagcctaaatatgtcattatatcatgggaatagatctatatctatctatctatctatcatctatctacctatctatgataaaattgatatataaataaatataccatgaaatttatgtatatacataccatcttactttgaaaatttggttatatggttatctctaaatagtattgttttattttccacttattggatattatctcatatctcaaaatgccacttcttccatataagcttgatcaattctccctggcaaaattaattaaccagtcacctgcatatatttttgtagctttgtgctgtcatttgttattatctcttaagaagttcccaaatattataagctttgtttttttacaaggacactagcttatgtttctctgccatattcagaatagaccacttggtaatttttaaaatctgtttgtgaattcacataattaaagtggcctcaaggtgtttatgcacctgggtgaagagcaagttttttgtttttttctgctatatcaccaaagcagcatagtgcttgactcattataaattgtttgtaaatatttgtttaatgaatgattaatttcagttttctaaatgtgatgagagtgttccaactaaattggtgggaaatcaaagcaaaaatcacttatctggcatcctctaaaaaatagagaaaaccaggaatcatttatgattaatatctaacttgaaaatgagttttcaaaattaataaataccacatttgtttgaaatgtgtatcatgaaatatatctatacaattcatattcattttagttatgtaataattttgtttcattatttcaaaaaatgacatttcaaatctatttgaactgcaatgtttcacaaaataattgtttctcagcatagctaaccattacaaaataatatttttttaatctccccagataacacattgtctgtcactggctggttgtaatgcaaggaagggacaaagatgaaatggaaacatgttccttttttggtcatgatatcactcctcagcttatccccaaatcacctgtttctggcccagcttattccaggtaagtgctgtgcatttgtttcatcaatacttaaccagtattccctctttgctttaaattcactttttattgtgtgtgttgcaaatcaagtttgttcattttctttggaacttgtaagtctgtgtgaatgtcttcttgagtatgagtgctgatcaatttcaggggtcaaattattattcttgaatagagagcactttattaattcccaagagaatcagaacattgagaaaaagtcactgtgctgaaacatgtaaggagtgttatattaactaagtgaattagagtggcagaagaaaaattacagtagggaaaaggtgtgtaacacacaaaggaaacctaagccacagtgcatgtcggtaccatagaaaaggaacatcagaaaagtgaaacattgaaaactgacatttcttagcgtagtaacatgttaattaacaggctgaacaatgtaagaataaaaaagcaacatgctgctgtgttgctaccatagttaccactgttttgggtgaagttagaaacctatttccttgaagtcataatttcattaatggtatagaatagcatttctttaaaatgctttacttatactgttttaataggaattaattaggtccaatgtatggtagcagaaaatacaaaaatatattgatgtactaatgaaaatataattttaagtttcctcttaggtaagacagaaacaattgaagttaatttgaatacaactaatatgtcaaaatttagccaagttattcataaaagaataacataccatgttttgttagaccatactatgaaactttgtctgtatttatgttatggttatatttattttgatattcagcaactatatgtaacttgtcatgttcatccacacaaaatcaaagatttcaaaaaatcctggggcttcaatttttc

SEQ ID NO: 9742 - DNA, 6000 bp, Homo sapiens
tggcatccagcagagtgtctggcaagcaatagatggtcaataaatgattatagatctgggatgaatcatgcttgaattttgagttatttccgcagagtagggacttttcacaaacttcttagacagcttccattttctattcagtcctgggatctttgtcacatcataaactaatatgaagagatgtttctaagttaatgcagcacattttttgtcaacttatgcttatgttttcacttggcacatcttgttgaatcagaagcaacttgcaaaccaataaatgtgaaaaatatcattatcatggcctcataataagtatgacggatagtgatgagaagaggactctctcaatgaagactcttaagtttattaataattaaattaattgattatattagtttcttatctgcaataagatttttttttgaaaagttatttttgggaggcccacaattcatactcataactctatactaataagtgtcaattagaagaaatcagaaaagtttccttccataattttaccttcataattactgttaatctttgaaatagcaagggctgtttttcggtaccttttctaatcagaatgcatatagtcttcctccttttcctttgcaatctacatttgccactatctctgcttctagtacattgcctaggcttgaggtatagggtatataaattctgcaatgaaactctaatgctgtggatctatgaaaaaccgtattttgtagttgcattattcttcttccagtagaattataaactgtaaaattttagagcttcaagtggtgttaatgatcattagtacaactgttttactaaagaggaccctagggtccagaaaggggtcattaaccaaagatccattgataatttttaaataaaggataatttaaacttaaacttctcatttacatatgggtcattcactgtctttcagaagcatgggcatctaaaaattatagttttttactatatgtggcactttacaggaattactaaaaaaaaaaaggagacattttaggtgcacttttctatttgccttgatcttgattctgttattgttctacagtgaatgggtgcaaggaaattcaaagataggtacatttttaaaaatggtttttggttggaacccagaattgtacatattcccatttttttcctttctgaactccaaagttcacaagggaaacaaccagaaaaaaaattacatgaagaaacataatgtaaatatatcttataatgtagatataacttttagttcctaaaaatgtgcaattaaaaataaaatattaaatgtattggggaatttagtattgatggaaattctagtgtgaagggttgtttcataagtacataataaaaacaagttacaacatctgagtatctagattttcagttatcggttttattttaaatgtgctataactataatgccttccggttgaaactagaaccatctttaacaagttaagctagatgtctcatttaacttcgcttttaaacctaaattccataatctctacatggttgcacaaaatcatctttcatatttgtgaaaatataaggctagctaccgtttctcaaacagcagagtaagaagcagaagtagaaatttagctccattaattaattaaggatttattttacctactcatacaacaagcaagcataaatagaaattaggaaacaccaaagatgcagagataaaccagaaatacggttgtgtggttggtgaaactgggtgtgaagaggccgttcaggtcctctctcaggatgatcaaaaccacaaacacgtagagacacctccaggttcacactaggttggtcagtgaaatgcgtcctgagtgttttctaggcattctgaagacttgaagggtgcaagtgtcatcctcctttgcaggtcttcccagaaacatccacctcctgagtcatggcgacttgtgtatgatacgatcccaggcctgggaatctcctgagaagggttaaacagggatgcccaaaatactagccctggcaaatttttcctagtcatttggtggttagtccagagcttctcaaacctgctgaagcgagcaggaacacctctctgtataaatggcttatctccatttaggggtagcctctagggttaatccaggagctttaaaagctgtctgtctttttctgtcctgtttttcccggtcgccgcacgctgtcccggtccgcgcctgctccctgcgtgccttgtcgccatgcctccgaaaattgaggaaatcaaggactttctgttcacagcccaatgaaaggatgctgaatctgtcaagatcaagaaaaataaggacaatgtgaagtttaaagttcgatgcagcagatatctttataccctggtcatcagtgaaaaagagaaggcagaaaaactgaagccagtccctgcctcctagtttggtagtgaaggagttgaaatgaaccagccacactgatttgaactgtattagaatacaaaaaaaaaaaaaaaaaaagactgttctcactaagcttactcaaatattatattcaacaaatatttgcaaatactaataacttaatgattctttcctaaacctcaggtcctgtgctgggcgttttatatgtttttctcaatcttcacaatgatcatgtgggatagatgctactgtcaacatccatattttggagaaaagacaaccgagacttaaagaaggttaattctccaaagtcacaaaatgagtatattcaagtgtgttaccatggtagtcagttactctaatatccaagtttgctaccaagtcagttactctctctagttcctttatctgtagactgaagttgtttcttctctctcctttaaacttctcttttgcctggtttactgaccacatgatctcagtggagaggtaaatctgaaagtggggaatttctttttttgaggcagagtcttgttctgtcgcccaggctggagtgcagtggcgtgatcttggctcactgcaagctccgcctcccgggttcatgccattctcctgcctcagcctcccaagtagctgggaccacaagcgcctaccaacacgcctggctaatttttttgtatttttagtagagacggggtttcaccgtgttagccaggatggtctcgatctcccgacctcgtgatctgccgcctcggcctcccaaagtgctgggattacaggcgtgagccaccatgcccggcggaaaataggggatttctaatgaaggccaatggatgaagacatttcctggagtataagggcatttatgtgtcttactacacattgacaatttgcctgtgcctctccatcactttctctagttggtgcctctgacaaatttttttttgattatatgctgtatatgaaaatccagagtcatgtttgaatatatttggctactaccttattatgtgctgcatatgaatatcagtttcacccactcaggtcaaagaaatgtaagtacagatagagaaacatatcatgcctttaatctgtcaaagtggtagaaatttaatatcaacttgcagctcccatctttctcctatgctaaattacaaggcattaggggacagagtgggggtttgagagcccctctggtccttgagtcagctttctctgtcggttactgttgagaaatccaccatttgctggtcccaggccacgttaatagttccactcatgttattgttaagatgtccctgcttcctgtccatgaatttctgtgttaaacctgagggttcagaatcattgttgcccctgtgccacacatcatctgcaatctccaatgctgtccatgaccttatctgcttgagtgatgttccccaaatttcagtctttttcctactatacccacaattttttattcattttttgacatatctggtatcctcagtattattaacttaatagtttttaaaataagtgaaaagaatttaaaaggaacaacattgctgcaatagaaaactagtatcacttgtcataaaaagaaggcagctacaaacacattttatgaaacccaaataatatcattacattcttgatggatactgtctgccaggtcacatacttcttagcctaaacttatgcaataaaaccagaaggatgctctgctccaatgggagggattctgggagagggaaataaaatgggtcaacgtttcacaagtagaatcccatttttgttcatttatacttagatctagaggcagggtggtgtgatagggaaagcacaggcctaaaagtcagatctaagttatacaagtcacggtcattgactcgagatgaccggaaacaggcccgctttactttctggaccattctcccttcctccctaaaatgcaagaatccaacagcctagacttcccttctgcgtaccggcttgccctgaggagctgaactacatctcccacaatgcgccgcgcgcggcgccaggaatgcctatcgccgcctcagacagctttcagtctgtccctcctacaactcccacaaggcccctcggccccgggccgcggcccggcccggagtgggggcgggcggaggcgcgggagttatggagggggcgggctctgcagggaagtgcgtcagaggaggcgcggggagagtagggtgctgtggtctgagctagagggtgaagctggcggagcaggaggatgggcggtgagtgagcgggacctgcgtcgccgggcaggggtcgcgtcgcggttccatgttcccggcggtttgaagaggggcccccttcccgggcgtggtcgggctgggcgggttccgagcggcggatttgtcccagggccgagccctctagggcggggcctggtcgggtaccgggggaccctggcccggggccgagcacggctgccccgccccagccctggccttctccggccccgccgtgaggcccaggaggtggctgctgcaggcgtccggcttggacgaaccgccgttcccagtgctgggaccctttaaggtcatttgagagcaccaggatgaaggggggatttttaaaaaatcaaaatacaaatccaactttttgagttttcgttgtcattgctcttatctttcctgagtcacttcccattttccaaactcagcaaccccagtttgcgagtctgttttcatgaacctttgtaaggtgtttggtgcggtcacggtgtatacttgccgtgtagtatttgactcagcgcgatctgccttgagtcattttaccgcggccatttactactgccgttgagccctgtccacgccttgggagtgttgatatgttgagagttttctgtctggctgaggagggatcatttagtttttgcggacgtatgttgcactgaggatttagggagagagcaagatttctgttgaggaggttcagaagtataaggaatcgggagagtagataggagtgaagcatttggcagcgtaaagaagcttggcttagctttaatggattagggagagattgctatctagcattattacatgttattgttctctttgctattttatacacctagaacaacctttccctcggggttaacaaacatcttcaactctgttttctgtatggctcctgactcttacctttgttttaggaggcttccctcttcagaggaaactgggagaagccaatttccactgcttctttttcctgtgcctttttaacactcaaacccagaacacttaatcctctgcagctcgtgcaaaaattcagtctgtaatttaaaatgtgtgcacggtacactgctgaccatgggcatgtctattgtttgtatctgtaatgtgtatgtccatttcagtgttgtctgttttagtatgcaggtgatagactagagaacaagacctctgtctccgtagcatcctgggtatgtgagcattcaataagtacttttatgagaatgagttttgttttaagcttaattaaaaacatgcttgctttctaaaaaaaattcttaatggttatatgtacgaagggatggggaattgggtaaagggtgcatttg

SEQ ID NO: 9743 - DNA, 6000 bp, Homo sapiens
ctctgccatggttattcaccaagtggagtccagcagtttaggaatcgggaggtctcccatgatgagttgtcatcttctgaattgctgcaagtgacaccaaaggggcccccctaccagtttctcacttcccagtctcactactggatcagctcttaggagccaggagagttcactgctgtggctaggatagaaaagggcagctagtgccccagggtagatcttggaaaatattttttgggaaaaatgtaattaaggccacccctaaaatagatactgtatctggctgtactatactaacagtgatttgcctgcatgtgtttgatagagatttctaccatgtactgcttggtgctggatagtctatcacagcaaaaaaaaaaaaaaaagttggattataaaggcaagtttgtagagatatttgttatagaaatggcttaaatgcaacaggatttttctcttgatactactgtttgagatacaggtttttatttaatggtctctttggcttgccgtcacaatgaaggttggtggaaaggaatgaagcagtttcttcctgcaaaagcagtggaccatgaggaaaccccagttcgctatagcagcagcgaagttaatcacctgagtccaagagaagtcaccacagtgctgcaggctgactctgcaggtaactatgttgcagccttctggtaccaggcagagggagaaactgcttaggcttgctataaagtgctttgggatttacagttctttgatccctttcatgtttaagaaatgaattgtttcctaaaggtagaaccacttttttaaaaggtgactcttcagagagtcatttctgtatcttggatattctgtctgtaaagttgggacattgatttctaaagactctgggcattatgtatgttaactgaggcttgtggggagacccgagatgttgagaggagagcgggaaagacagaagaagccttacagtgtttatcctcttagcctagtacatacttattttaaacatttcctaatatttgaaaaaaatctctgaaattatttttcaagattaatatttattccagtaactgaatgtttcttttccaatgaaatattctgaaaataattcagaaaggaaatattcagtaaagaaatatgttgtctgtaaatctaaagaacatatgtgaaaattctatatgcaaaattacatgaatgagactttctggtatattattactatgagaagtactagacagtatgtttaattttaattttcaaagttcttacagattaagtattgatggcaacaaaagtatcctaaagaatgtttgcttttagtataatctgcagctgccaccctaaattatgcaatctctttactagtaaaatgacttttctgttgttttgtgatatccacagagtatgctcagccactggtaggaggaattgttggtacacttcatcaaagatctacctttaaaccagaagaaggaaaagaagcaggctatgcagacctagatccttacaactcaccagggcaggaagtttatcatgcctatgctgaaccactcccaattacggggcctgagtatgcaaccccaatcatcatggacatgtcagggcaccccacaacttcagttggtcagccctccacatccactttcaaggctacggggaaccaacctcccccactagtgggaacttacaatacacttctctccaggactgacagctgctcctcagcccaggcccagtatgataccccgaaagctgggaagccaggtctacctgccccagacgaattggtgtaccaggtgccacagagcacacaagaagtatcaggagcaggaagggatggggaatgtgatgtttttaaagaaatcctttgaagatgatgctgctttttacaaagcatcgttttaaagcacatggccttttttttttaattattagtggtagtaatatatagaatgtattacataactgtcactgaagtggttggggaaaatgtggtgactgaggtacaggaaactactaatcttgccatcttgctttaaggtgttatggtggcacagttactgctcgcctgttaaatttcaaatgtcctgtttgatactactgtagaacactatttttaatacagaaaaagctccctataatgcacttcagagaaattaaaaatcacagagtatttattaccaatgctgcaggtacattaatgaactcgagatggctctgtaagcctgactggcaataacgcacggtactgttcttgaaatacctaatggcttgaaattctagtctgtttgtgaaagatgggtactatcatgatttcctcttctattcctatattcttttctggattttttttaataattagtgatataagcattgtttttattgcagccatatccacttatccatcttaagatctgtagctgggattttctgacttgtaatgagcagggggattgctttttcactttgtgacactctttagagctttaatgcttcacagtatatggcctggtctcatccttgcgtgttccacttgaggccctttggtgtcttgccccattcttgtgtttataaaatgtttgagtatttctgatgagtgatgcttgccttagtctcatgaattcagatcccttcatgtcctttaagtatgctcctcaatgtgtaaacaggaacaactttatgatttgaaagctttaaaggagattcttctcccacccccaactttatttgcaatgggatttttcctaggagagttatgaaaagttgaaggcttctaagggaatactgtaaacatgacccacttatatttatcacagtgaaaggcaaaattattcactcagaagtaatataaattacctctttaaaaagtaaccagaatttgtcctttttggttttatacattcacaaacatatacatttttcttgagtctcaaggtattttatatttttagtcagaaaaaataatttttcatttcagttttccataaactgttacacaaaatataaacctaacgtgtatttttcaggactgcgtgatcgtgcactttgtgtggtaagaggtttgagtagtcctatatgtcacctagggaacagacattatagcttactagcaaatgaatattcatgccttgtttttgatacctcctggcagcttccatgtcaccacttgttcatacctgcccagagctagttttagacatggcaaaatagaaatcatctgtaatttattagctaacaatgtaaaaccatcttttaaagccttcagactgtcaagacgacatgagcagctcaccatatgataaaaatacataaatttgacattccctcttccataaacctttgtttgtagatttaatgttgaacagtacttttccataaagttctagtcacttctgttggcctgagccaccagattatgatgttgccagaattcactcaatttgaataaagatgaacagtatttgttttcttgtttccatgaattatatcagtattctaaaacatcgcttcagaaagagaactgtttatttctgcaggcttcctgtccttttgtggtatggttttttggccttattttcactggcttttccttctccaaactttgaggcgtgatttcattcattgaagaatcaatacatattttgtttcaaaatgtttgaaacaaaagacatagatggtagacttttattaaaacatatatggatgtggaaagcacatatattaatgcagtcatcccttttcaggtgggaagagagcaaaccagttgattttttaattcatccttagtacacagagaatatacttttcctcaagtaatatacctgtttgaagctttaagagagatgtttttggtaactatttcattttcccaaagaagtttgctattcttgtgttaattgtgtatacctgattgttttttcctggaggtttttgttgttgttgtttagttttgggtttttttttttttaagaggggcaagtgttttctgaaatgatgcatattttaagactcgattcatattgccactgtgctatccttgaactaccaataatttttataaaatatctagtttttactacttttatataaactttactttccagatgaagagctgagcctgattcaaatggtttttctgctttatacttctttttagttcattggtttttatagtagaggttttctattttttttttttttttttttactacatttatatgtctgatacatatacggctttggagacaatcaagtaacaactgaaaatgtgaaagtaaccatatctgacaaaattcccttgaatttttatcctttgcttgcaacatttaagactcaaagtcactggtatattggattaagttttttcctgttaatgcaattatagaaatacatcggagacacaacaaatgtggccattacaggtttcataaaattacactgacttggctgttacttgatcttaggaaacagcacagtttaagatattgtgaattctgacttatactttattaaatgctgtaaatctaaatagatcctgttggatgtgatgggtctagtccagtttatttaagttcatgtttcactgtttgcactttgcattgaacaatgggtttattcgctgatgtaaacggttcgagtgaagaattaatgcagtaagtatgacaacacatacacacttgcctctccccatctccagaagaggggagcagagtccgagcttatctaaatatgaatgtggccacaaagctgtggaaggtgacaaagcttaaacacctttgccctggctctgcattgtcacctagagagcaagaggtctatagaaacatcatgtcacatgaaacgattctctgctttttggttctgaacttgaagtccctaaactgcaaaatctaagagttgggtggttattaaaatgcttttaaagtcaactgtggcaccaattctaatgtaatccaacttgtgactgtttttttttgttttgttttgtttttgtgtgtgtgtgtgtggcactgggaaaagtggaaacaaacatgtattgaaatacatattggaaataaaaatggtttgagcgtcagtgatattctcccagaatgtacttatcttacctcggcatgtactgtagtcactcagtatttgtatatgttgctagaatttagattgtaaaatagtgaaattttaatgtgttcatttgtttttaatgtatatatgtcttgctcagattatttggtttaaataaaacaaccttgaggtttgtagcttttccttatactataaaatgccagattcttctattttaacctcactaatttatggccaatattgtgcttccagcaacatttgaaaatgacactgttagtttactttgactttttctatgaccagcgccatcctttttttaaaaaaataatttcaacttttattttagattctaagggtacatgtgcagagtgcaggttgttacatgggtatattgtgtgatactgaggtttgtggtatgaatgatcccatcatccaggttgtgagcatagtacccaatacatagtctttcagcccttgccctccccgctcccctcgctccccccgccgcagtcctcagtgtctatcgttcccatctttatgtccttgtgtacccacagcaccattctttttgaagcctgatttactttatatcaattgaacttcagcagccacactgcagcctatggctgtgtggtatgaggggaaaatcacactgattgattacatgtgattccagttctggtaccttccttttgcacctcaaaaagttataagaggaatcaaaactgtgggactctgcaaacatatgctggtattcatgtctaatctgggttagatcaactactactgttctcccctttattctgctttataagtaccgcattctgtttctgagccaaatctaatgtatttcaccctttatacaccctctttagagaggcaggttggttgtcagtaatcaagccatggttttccagtgtttcc

SEQ ID NO: 9744 - DNA, 6000 bp, Homo sapiens
aggtgatagcttcatttctaagctgaaacaggaaactaaaaaacattaatgatttatctagcttcaggtaagtggtatttaaatttctatttaagcttttcccctaaaatggtaaatgattgccactatgtatttattctcagtgtctttagtaaagtactaaagttaggcatatttatcacttgataggtgaccatttgacttaaaatatttgttatcctaaattaaaacgaattgaatctctccccagagagtgcccacagatcaatatgggttttctcttaggtttcctttttagttctctttctatcccacttttatctatcctagattaaataatttacttataaagccaattcctttttttattccttcaaatatgaagacattaccaaaataacagtaatgatatttgttatacataaaatgaaaaatcgcatgtttccattaaactctttgggctgaattttatagataaagcattcaaaatacattatgagagccttttgggtgtgttatttccactttatttaaaacttatttatttaaaacggtaattgtgtttcgggaggaacaaaatactcccataattgtgaattgggtggctatgcctcaaataaataatcaaaacaggaaatgtgatttcagtatggttttcagtggcacttacctgtaataaagatcttcagatgaaagcccaaggtaaatggacttaacattttcagcacctgtgtaagatgtggtcttacatctttgtagagggaaaaggctctcatttaaaaccagctttaaacagctgggactggcagcttcaccttttccactgtcttttgttctgtggcttggagcttaattttagttatttgaaaatgagaatccaatttttatgacagttattcttagcgttctacaatgtacctgcttctttggttggtatttcccatcctgatgtctttaaacatgactaaatttcagaatcgtgaacctctgatgccatctccacagtttatcaaatcttacttcagttctttcacggatgatatcatttcccagcccatgcttaaaggagagaaatctgatgaagataaagacaaggaaggggaggctttagaagtgaaagaaaagtaagtatgtcaagcatagtgtctacttagtggtgttttgggtgctttgaactttccttagggcccatatgggttctgagccatctcacaacagcagctatctatctacagatagagatagacagaaatataattaaaaattatataatattattattataaaaacacttttctttctagcatgtatctgttacttctctggtaactcagggttttactgccaggagtctaccctgcttttactcaaggtcctatatgatcttctcaaaaggactccgattgaatccagtggctgaccgtgtttgaatagaggcaataacttgaaaattattgtgtagctcaacatgcagatgttctagtgcagggaagtttttaatttataaacagatacttttaggggtgcccaaagagtgaattttttcaaggatttttctgcttgtctaggaagatgcccatttggagggcttcttgttggagcctgtagagagctgaaaccaaagtacaggatactgtgtttctagctggagacctaatgatataatgtcgtataaaccatctagcctgctttattccattcgtatttatcaatacttgtatttttctgtcaagggtagccctctctgagagaaggtacaatattattatcaacatgatttttttaacgagttaggaagaaaaggaaatactgttctagtagctgtgcataactgggttttgcatcttcagcatattggagggtttgaagaaacaaatggcttttgatttttatcttccaatttttctaccattgctattgaccttttaagagaagatactgtgcataattatactgcagtgtacaaattttagttcattgatacacaatctttgagaagattgtagttgggaattaaatgtttaagatgtcgtattagctcttgtgacagttatgcaaatactttcttcttctggttaagaaatagtccttgtcccagaaaaactataatgaatttaataccattattctaaaagctttactgagagatggtaggacgtagctagctatcatcagcacactaactggaattggacccaagttttaaattccattttactctgagccttagctttatcatcctttaaatggagctagtaatatttaccttacaaggttattgtgaggtgtagaaatcatgcttataaataactagcacttatgttcttcagtaagtgggattacttctaatctgatttaatcattgtttgtgttttcgttttctcttttttttttgataatgaggtatctttcgcctaggctagagtgcagtggtggtgcagtcttggctcactgcaacctctgcctactgggatcaagcaattctcccacctcagcttccctagtagctgggattacaggctcatgccacgacgccagctaatttttgtattttgagtagagacggagtttcaccatgttggccaggctggtctcgaactcccgacctcaggtgatccacccacctcggccttccaaagtgttggaattacaggtgtgagccactgcacctggcctgtttgtgttttcttagcctggtgacctgagaaacaaaactagaatgtaggcaacattggaatgtcattacaggagaggttagcatagagcttataagatttttggctgacataactttttaaatttttttaagagacagggtcaggtcagacatggtggctcatgcctgtaatcccaacactttgagaggctgaggtgggcagattgcttgagcccaggagtttgagactagcctgggcaacatggagaaaccctgtctctacagaagaataacaaaaattagcttggcatggtggtgtccacctgtagtctcagcaactggggaggctgaggtgggaggattgcttgagtcccagaggcagaggttgaagtgagccaagatcatgccactgcactccagcctggggaacagagcaagactctgtctcaaaaaacaaaagggagagagagggggtcactcaggctggagtagagtgttgcgatcatagctcactacagcctccaactcctggaatcaagctatcctctcgcctcaatgtcttgcgtagctgggactctaagtgcacaccaccatgcctggctaattttttttgtttttaattatggagacagggtcttgccatgtttccccggctggtcttgaactcctgggcccaggtgatcctcccacgttagccttccatactactgggattacaggcatgagccaccatgtctggcctgacgtaacttttaagtcatttgccagttttctttatacagatataacaactgaaataagaaaatgtactttaatttacaatgccttatgtttggaagatacctcatgtacctcatgacacctaatacaaatttcagttaaaaaaaattacttctacaagcatctccataaaagtcatcatcttagaagaataataagagatactgtgctcactgctttttaaaacatacagaagggtgttttttaaagtattaattgatggaagagtcttcctttaaatttgcttctttagtaagttcagttatttatttatttatttatttatttatttatttgagacggagtctcgctctgtcgcccaagctggagtgtagtggcgcgatctcagctcactgcaagctccgcctcccgggttcatgccattctcctgcctcagcctcccgagtagctgggactataggcacccgccaccacgcctgactaatttttttgtatttttattagagatggggtttcaccatgtttgccaggatggtctcgatctcctgacctcgtgatccgcccacctctgcctcccaaagtgctgggattacaggcgtgagccaccgcatccagccaataagttcagttattaattctaggtctgctcacaccccttgccttagcttctgtgactctaaagtcacttatttcctatttccctgttccttcttttagccattaaacaactgttgagtaccattgatgtgcctcagatatgaaggtgaataagacaggatccttacctatgttgcagatcagtctctctttcgttagctcatcttttcagtatctaaatgtctaagctgaggtattacccaggactctgctgcttcctttttaaaactcctcctccaaggtttcaagaaaatccccgtctacatcaaaaatcctaatctgtttaaccgcaccgcccctccccaccccaaccccatgccacactggctgattatcttgttaagtggaaatagacaattgcttaattaactcaggtgtgccaaatgtggcatgttttaacattgaattctttcttttcttttctttctttctttttttttttgagatggagtcttgctctgtctcccaggctggaatgcagtggcaccatctcggctcactgcaacctccacctcccgggttcaagcgattctcctgcctcagcctcctaagtatctgggatacaggcatgcgcctccacgcccggctaatttttgtatttttagtagagacgggtttcaccatgttggccaggctggtctcgaatgcctgacctcgtgatccgcccacctcggcctcccaaagtgctgggattacaggcgtgagccaccacacccagccacatttaattttttcttagtaaataatttcctatgtttgtttttattttcagttctggatacttaaaggccaaacagtatatggaagaagaaaactacgataaaatcataagtgaatgctcaaaagaaatagatgctgaaggcaaatacatggcagaagcattgctactacgagctaccttctacctgcttattggcaatgccaatgcagccaaaccagatttagataaagtcatcagtttgaaagaagctaatgtgaaggtacattaaaaaatgtgtgtgaagaaattattaaatagaaggcgatgcctttcattatgttttgccagattttttaaagcatttcaactgccattcttcaaagggctgtttttgtttttgaagaaactactcttaataataatgtagttggtgcagtgaatctgaaaacataaatatcaatgatatttatctttatttaggaaaggaaatttttttttcctatagcatccggtagtttcatcgtctccctgtagccactgcctaccatattggactgtatttgggcagtggtaaaggtgatatgcaattctgtagataatgctgtcagtaacgtgtaatatgtagcaccaggttataaaacacttaataaaaacacattaatatattcagaaaggttctaaaaatagaatgtataaatatgccaaaagtcttgcagttgtacagttggaacagcctttcattttctaagtattcttaatgtgctatgtattacacatttcataattaagattcaggggcatctgttgaattgttacattctattcagtgtaacaaaacaatttaaccaccaattaactatattacttattagtttgttaacatctctgtgacctgtttcctcattgcattaaatgaactctgtagcctctctcctctcctatatttgggggggatataaaagttgttttaagacctaaatattgttaaaagtttctttcaaaatgagattttcaaattgaagataccctcataatattatctttaatattattttctgctgattttcctgatgattacaactgatatatgttatatgtttttgttataattgtggaggatgttattatttgttctatatgtatgtagtattgctttgaacaaaattttaaagaaacgcattgttttcatgatcacatgacttttagtggcaagtagtaatgatgcctaccatatgccatgcacaaa

SEQ ID NO: 9745 - DNA, 6000 bp, Homo sapiens
ttattaaatttatattcttatttgttatttatatcagcttccaatcagaagactatacaacctcctagggtaagttaaagtttattaaatgaattgtgaatgatcatttgagggattagactgaggaacttggtaattgagatattttgctatctgttttgtctcacgtcaaattaagagaatgttgaagtcattgcatgacctttgcatgaatgggtccagttctattttaaaacctgtgtttggtcattttagtgtcaatgggatggaataaatgatttcttaagattgtactgacttctcacacccaaaactggaaagtaggaataatggctatattatctctgcaatcagaaggaagctgattccaatatatcacctcacctgttggattcattggatgtgcatacacagaatgacaatttcaggcttaaaaatgaggagaaatctatactaagttgacatcactgataattataatctataaaataaatgtaaatattgctgaaaacatctgttcggagttatgattcgatcctctcccatacaaatgttttataaacattttttcccttaaaactgtgcttaaggtttcattgtaccttagataccttattaagccatctgaggaaattgcaagaaaggagtaattttaggagggcataaatgaagagaaaagcatatttataaacatagacttatcacagtgacaggcccaagaggtatgttgtggacataagctctggaaaggattatattgtacttagcttcctataacggagtgatgatagatgtatctggaatgccaaagagagtcttctgtctgtggccggaggtagaggtcacatatgcttctaagtctgacaagcctcattgtgcctaaagggcaggtggggcgggtatgtgtgtctaccacaggggtatattctagaaagattggtgccatagctatgttggtcacaagaggccagcaacttaactggacctgtgaatcctaacacattttctttcccagttactgagttcaatttgcgatacttaaagatgattctgttttgcttccacctcttcactgtgttatttattctgttgttgctatttatgcttgcactttcatatttttagaagttagaatttcttgagctgagagtggtgaagtgggaaattctgtttagaaaaataatattaagagaataatacagttattattaaactattaacccgacttggcaagctttgctttaacatttacaggcttatttcgttgttttgttttttcttttttttttgactgtaggatttactgcttactacgtaatttaaatattagcatatataagttttactataaaatgacatgacataaattatatttttatgtaaatatattttaaatatttttcagaaagctgtagaggaaccccttaatggtatgtggttatttcactcttaatcctttaccagatcataatttgatctggcccgcaaaacagttagaatgccctgtctatgccttaggaagaatctaggtttttttcctctttttttctttccttggcatctctactcttgattattcatcaagaattatgggctgggtgcggtggctcacgcttgcgatcccggcaccttgggaggccaaggcgggcagatcacgaggtcaagagattgagaccatcctggccaacatgttgaaaccctgtctctactgaaaatacaaaaattacctgggcatggtggtgtgtatctgcagtcccagctactcgggaggctgaggcaggagaattgcttgaacccggaaggcagatgttgcagtgagttgagatcatgccaccgcactccagcctggtgacagagtgagactctgtctcaaaaaaaataaaaaagaattatgaatattacttttataatattctcaccactgggaaaaatgcactattctgtgtctaagtagctgcttaccttaaccaagtgatatttgggcaaggggatcgttgccttttgctactggttgagacgaagcatggcaccccctagtagagaaggatcccaattacttccaatttgtgatgtacacattttagaaagatacaggctattgccacagagatagaccaaaacatctcattttctttctttgtaaacctagatctgatttcccaactaagtctgtttcctttgtgaatgctgtgggtatgatccacagaaaggctacataatgaaatgatagctttacaattaatttggctgtagagttgtagactagttagcatatcattgcatatttgtttatttagaaatgatttccaattgtggaacctcactaactgcctgcttggcttgttactaatcctagcattcaaagaatcaaaaggaatgatgaatgatggtaagtataaaatgcacttaataattatagatcagttaaaacatggacattggaaaacaaaaaagcttcttgaaaatgtggctcttttttagtaaaagggacactgtcagatgataaaggttcacatttcttgatgtatacaacttaaatctactttgctaaaaattgcaaaactactactgtaaaaactgtagggtgtcacgaatcagactccagtcatatggctcccagcaaagagaaattaccactttttgtaaaatgtttttcagattccgtgtctggtgactgtaactttaagatgccttttataaggcacataaataatctggcacaaatctttatcattttgacagagtttcttttatgcttgtgttggtgattttgttgcatttaacccatggggacttaacatctctgcttttccaatcaggagcttggttctaaccttttgggagatgattaaagagagaggttgagagagagagagagagagagagagagagagagagagagagagagagagatgtttcgtcctcagcttttgcttccattttttttttaagaactctgggctaataacttctaatctttatagaatatttcaaagaaatatatttgttcttaaagatacataggtttgagatattgagtgctacaagcatttattttggttttaccttaacatattatgattcctcagttttgttggcatttagtaattatgtttatgtttttatcttatcaaaaaatgtcttcttacctttgatatttataatcactcctcggtcatgtaaatagtttgctttatattttactgttttaaagtctgtgaccttacctgccctcttctgtagcaaagtgcagcatttaactcaggaagctatattccccccaagtgtcattaatatttgcataagattaaaaacactccagtcggccgggcgcggtggctcacgcctgtaatcccagcactttgggaggccgaggcgggcggatcacaaggtcaggagatcgagaccatcctggctaacacggtgaaaccccgtctctactaaaactacaaaaaattagccgggcatggtggcgggcacctgtggtcccagctacttgggaggctgaggcaggagaatggcgtgaacccgggaggcagagcttgcagtgagccaagatcgtgccactacactccagcctgggtgacagagcaagactccgtctcaagaaaaaaaaaaaaaaaaaaaaaaaaaaaacactccagtcatgcattggtgaacaaagtttaaaacaacgtgtattcagcatggagtcacagaatgatcctacttttgtatgtttgtgtcacagcctttaaaagcatgtcttgttatataagccattaccctcctaaaaaagactatagttcacaggaataagttaaaagacataacaaaacataaaatgactagtaccaggaattgtgaccatggtttgttctggtaactgtggcatggcatggtttgttccaggaattgtggcatggtttgttcatgtttacattctgatgtcctattttttttttttaatttctatgtcctttccttttccttggtggtgtcattgttctgtagctgtatgaagaaactaaacttttctccattttcaggaaagcaatctaagaatcttgagtgcctcttcctttgttaatttctcttaagatgtgacttttttaaactactgcatcaggaaatattgtaaaacagttttgccttgaatatttgtgatgaaatctacgatgatcttcaagattctcttaattttgctaatattcagctgatcagaatttgtttttaaaatgtctggctggtgggtacttcccactgacaactgcttattgcttacagtatgtctgccttgtcaatgaatgaggttcagggtgcttcctagggatcagagtcagtaccatttttctctttcatctacagctgatcagatgtttattttacttacattaaatgaatgatggagatccaaagtgaatattatagaatattattctaggatcaacatcttttgctttgaaaaatcaacatctcttggcttttcctcagccaacccagcaaacagagattatcagactctgttgattttttactttcatttggcattggcctttttcttactgaaattaaaaaggctaatgatttgcctggtttctgtctctgacctttgcaggtctattttcttaatttttagatactatatatctgaaactttttttaatgtgtcaactttttaatggatagaaaatagacacgaatagtgattatgtgttcatttttcaattttccagaataactgaagtgaagtgatggactccgatttggagagtagtaagacgtgaaaggaatacacttgtgtttaagcaccatggccttgatgattcactgttggggagaagaaacaagaaaagtaactggttgtcacctatgagacccttacgtgattgttagttaagtttttattcaaagcagctgtaatttagttaataaaataattatgatctatgttgtttgcccaattgagatccagttttttgttgttatttttaatcaattaggggcaatagtagaatggacaatttccaagaatgatgcctttcaggtcctagggcctctggcctctaggtaaccagtttaaattggttcagggtgataactacttagcactgccctggtgattacccagagatatctatgaaaaccagtggcttccatcaaacctttgccaactcaggttcacagcagctttgggcagttatggcagtatggcattagctgagaggtgtctgccacttctgggtcaatggaataataaattaagtacaggcaggaatttggttgggagcatcttgtatgatctccgtatgatgtgatattgatggagatagtggtcctcattcttgggggttgccattcccacattcccccttcaacaaacagtgtaacaggtccttcccagatttagggtacttttattgatggatatgttttccttttattcacataaccccttgaaaccctgtcttgtcctcctgttacttgcttctgctgtacaagatgtagcaccttttctcctctttgaacatggtctagtgacacggtagcaccagttgcaggaaggagccagacttgttctcagagcactgtgttcacacttttcagcaaaaatagctatggttgtaacatatgtattcccttcctctgatttgaaggcaaaaatctacagtgtttcttcacttcttttctgatctggggcatgaaaaaagcaagattgaaatttgaactatgagtctcctgcatggcaacaaaatgtgtgtcaccatcaggccaacaggccagcccttgaatggggatttattactgttgtatctatgttgcatgataaacattcatcaccttcctcctgtagtcctgcctcgtactccccttcccctatgattgaaaagtaaacaaaacccacatttcctatcctggttagaagaaaattaatgttctgacagttgtgatcgcctggagtacttttagacttttagcattcgttttttacctgtttgtggatgtgtgtttgtatgtgca

SEQ ID NO: 9746 - DNA, 6000 bp, Homo sapiens
ttagtataaatagcaattgatatttttactagtttccaagatcacagagatagggagaaagtttggaagataatatttgttttgagaactgtggtcttgctagattgagaaattaataaattatttgctttgaagaacagtacaagaaaaaccttctgaataaaaattttaaaacactgcacaattttgcatagaaacttccttctgagacatttgattctaaatggcaaaaatgatgttcagtattataatattatgaaaaagtatatataaaactttagattcacttcatacttttgttgttattgaataaattaaaaaattataataaagtaagcacaattctcacttgcagggcataaaaatcaggcaaatttcaggataaaataatcaggtctatttaaggcaccaacatcattccattatgtattttatatctatttctgttgaacacacatttaattaccattttttcctataacaatgttgcacgcataagcagtttttttcttcacaggtgaagaaaattataaaatgattaaaactctactgtctcaatggaagtctcaacaggtttcatccttcagtttaataattagtagttctttaattaaagccagaaacccagacattagtactcttccaacaaaaagacgtttgaaaaaggaaaaggcatagaccaaggttaatgaagtagacatcacttatccttactttatatgaggaatcttaggttcacaaaagttaaataatttttcccaaatcacaaagataagaagtgcaaagttaggatttgagacttgggctaacagattacaaaatctgtgctctttcctccatgctctacttctttgcattcaaaaattttcagtttaaaggttttcatttgaggtaagccattcttattttacacctttctaaccacaagttccagcaccacattctgaggtcaatgagatttgtaatttgaagaattagaagcaattttaaagtatatcttttcccctctagagaatgtgccttcttagatggtcacgagattggtcatcttttgaaagtatagtcgtgttccatatagtgatgtgtttcaagattttaatggagttgaaaaattcctattgtctagtgacgtcatagctgtcataatgccatagtgcaaagcattactcatgtgtctgtggtgaagctggtgtaaacaaacctactttgctaccagttgtataaaaatatagcacacgaagttatgtatagtacatcctacttgaaaataaatgactatgctgctggtttatgtacttgctatgtgatttatttagaatgtactctgtctacctatttaaaaaagttaactgtagaacagcagggaggtttttcagggggtattccagaaggcattgttatcacaggagatgacagctccatgcatgttattgcctctgaagaccttccagtgggacaagttgtgaaggtggaagacagtgatattgatgatcctgatcctgtaggcataggctaatgtgtgtatttgtgtcttagtttttatcaaaaatgtttaaaaagtagaaaaataaaagtaaaaaaaatttaaaaatagaaccacggttacagaataagaatgtaaagaaaaacatttttgtatagctgtactatgtgtattttaagctaagcattattacaaaagtcagattaaaaaaaattaaaaatttataaagtaaaaaagctacagtaagctaaggttaatttggttttgaagaaaaatatgttaaaaaatttagtgtagcctaactgtataatgtttctaaagtctacagtattgtacagtaacatccaaggcctttacactgactcaccactcactgactcgctcagagcaacttccaggcctgaaagctccatacatagttaagtactccatagaggtgtaccatttttatctctcatatggtaattgtactgtatgttttctatgtttagatacacaaatacttcccattgtgttacaattgcctacagtattcattataataatgtacaatacaggtttgtggcctaggagcaataggctatgccatatagcctaagtgtgtggtaggctatatcatctagatttgtgtaagtacactgatgtttacacagtgacaaaattgcctaatgatgcatgtttcagaactctcagaagatatccttgttattaagcaacacgtgatggtataatacttctgcctggattgcctttttctcttcttttcaattgataatattttgtccttccttcctagactggctatttaacccttggccaagtttttccctatcaaccaacctacctgatctctaatccctctgaatggcttcatatgatggtatcatctatttggtgtttatcatttactacttatggtaactacatcttaatgcacttattgtcttctcaattagaatatatccctttttacagaatacactctttcttgtacctcttgaaaaacttataattaaagagaggaattgagaggtttacctggaatatttgcagaatgtggtgtttttccatgtattggagtgaaacttggtaaggatcttcataaactatagaagggaaccttctataagtttgattgcgtatatgataaccctttccttggtcaatttctgaaaattcatcctgaaatttaaatccccccaccaaaaagtccttagtaaacctgaagggcctaggaattgtcattatcagtgaaacctgatgttgatgagatcttaacacaaggagttggagaaaatacacatttttaagagagacttggataatcctccaggtctccaggtgcaatataatgcacctcatgtcctgggaggtaccttaggcattgccaatcaacttcaagtactttttccttcacagggatgtctaatcaactccaaattcccttctcctggtagaagcccagagagggaaaatgacttaatatcacagagttagttgcagaactaggacttaaaatgcaggtttcctgaatcctggtttattaatccttcctgaatggcctttgggtagtagagaaggcaataattctcttttatttcccatccttctcttgcccttcctgaaattatgggtcacacataccacaacatgtgggtttattctttatccttgatgcaacatgtgcccttccgttgtacccctatttttactctccaggccccgtctagatctctgatctcccaggtaggtatcaaatgcccatttaacttacagatttggttactatggcttgagttttttcttgactgctggtatagttcaatttggatgagatggaggggagtcttgggaaaagagcttggtcttttgcttggaagttactggtgaatctggcatcaactgggttgtagggtgggatagtggttgcattctgagtttccatttcaactgaaggcttggaattgaggtctacttggctatcctcaaatttgcagggttgtactctgtagtcagcctctttgtcctctttgctgttgcctaactggggaaatattctgtcttcagactggccacgtgtttcatagtaagacagctggtctttatgattagcttgtctgtctgctaagtggtcagtctggtcagattcagtgtagtgagcattgtcaactggaggttgatcagcattactatgagcttggtcaatagcctggtgttcagctagttcagtggcttggccgtacacttggtggtgagtctttacagatgttttgtggtcaacgaggccatacaatctgaggtcagtctgctcagaagttcctgggtcagccaggccagccaatctgtagtcagtcttctcagaacttcttctcctaactttccctgacattctgcggtcaatctgtacggaaggtctttggtcagatggtacggacgatccactgtcaatctgtacagaaggactttggtcagatgggacggatgacccactgtcaatctgcacagaaggtcttctctcagatagtttggataatctgtgtgtaatctgctcagaagttcttcgctcagcctcgccagacattctgcggtccatctgctcggaagctcttctctcagactggcctgccattctgtggtcggtctgtctggaacctctctggtcagatggcatagccagtctaccatcaatctgcccagaagttcttctctcagcctgggtaggtaatcttcgttcagtctgttcagcagttctttcctccgtcaggccagacacctgaccatcactctgttcatgctgtacattattagcttggctagatgccttgcctttagtctgttcagacggtgtttgattaacctgatcatctgctctaaggtcagaaacatcagcagggttggatgctctgcggccagcctgaccaggtgtactatgcccattttgttcagctactccgttggtagcttggctaaatatgctggattcagcctggctaggcactcttagggcagtctggtcagctattctgtgagcagtgtggttatctgccttcctttcggcctggttcttctggtcgtcttcttcctggcccttagtgtggccagcacttgagggagcggctgggctttcatgtttcaagggttcagccagagcctcttgcggaggctcttccatttcctgccgcgtccctgactggtctaggttgccaggcactgtgggtggggttgggctgggtcgtctaggcgaccctccaggaacgccccatgattcccacgggctttgttcgggtcactgcgtgcgtcagggagagtggccgtcccgctgttgtaagtggagggacggcagtcagctgaccctgcagtgtgcaggcgagcgcagggagtacgccatgtcctgagaaggggcgattctcaggctctggcagttacagcttctcctcaccctgccgagcaaccaggccacggggctccgtgcatcgccacctagagtgttaccctcttccttgttcacagaggttctccgcagtgtgtgagaaagaggccctctctcaggtactgctcctctgattaacatcccccaccgcacctccaaatgtcaacagatgaacacacaaccagctgcacgaggaccacaaaactgaacagaggttgttgctattgccatcccctttgggtatagctgtcttggcagtggaaactcctgccccaaggtgttttcttgctggattagacatgtgatctgtggcgggagagccagagagaggagagaagatccagtgagaatgggttctaaaactgcaccatctagtggtcttacagcagagaggcgagttagaaggaggccaaatcagagttccagaaaggaagggagtaaggaaagtgggagaaagataccagaaggaatatttagcaagtggagaatttgtatttgatagtgttggccagtggggcccagtttttgagatttggtcctcccactttgcaatcaaccttaagaatgcacctcagagtcagtaggctgtctactttcaggagtaggccagtacagaggtggtgattgatgagacaaattactttgaccttgcaaagcctgaaatcactgaggcaggccaagggttggtagtgtgatgccagatattcctttagtagggatttaactgcattaaacaattagaaatgagacttaaaatccaaattcaaatacttgtgacaaaggagagtggatacacttgacaccatacttaggaatggaaaggggaatctaagcacactgaagtaaagtcatttatgtaacagtgcctagaacataataggtgctcaagaagtgcttgttgaatgtcactttatgaattatctaccttatttatttaaaaatgcatgacaccattggatactgtgtttagagtaaaataggtcttgggctatggcttgtagcttcaaagtgctattggttttggagatttatttttccattttataacttaaatgtaataatcatagaaatataaaaaagaaagcgt

SEQ ID NO: 9747 - DNA, 6000 bp, Homo sapiens
agagttagctaccccaatttaattaccttcctagcattgttctcaatcttctgggataggcactgggagaggtgtgagaagcctggtattgacttgactggatcagcaaccctatctatgctactctccctttttgatttttccaaatgaatattaaagggttgcccttgtcttgcctttgggattaagtgagtaactttccacaggaagtgccttgggtactgagctgaccttctgccttctactttgtggatcttcgccaggcatacttgaatcagcaaagaggggtttgcaggtcttgtttcttgaatatctgtaaaaataactgctttagccttttttggaggatatttttgagaaatatgtatttctcaaacacacacatatgtattatatatatatacacgcagagagagtttttacttcaaaaacttttaaagagtaaataatatcatgaataatttcactaatgtttttagttaggcaaacctagaattttaaaatgttgattttgaattttatgactgatttggaataattctggcaattagttaattactcatctgaggcattcatttctagtggtcttaattccctgactccatagatctggcatgatgtttgaaatctgactttctaaaataaatatttttctgtaggtggtctgctgtgtgaataaataattcctgaagaatgaagaagattaattttgggagttctttgacgaactttgatatgtggaaaaagtatttataatttattgtaagaagaaagtaaaatattactagtggaagatcttcagttgtgtttcttttttgtgttcctcatttgctcacgtggctttttcccccaaaggatatataccaacaaatcttgtaacataaggttcttatgttcttattactatgtcattctgggaactctggatatctgttgtcaggagaaagcagatactgacctcaaccaatgaaatctccagaattaggtgcatagaagtaaaataaccctttaccaattcagaatcagtgtggtagccatatcatctcattcaacactctttttttttttttttttaactttcttaaaggtaagaacaagcctttagtcttattatttaaaccattattgttattctttactagctgtcttttggaaaagttagtttagattttggaccagattagggtaatttggcttagaagatctcaactgtttggcattatgaatctgtacatgggtagttacattttaaaatagactaggatcttaagtttcgtgcctacagggtagacagttgtctcttattaattagaaactaattagaaattagaattaattagaaattaattaggctagagactgaattggtattaaatgtcactaatcaaacagctcagtgctatgccatggtgatgcctggagttgaacagagtgtgatttccttagtatagcaaccttgtcatcctcgtagctgctgatgggctaatgaagtatgatcatattctgcttgtaagtacattgagtctaaaatctcaagaacaaaagatactgagaacataattaagaggatgtataatgttcatgtatcattgtgtgatgggaaaagtccctcctttataaaataaggagctgaatcagatgattccttaagattctttcctaattcattaagagcatggctttgatgtatgacagacttaggttcaatagctggctatgtgacctcaagcaaggcatagcttctttgggtctgtttttctcagctgaaaaaaaaaaaaaggtatagaagtaatacctaacttacgagattgtcagtactaattaaaaatgatgtatacacagtatttagcactgttattagcattctctattattttattgtttatatttttacttgaatattcatttggatataatacttttagtaagcacttcatgatttacagagataatctaggtgaagaatagaatcttggacaattaagacaggtatgaaccaacttcccacccaatacagatctttggcaggtggttatccaaactctgcttgaatatgtcctggaactgcaaaaaagaaaacaaaaaaatcgataaccttatcacccattgttaatttctgatatatactagtctagacttttcctatgcctttatacattttttaaaacaaaataaaattttttttctatgctacatatttttaatgaggttataacattatcatgttttgcccctaaggtattttaccatcagtgagtataggtctgtggtgtcatttgtattgactatgtataaattcatctgtgacttaaccataatttaaccaataccctattttttctttttgcgcatttggacattcattcattaaacaaatacttcatatagagtgccttctgtatgtcagatgccgttctaggaattgggtctcagtctggaacaggatatatgtcagataacctaaattccgaatttttgtttgttttattttgttggttggtttaatggaaacataataaggaagaaatctgaaatcccatcagtctacaataggacctctcttcgatgacattctcacctctgtctctctctctctgtgtgtgtgtgtgtgtgtgtgtgtgtgtgtgtgtgtgtgtacaccttttactttctttttttttttttggctactctgataacactgcaatagaagtctccttatggaaagtctttacaagtgtcctttactaatcacttcagctaaggatgggccagaggccatgcgtgttttcaaggctttgagtgaggactgcccccaagtgatctctagaaaaaatatatccatttacaccttagtgtctgagagcactgattaatctctgagcaacacaatttttttaaacttttgccagtttggtatgcttgcctgatttgtaagggaactgaaagcaccctttttggcctctgcaacacttaaaagtacatctcacaagaccctctgcccaccctttcctagtgcttaagtcttcccaaagatgaggtacagcatttcggtaataatgaaaagagatatcaccacagtcacttgaaaagtgaagaacttggcctcctagtgggtaacaaccacattctaatgcacctctttgctaagcccttgctcttcacaataatgacaactcaatacggatatattcacactattctctctagtcccccgtttgtctaaccttgaaatgtttgacttgaaggttgatgaaaacaggatcatatccttaagtaaggcctatcttgggaatactatgtctttcataggtctaatatgacctatgatgtgatggaaaaaccatggtccttattttacaggtgagtataggtgcttggagaggataaggaaatcaccctgatccaatagctggtaacctgcgaggtaagttgaagcccggtgttctttggtgtactagttatccagtataaacatcatgtatttgtagttataaattcacttaatgcatacttagtgaaggtctattatttgcagggaacagccctagtgttgataattcatgtgtgaatcagacacgtttttcaagatgagaggctatttgattcatcacttactgaggacatactatatgccaactatacagagtagtaaagagtagtaagacatagactctaccctcaaagagcttatagtctagtggatatatgtatataaaccgtagaaatataaagttgaatgctcagtggtatggtggatattccaagatgctttcctaaacagtgcatgtgtgattatgcccagcgtttatttctttaggtattaaaaactgctagatattccatctatgtcaattatggtgcttttgatagcaagtaatagaaaatcctcataaggaaaactcacatagctggaagtccagttagagtcagctctagatgtgatgatatcatagggtcactgatttcatccaagactcaagttattttcatctcagctttctcgtccaggactgatgaagcccgtcatgtgcttgcttgttaaagtccagcggaagagagagaaaccattccctgggcatggactcttagtcccctttttaaaggtctgattgagccaaattaggttatatgtatttttatggaccagtaatagttatcaacagaataccttatgctgattggcttacacaagatccgcccccttcatcccacccctgcttagatccatgtgcaggtttgatatctggacaaaacaaattccgtcacaattgaggaagaggtaaatggatattgaatagacaaccagatttccactacaccatcttgttcacctaacaggtcaccctgaacagtcaaattgagtttatggaggaattcctctcatagtttgctcaaactttagaaagaaaattattggtagagcaaaataattctgatgttcagtttttatagaatgtgacaattagcagatgttcagagaactgttccctgaagagttgtccttagtgagatctgaattaggatgctttcaactggaagcagtagaatacccaactacactgacacaagcaatacagaaaagtaatttacctccctgttaggaagtttggaaattaaaagctcctggtttgagatagtggctcagtggtgctttcaagaacttagtcttggctgggtgtggtggctcatgcctgtaatcccagcactttgggagactgaggccagaggattgcttgaatcctggagttcaagactggcctgggcaacatagtgagaacctgtctctacagaaaataaaaacattagctcggcatggtggtacatgcctgtagttcagttacttgggaggctggggtgagaagatcgcttgaacccagaggactgaggctgcagtgagccgtgattgtgccgctgcattccagcctggctgacagagcaaggccctgtcttaaaaaagcaagcaaacaaaaaaacctaggcttgttctatttttctgctctttacccttctcatccttaggcatatcctatctcatgactatggtaacttcaagcattacatcgtcacgcaactattcaagcctggatgaaaggtaggcctgctatctaccagggagtatactttttcccagaagctcccccacgtacttcctcttacatctcattgctcacaggtctacttttgtgccagtcgctatcaaggggaatgagatattgtgcttggcttcaaccaatcttagttcaggctctggcaacttggggaaaagcccaccttccttaacatattacccaagcaaaattagatttgcataaactgaagaaaaaggggaaatggctatggaagacaaccaatagtgtctgcttaagttcaacttgacactatgtgtccagagcataaaattatgcctctgttctattttagtatctatactaggaaagtgttaaccccaagctcagtgtttctcaaactgtatgtggtgaagaaccagcttttttcccctcaattcatcacagacccaacactaggaaaatgaaataaacccatatagatttaaaaatatgctatacaaacccagaatttttgttagttcaaaggccatagtttctctgtgaaattgctataaaaaatgtctaaagtcacaatttctgtccttaccccagcatgaaccagcatggacaagtaacaaacagtttgaagaccaggctgagttcatgaccacacttgttgactctggtgacttcataagatggcccccgcctgcctcgcctgcctcttgtctgctgctccttttgattcacctacaacaagctgttctctgttaccagaatatgccacgtattttgttttacttctgggactgactttacaatctgttctttcttcctggaatgccctcctctagctggggaaaacctactcatctttttagaccagattaaaagtcaccttccctgtgatgttttctcgtggaaaaaaatatttttttaagagacagtggtctcactatgttgcctaggc

SEQ ID NO: 9748 - DNA, 6000 bp, Homo sapiens
tttaaaggtagaaactatgttgtgagtgagtggtttatgctcgtgctgtaccctgcttagaatcctgctcctttcctttagtctggatgattgttactcatctttcaggcctcgactagcatattatctttttcaggaatttggtattggtccccaaaagttgggttaaatgatttttttgtgcttccataacatccttgtatacttttaacattgtattaaaatgatctgtttatatgtttgtcttttttactatattataagctcttcaaagtttaaatataagctcttcaagggcaggggccatttttttttccatctttgctttacccaaaactagtataccacctggcaaataatggctactgaataaagttttgttggattgaactgaacttagcattttatcctattggattgtgtgtgaacagttagtgagaatgaagacgtgtctccttccacttatcatatgcttcatgtagactttatggatttagtagcgtgtcgttaatgctttattgatctaattcatctttaactgactactacactttatcatctaggagtgagaatgaatagcaagtaaaggttgtaaaacttttattaaactctagagccagtatttctaacttaaccattttacagttttccacttagatctaaatggaagcttatgcacttgtattagacgattcccactatttctaataagtaaagaacaccacaaattcagctcattatttaacccattcagagcacttctttgagaccttatccatgatgcttattttgcagttttgcaaacagtctgtatcctatccatgtggcttcacatggtttggaggtattatatgggttccattcctttgctctttcctgcagggatcactgaccttaaggttttctgtattggtttttgtgtctggcctcatagattacttttaccttgtatgtcatgttgttttcaactcaccttttgcactgacatttctaccactgtactcctttttcaagtaatcttgtgaaatgtctgaacatatatactgtcttgaattcccttgtctcatctatggtggctttcctatgtgccaggcactattccagttgctgggtatatagctatgaacatattggaggggaagacagactacaaacctgtttatacacataagaaaatttcagagaatgataagtattaggcttaaaataaaacagagtatttcaagtatgccttggagaagaggaacgcagaattggagtagtgagagtaggcctttctgaggactttaaacctgaatgatgaaaaggggacagccatgcaaagaggctaagcagagagcattccaggcagagaaaaaagcagtacaaatgttctcaggtgtgaatgaacttgataagtttgcagaagagaaaacagaccagtgtttttagagcagagtgaacaaaaagggggcaatacaagaagaggaggttggagaattagtagggtcaaagcatgagggttcctgtaggtcacattaagacatttggatacagtgtaaaaaatatatatatttttttcctttggtgtatctgtgttatcttctcagaaagaatataagcttcttgaggatattgatattgatgctcaatatatacacattgtcacagaacttgggttaaaactctgaagacttggattctaatcccagctccctgaactagctgcgtaacctttcgggttgtgtcatttctttgtttccttatatgatcattgaggagataggatagctcccttttagtgctaaaatttgatatctttatgaacattgaagaacattgtaagtgctatattaatgcaaaatatatattacaaacatagtaggattatggataaattatatgtattgtcctagaagttccagattatgccacagaaatagctgctttatgtcctgcatcctggcatccttctcctttcaaaccttccactatttagtatacttcattcaggttcattatcatcacctagtactgttctatcttatatctcatgtaatcatatcctcttgccacttctttaataaggctttcacctctcccaagctattttgtttattttttaaaaaattatttcatacaattcaaatagcttcacatgcaatcctgttttttcacacactccacatatatcttctaaagatatttattttgtgactttcagaaaaactgtcttctcagattactctcctagaggctcagaatagaactggggaggcagacagagaagtcagtgaggtaagtgatgtgttcttaatataaccagaacatgagctagattaagagaaggtagcttcatatgaaaatacgtccataattttctagtgttgccagagaagtacattacctatagagtaagatctattaaagagattcataatggttattatatctcatttattgttacttgtttctgaatattaaaattcattgttctaaagcaacacaaatacagtagctactaatttgggatttgataacacatttttttatactgggttatcatctatctcaacttctttgttcatctcagaaaagtttctcagtgaagagattagataagactggcatagttttactaagattaaataaaaagggatctttggagaatgatccttttaataatctgaaaattactataagaagggtatggttgcttagtatcattctgttgatttaagagtattgttagctgcgttttgtttagttagctgtgtttttctaatcagtaagtcagtgatagaattatacatgcccttgaggagtaatgtggcttcctaacaaaagtatctgcttactttttaaaaaaaatcaattaggagttttattctgaaggaaaaaaagcttcttatgtaaggaatatctagaaaatgaattcccaatttccttaggtcttatgaatagggcttgacttcagtgcaggattggcagagtgcccttggaggtccagctgggagatacaaactgattttaaaaggatttagcagtgttatggtacaaagaaggttttgaccaaaaagtctgaagttttagaagatgaaatacaagtttttagttgggctatttttttaatgttataaaacatttgattacagctttttttttcttttttaaaaatagatcagcattgttgatattgccaacaagaggagctcttctgctgaggaaagtggacaagatgttctagaaaacacattttctcagaaacataaagaattatcagttttattgttggaaatgaaagaagctcaagaggaaattgcatttcttaaattacagctccagggaaaaagggctgaggaagcagatcatgaggtccttgaccagaaagaaatgaaacagatggagggtgagggaatagctccaattaaaatgaaagtatttcttgaagatacagggcaagattttcccttaatgccaaatgaagagagcagtcttccagcagttgaaaaagaacaggcgagcactgaacatcaaagtagaacatctgaggaaatatctttaaatgatgctggagtagaattgaaatcaacaaagcaggatggtgataaatccctttctgctgtaccagatattggtcagtgtcatcaggatgagttggaaaggttaaaaagtcaaattttggagctcgagctaaactttcataaagcacaagaaatctatgagaaaaatttagatgagaaagctaaggaaattagcaacctaaaccagttgattgaggagtttaagaaaaatgctgacaacaacagcagtgcattcactgctttgtctgaagaaagagaccagcttctctctcaggtgaaggaacttagcatggtaacagaattgagggctcaggtaaagcaactggaaatgaaccttgcagaagcagaaaggcaaagaagacttgattatgaaagccaaactgcccatgacaacctgctcactgaacagatccatagtctcagcatagaagccaaatctaaagatgtgaaaattgaagttttacagaatgaactggatgatgtgcagcttcagttttctgagcagagtaccctgataagaagcctgcaaagccagctgcaaaataaggaaagtgaagtgcttgagggggcagaacgtgtaaggcatatctcaagtaaagtggaagaactgtcccaggctctttcacagaaggaacttgaaataacaaaaatggatcagctcttactagagaaaaagagagatgtggaaaccctccaacaaaccatcgaggagaaggatcaacaagtgacagaaatcagctttagtatgactgagaaaatggttcagcttaatgaagagaagttttctcttggggttgaaattaagactcttaaagaacagctaaatttattatccagagctgaggaagcaaaaaaagagcaggtggaagaagataatgaagtttcttctggccttaaacaaaattatgatgagatgagcccagcaggacaaataagtaaggaagaacttcagcatgaatttgaccttctgaagaaagaaaatgagcagagaaagagaaagctccaggcagctcttattaacagaaaggagcttctgcaaagagtcagtagattggaagaagaattagccaacttgaaagatgaatctaagaaagaaatcccactcagtgagactgagaggggagaagtggaagaagataaagaaaacaaagaatactcagaaaaatgtgtgacttctaagtgccaagaaatagaaatttatttaaaacagacaatatctgagaaagaagtggaactacagcatataaggaaggatttggaagaaaagctggcagctgaagagcaattccaggctctggtcaaacagatgaatcagaccttgcaagataaaacaaaccaaatagatttgctccaagcagaaatcagtgaaaaccaagcaattatccagaagttaatcacaagtaacacggatgcaagtgatggggactccgtagcacttgtaaaggaaacagtggtgataagtccaccttgtacaggtagtagtgaacactggaaaccagaactagaagaaaagatactggcccttgaaaaagaaaaggagcaacttcaaaagaagctacaggaagccttaacctcccgcaaggcaattcttaaaaaggcacaggagaaagaaagacatctcagggaggagctaaagcaacagaaagatgactataatcgcttgcaagaacagtttgatgagcaaagcaaggaaaatgagaatattggagaccagctaaggcaactccagattcaagtaagggaatccatagacggaaaactcccaagcacagaccagcaggaatcgtgttcttccactccaggtttagaagaacctttattcaaagccacagaacagcatcacactcaacctgttttagagtccaacttgtgcccagactggccttctcattctgaagatgcgagtgctctgcagggcggaacttctgttgcccagattaaggcccagctgaaggaaatagaggctgagaaagtagagttagaattgaaagttagttctacaacaagtgagcttactaaaaaatcagaagaggtatttcagttacaagagcagataaataaacagggtttagaaatcgagagtctaaagacagtatcccatgaagctgaagtccatgccgaaagcctgcagcagaaattggaaagcagccaactacaaattgctggcctagaacatctaagagaattgcaacctaaactggatgaactgcaaaaactcataagcaaaaaggaagaagacgttagctacctttctggacaacttagtgagaaagaagcagctctcactaaaatacagacagagataatagaacaagaagatttaattaaggctctgcatacacagctagaaatgcaagccaaagagcatgatgagaggataaagcagctacaggtggaactttgtgaaatgaagcaaaaaccagaagagattggagaa

SEQ ID NO: 9749 - DNA, 6000 bp, Homo sapiens
agatctccttctgggaacactgctttaggtgaccttggccaacgcccatcctgtcctgatcttatccaggacctctgtggcttcacgctggtcctgggagataatcacagacacagatctctagtgttcaaatgccttcaagaagggtgaccacaccttatgttcttccttgggtctaaacatccgaagagttgccactgtcttccttgcctggagttgagcccttggacttgaccctttatcctgctcatctgccaggaagcctggtgtcatccctgaaccagccatgcctctgatcttcacaacccatacctcacttcctcttgatttatcctcagcccaaatctgacagtctgtgccagctgagcaggaaagaggaaagcagagaggtgcttatgagtgctcaggaagagagatgtgattacccctgggtgtcagcccgaggccaagctacaaagcctgccttcccaatctctcaccacacccttgacttaggactgtatgaagaaaaactagaaatgtaacacagggaacaaaaatggttccagaaaaattgcgtgtatgtgggattgatgaacactttttgtgggtttcagagctaattctcccctctgttgtgatttggaatgctgcaggtggttaactgggttgaaaaacaattagcatgttttactataatatacattttctattaaagagtttttaagtgctaatataaatattaactaataagcaattggagaaaaaaatttatatggaaaaatctcagttcaagcctagctctgaaaattaccaattgcatccctgattcctatctgtaaaatgaggataataatcattcatttattaaatcattattttgtacctttaaaagaaaccaccaaacaaacaaaaaccaagccctgttctgtaagctggggctatagtgatgaacaaagcaggcaaggcctctgctcctgtggaatttatattctggtcaggggagacagacaataaatatgtacaatgtcagatggtgataatgacaagtatttgtcatttttgaaaagatggtaatacatctctgatgaattgatatttgagcagagattaaaggaagtgaggaaatgacctatgtggacatttggcaaaagagctttccaggcagagagagcatcaagtacaaaggccttgaggtgagagccttgggtgtgtgaggaatagcagagaggctggggaagcctgagagaagtgaggatagggagagcgctagcagataatgtcagacaggccttgtggggctgctaaggctttttctctagagagctggggagccatagaaggtttttgagcagaggagtgataggatctgaattaggacagcttccgtgtggagaacagactgtaggtacaaaggttagaaatggcagagcaaacatccaggggagagaagagagtggtttgaactagggcacaagtagaagaggtggggagaaatggtaagattctgaaaatatttcaaagatagagacgacaggatttatggatggtctgaatggagggtatgaaatgacttcaagcttttgaccttgaggaactggaagaatggagtttttacttactaggatggggaagactgagggaggagctggcttggaaaaacaaatcagaagttaagtgttgggtatgttaagatagagatgtctcttagatggtcatgcagaggaggggcaggcagttggttctatacatccagattttaagagagagcgagagggccggagctgcagatacaaacttgggcatcatccgcacagagaggtttacagccagtgactggacaagcttatctaggtcttcagtgtagctgtctccctcacatggctgtgaaggtcaaaggggatagtatatggcaaatagttttgtaaactgtaaagtgctatacacaaggaaaggaacaagtgtgcaaatacggtaaagagcataatgtagagcaggatttaaagaagtatcttcaggtagagacagaatcatagaatacatgtgcaaggagaagcttacaaaccagtggatcaacccctttcattttatccaggaggagctaaggttggagagattaagaggcttgtccaaggacactcagctcatcagtggcccagctcatcctaggactggggagccctaactgctggtgcggtgctctttccaccacatgaaacacctgctcacatttactgcttcagctctctctgaatctgttaaccaggggcaagtaattcttcaaacagaaatctaattatatcgccttgtgcttttatacatgctacttcctctgcctggaatactctgcctcctcctgcttctctgtctggcaaattcctgccttatcttccattctcagctagaatggccatttccaatgaagacttctttgtcctgtttggtaggatggtaactggctctccatgtgcccgcagagctcccatcctgtggcagtccttgcatttgctatgattacgtctgcctcccctgcctgcctgtgaagctcttcctatgacctctctgcctagcttagtgagtgacacttaaatgggaaggaaggaaggaaggaaggaagatctcttctttcacattagttcaggacaatggcaaagcagtcattcagtgacacttcagttcctctgacctgagcaaggttttggttcacaaattgacaatgacttctggggtgggaattttcttttttctttgccatccccaggcacaatgagcaggcaattctgggagcagaaaacaatttggacattatacgtgctgtctttttattttcaattctctgtctcctattagtatatgactggctgtttgccttttgctgcaagacaaggtttgtgtttgtgcctgggctatgcacaagcatgtgtacacacacacacacacatagaggggagagagagagagagagagagagagagagagagagagagagagagagagagagagatggcctcttgggagagcctgcactcattttttagctttatctcccagaaaatgccctcaggtgggaggaagaagacagtgttgtgctcctagcttttccaccctttcctgctcttgagcatgagaatttggatctatttcttaaactctttcaaccttagttcaagataagtttggaatttctaggtcaagagtgaatcctaaaaactccgtcaccccctatattcaccgctctttagcttgtttgcttgagataacactgtgttaattactatatttccattctgcttaattacaatgtttcggtagaagaagaattgctcctaacagaagcaattatcttataggttattgcaaaggtctaaggaaggtggcagaagctggttgtgatactgtggtgatggaatcaatgctccaggttttgttccaagtaaatgattcagagattctaaccaggctgggtttgccaaagagcaggtggtaagccaggccagtaaagaaactgtctcttccggagggttgggcttctgaagctctcttgtattgagagctcttgagtaatcactgttaatcaatacaatgctttaggatgcaattaggattaattagcccaatgttgctagctgccctgctacttggtctgtctctttgggtgcctccttgtcctggctcctgcttcccctgaaaaggaaaatttccctctttgtgtccccagcctggagtctcctctcttcccttcctgtgccaagcccccaaaccccctctccactttataacatggagagggagagccaggaaaggccttgacatgatagtgggaagaaaagaatgaacacaatcaaaacatggtagcaaacaagagggcaggtgagagaatgtgtgaagggtggagaatattttggttatctttcaagggagagctgtggctgacagagccactcagaaggcattttgtctattctcccaaccagacaaattggaagctctcctgttcattccctggtcctgcagtatggaatagcttcgtggttttttgtgttaattaaaaggtatctctatattgcacatacttctattttttgtgatgacaaaaacattccccatggctctgcagggaatgggggttggggggggggcacgctcattgcagtggaaaggttccacggtggagatcaggagacctatccctatctcagcctgggactctgggagaatggtccagagctcattgtccttgttgataaaatgatagatttggactcaatatcccatgctgcctcttccaacttgatttttaccccagactgggctaccagactggtatgcccacacatgcccgtttcctttcttttcttctctgcatctctgcctttgtgtccagagcgtgttttccctttgcaagtttctctccattctgcacattatgagtttcagcatttctgttgccctagaaagtctatctttgagatcttgcactgtttctctttttacagtgtctcataaactcccttcttggattcagaaccaccctttctttcccattatcctgtcaaactgcttcttgccatggtccaggggtaggaggatggcaggcaggaggtgcttctctggggctcttagtgtctcaattcttctgctttatctgggttttcctttacccagaattttattatgtaaaatgcttcactcagactttgttctaattatccaatttttggcatactctagaaagtcttttgatattttccttcctccaacttatctatttttatttcatagttctctttggttatctcttagaatcacactttcctggttttaatttttcaaatcctttgtctttctcactcgttcttaggtcacctttttttacattttcaaatatattttttgttcagcagagggctcccttcccatccctcttgcagcccgggcagctaggatttgaagcttgccccttgaatctttctctcccgccttctagccatcagaaacactagatcacttaaacttgtaaacaattcggcctcgctccttgtgattgcgctaaaccttccgtcctcagctgagaacgctccaccacctccccggatcgctcatctcttggctgccctcccactgttcctgatgttattttactccccgtatcccctactcgttcttcacaattctgtagggtgcgtattactaaccccagtttacagctgaggaaactgaggcttggagaggttcgctcggtatcgtacagtttgcaaggttaaccctaatccggccagttctggctttccagcccagcccagcagcctagcctccctctctgccgctgcaggttataacggctctcccccgttttacacgaggtcccttccccttcaaatccacaggcaggaagatcgttccgaactgacggggctggggaatgtgggagtccggagtggggtttgggggagcttcctcaggccctgagtgttggggtgggcaggccgcgccgatggccctcggggatgtcacattcgagatggggtgaccgagaacggcaaggcgggatgtggcaaacggcggcaagtgctcggagtcctaggtcttgccgccggaatgccggccggggaaggggcttcggcccaccgggctggtcaccacactcggcaggcccggggcgggagtcggccgagcagccgcgggatgcagggcgccccctcgcgctcctccgcgcgcctcgaggctggcgggtgcagcgcccgccgcggcaggtctgctccagccccctcctctttttcgctcccgctcccctccttctctccctttgcttgcaactcctcccccaccgccccctccctccttctgctcccgcggtctcctcctccctgctctctccgagcgccgggtcgggagctagttggagcgcgggggttggtgccagagcccagctccgccgagccgggcgggtcggcagcgcatccagcggctgctgggagcccgagcgcagcgggcgcgggcccgggtggggactgcaccgga

SEQ ID NO: 9750 - DNA, 6000 bp, Homo sapiens
ctttagaccctgactccaaggataccttctccagtggccaccctgagaactagcatgtgctgggccgtctgtcctttttccccacatgctacctggtttcatggcctgcgactgtacacacctggagtattgggactcactcttaccaatccctgggggcccccatggcacctagcacagcccctagcacatagaggaactaggtgttgagtggatatagttaaagcagacccttataagggttaaacttttctaaaaacccaaggtcagatggggagcagattttataaagactttccaggctggttataggcagagccagatcaagagcctggctgcctgtatagataattttatagaaaatatttcataagcttaaaacaccagctagctctctaaatcttttctatactttatctacagagatacatttttatgtaagtaaatgtggtttgttatagctatttttattttattttattttttgagttagagtctcactctgttgcccaggctggagtgcagtggcaggacctcggctcactgcaacctctgcctcctgggttcaaacgattctcctgtctcagcctccctagtagctggattacagccacctgccaccacacctggctaatttttgtatttttggtagagatggggtttcaccatgttggccaggctgatcttgaattcctaccctcaggtgatccacccactcggcctcccaaagtgctgagattacaggagtgagccaccatgcccggccgagtacagctagaactttgtgtctgcttttttttttttttagatgcaatcttgctctgtcgcccaggctggagtgcagtggcgccatctcggctcactgcaacctgcgcctcctgggttcaagtgattcttccgcctcagcctgtcgagtagctgggactacaggcgcatgccactgtgcccagctaatttttgtatttttagtagagatggggtttcaccatattgggctggctggtctcgaactcctgacctcgtgatccgcccacctcggcctcccaaagtgcttggattacaggcgtgagccaccgtgcccggccaacgtctgcctttaaaaaaaaaaaaaaaaacaaaaaacgtaacatttgtatgctaattttcttgctgagtgtacaaatgaatgtcttttgtgtgctgttcctacattatctcactcgattctcataacgacactgaaaatacgtgttacgaccatgttcatgcggtagagcatcccttggaagtgatgttccatgatttgcttaatgtgtcccaggcatcaaacatggaactggtgtctagatttttcaccgtaggtccagggctctttgtattctctgagaccacctctgatatttctttttatgtggccactgtacataattctgtacataattgatgcgttttctaaaaaaccacgctttaaaaaattgagatgaaattcaattttccacctctgtctatcccaaacatttttgtcagccccaaagaaaacccaatacccattagtagtcactccgaatttcctcctcccctcagcccctggcaaccactagtctgcttaatgtctgtatggatttacctattctggatatgtcctataagtggaatcataacaatatgtatctttttgtgtctgacttctttcactttgcaactttttttttttttgagacagggtctcactctgttgcccaggctgcagtgcagtggaatgatcatataatagctcacagtagcctttatctccctggcttaagcaatcctccaacctcagactccctagtagctgagactgcaggtgcataccaccgtgcccagctaattttttttttttttttttttttagtagagatagggtctcactatgttgcccaggctggtcttaaccttctgagctcaagcgatacctcctgctttggcctcccaaagtgctgagatgatagggatgagccactatacctggcatttgcaaaatatttttcaggttcatccacattgtagtatgaatcagtactttattcgtgttttatggatgaataatattccattttatagctagagcacatttcatttatctgatcccattctttttgatgaccagagaaatccaagtgctactgctggttgctgaagtgtgatgcatgtttaagaagagagggcatctcaggagaggggtgtgcactgatggcgatggcatggcctgtggggaggctgagagcagtagggtgtctggagaagggagagttgatggttagagctggggctgggtatgtggccttgagggacccagaggtcagagtgggaggataaagcttggccaggaggggcagctgagggggtatcacgttcctagaatagaggagcagccagttcagggaaatgtggtggctgaactccaaagatgtctgcaggtctgggtgtggacggtttcaaagcgaggcattttggtccaaaaccaaggagtgacctggtgcccagatggaaaaggtcctggattcccataggagcaggagcagtggcggcggcttggcctgcagggtgggtgtgctagtggcagcctggccaaggaaggcagtggcgtgttctggaggagagccagctcaagtggagagggcccaggcactgttgagagggccttattaggagtccagctgggtggagtcatgggagtgcagacttgctcaaccccggtcggccaagcgtccttgtccctcccatcattacaacagagccagtgctcattaagccattatttgtgccattttgagtgaccatgggagaaatggaaagggaataaccttgagtcccaagagcccaatttcaggaggaaagaaaaaaatccctttcctctcctcttcactctctccaactgaaatgaaaacgccgctttgctgatcaggggcaccagacaataatctctgtgactgcctggggagccctgcatgtgggtattttaaaccgtaggttttattattgttcaggtatggtgtggccaacagatcgggagacaaccaccgtggaaaagatagtttgttactcatggctcccaagaggagggcacatgccatgccatgccatgcgggggccacacggggaaatgccagggtcagtcaggaggcagagggagccagggagaaatgtgggcaagagcctttattgtggtttccagggaaggaacagagaggcggggtcagcaggtttaggattggcagtttgaataactacagcaggccctggagcctagaggctgtctctggttgttcagtacctgaccctggggtgattagggtaggaaagtaatggccttgagtataagaacccaataaagaaggtggttgggagtatggcctctggattggttggtttgcatatgaaaggtgcactcacaagcaagtcatttactgtctctaggaattggctaggcctgggaagagcagtcggtccctccagggtcagcgagaccccagatttcaaagtatcagagatgaaaaataaaaagtgctgggtgtggtggctcacacctgtaatcccagcactttgggaggccaaggcaggcagatcgcttgaggccagtagttttagaccagcctggccaacatcgtgaaaccccatctctactaaagatacaaaaaccagcccggcctggtggcaggtgcctgtagtcccagctacttgggaggctgagacacaagaattgcttgaacctgggaggtggaggttgcagtgagccaagatggcgccaccgcactctggcctggacgacaaagcgagcctctgactcaaaataaataaaataaaataaaatggagtaaaataaaataaaataaataaaataaaatggcatgatggtctagtggggaaggccacgggccttgcatttggtatggccctgctcaggcctggcaggaggcacctctcccctcctgtcctgctccctcctcacctctcacagatctctcaggtcctaaaggagagaaccaagttggtgttcagtcctctctgtgccggtgttctgggtctggaagcatttgcattccacacaagggaagaattctgacgtggaaaccctgcagcctgacatgccttgtccgtgcttctccatcctgtgctctagactggtgctcagagcctggccatgcagccaagggagtccgcggggcaaggctgctgcagcctggcggagggctggagtcccttggcatgaaaaccagagccacagcatgagagaggacaggactggggagcctgtgctgcttggcctcgccggccttcgctgagctgctctgttttcagggctgctccagcaggtactgcagcagcacggtgacaggtggcacttccagcagctgtcgcaggctctttcctctgccctgcccttctggcatcgccctaccattccagcagcactggtgaaacaaggggggcaggtttgtcagaaaactgaggcccagagttaggtgctgagaccccaagataaacacactgatcagaccacactggtgaggtctctttttcagagccagttgaagatggggtctgaatagatagaataaaacagaaatgtgtgtttcagcagagaggtctcctgcccagatgtgtccacatttggcttgactcctccagtctgttttccctgctggccaaggtagtgagccctggccttgtgatttttcccatcaggctccacctaatccaaaaattctcgagtgctgaactcagagtggacccacaacaccctcagagcccctgcggctgggagctcttgtctgagaagatggagcctcccacttctttccccagtggccttcccactcaggaggcctgtgctagtgtttattctgggcatagtgcacattcttctctctggaacacagctggaaagatggggcaaggcagaagctgggcctcagacacaggcaggggacatgggccgactgcccacctcctggcccctgaccatggtggagtgggaggtctggatggagcagtgagaaggtaagggctgaagatgctgccaggagggcctctgcttagtgttctgaactgaccggtggcttgaggggttaccttgctcacccactgtgtctggcaagggtggtgtttgtccaaggtcggaaagctcggtgaagagggaactgtctcttttttgagtcttatgttctcagcactcggggtgcttgtcaaccagccttttggtctgcatttgaaagtccccttccagagcctcgaggtaatgtgacattgtaactcagacacagtgctgactgtgtggccttcgctggtgctttgtaatcggctgttctgctttgttaaatgtttcctggggggcatatcttgatcttcttcactggatttcaggttcttcaagggaagagaagtgggtcttactcctttcttgtaaactaacactttgtaaatcaaaatgtttgctatagtcaggaagatgaacacctgtgtgtagctggctgtagtcagaatagcatgtaaggaaggctacaggagagagacagagaattcccttctgtctggagagagcagagaaggtccagaggatggatatggattccagagagggatgagattgagagccaaagggatagaagagtgtgacaaagacatacaggaaggagggacccggggtccatgcagggcggatgtgtgaggagcagctcctggtgggctgggaaagcccaactcaggagttcattcttaatttcctagacagcagggaccctccaggagtttttgagtgatgtggctgattgattctcacggcagtggtgttgagggggattgggaggagagggcagcattcctagagggatggacccagggactgattgcgcacctcacttgttcactcaacaatgctccctgagtttttcctcttagccatcctctcacatgggtgttattgccatcccctcttactggtgaggaaagcaggcccaggcaacacaggccgttggtggt

SEQ ID NO: 9751 - DNA, 6000 bp, Homo sapiens
agcaggtgggacagggtcactctcgtttcctcctatgaaatggcacatttaagatctggggaaagtgacccacaatataagccacataggatagggagaactgactctctgagctcagagatagtatgagacagttgatatttattataaggctgagatggtaagaagaccgtcaggattcccactctctggtgccagacctatggttacttggccagatagaactttagtccctaagatactgaacatgcaaagctgaatggacactaaagtatcatttttcagaaggccctcttaaggaaggaaggggaaacaaggtggaaggagagaaaaaaaaggagaatttaattcagtaaacaaatatttatggtacccattatgtgcacagttctgttcgaggctctcgaaatacagcggtgactaaaacaaacagaatcgcatgcactccagtgaaaaaatatagagaaatcaataaaacaaaaatttaaaaatacatagtatgtaatgattataaagcaagggaggagttggaagggatattggtgttcaacttaaaagagtcagataagactcccttagaaggtcacatttggatacaaaaccgaaggtgctaaggaatgaaccctgtggatacctgaggaaatcatgttccaggcagatgaaatgcaagtgcacaagtcttgaggcaggagagggtctggcctttctgagggataataagatggccagcatggctggagggaagtgatgaaggagaaaagagaaaatgatgggttcagagagtttaagggcctgtgggttattttgacttttacttgcataaggtgggagccactgagggttctaaacagaggaatgacatgatcagtcttaggttttcagtaattcgatcctgcagctgtgatgagaacagacccctggaagggaagggcggaaacagggagacaggttaggaagccattgtagtggtccgggtaagagatgaagtttgcttggaccaaggtgatggaagtggagagaagtgctccaattctgaatgacttttggagatacagccaatagcatttgctctgattggatttaaggtgtgagagaaaaagcagccaaggataatgccaaggtttttagcctctatgaggaagcctggaggaactggtttggagaggaatcttagagtgcagttggggtgtattaagcctgagaagcctaatagacatccagtggtgcagagtaaacagttggatgttctaatgtggtatttagggaaggattagggctgaagacataaatgtagtatccaaaacatgaaactggatgagataaaaaagagagtgcatgtagatagagaagtccaagtgtaaatcctagggcactccaagattaaagtgccagggagaggaggaagaacaagcaaaagagactgagaaagaacagccaatgaggaaggagaaaaaccaagagtctaatgtcctggaatccaaggaaagaaaatgtttcaagcatgtgaaagtgatcaacagggtcaaaggctgctgataggttgagccgaggctgagagatgattttggatttaacagcatgtcattggggactttaacacaagtcatttcagtagagtggtggggatgaaagcctggttcaagtatattaaaaagagatttggaagagggaaattagaggtggcaggtataggcaactcttttaaagagcttggcaataaagggaagcagagaaaatggtcaaagctgaagaggaaaatgatgaaggcatgtttttatgttgatgggaattatctagtagaaaaagggaaatgatgagaaaggatatagtcaatattcgttcgtacaagaaaatagcagaaaacagtgtaacctacttgataaaagattgtatgtaataaaagattttattgtaatatttaagacagattttttactgaaacataataaacacccatgaacccatcacccaccccaaaactagaccactaccagtaacatctatgtgctcctccctctctactcttacctctgttttagaagaaagcaactttcctgaattatgttattatcattttcctgtaaaattgtattctcttgactgtatcctgttatatttattgactaacagatcaaggataatctaacctaggcctctcaacctggcctcctacagacagacatcaaatcgcctcagtcagacagtcccatgaaattcctcccttgtgtttaacttgctacactaaaattctattctgtttcatctcccatctctagctgctagtgctttgtctgaaaaaccccttcttctgcacaaagatcattattattcactcctgtcagcattatttactctgcatgaaagcaggaagagattggcacacctttatcccatgtgcatacaacagaacagaccccagtggccagagcattcttgttatcctggaagatgcacctgcagccctcaagcctccagcctccccctcccaacctaaggcacaccctgtttgtcaagtgcctataccaacacctggcagcccctccacagaggcctcagaaaggcaggtgatagctagtgactaggtttctttcatccccagatcttgccctgtgggcagtggccatccccagaccatccaggattctccaggtgtgcaaggacctacaggattttgacaaatgccagcagagtggcctctttacaaatggatgacaacaggctgtgaaaagctttctgcatgcgtaacccaaaaatctagttcccccacttgttcactgatgcttaaaattgctttagggagagacaaaggctttcatctcacaaacagagaaagctttgaagggcctgggtgaactaatctatttagactaatacacactgttgtataaatggaatgaaggattagatgatgcaatgggcccctttaaaataggtgtgaagtgacacgggatgtagcagagaaagatggggcttttcttgcctccttgggtgcttaaaacgaacagtcttgagaccaggtgcggtagctcaaacctgtaatcccaatactttgggagaccaaggcaggtggatcacttgagcccagggattcaagaccagcctgggcaacatggcaaaaccccgtttataaaaatataaaaattagcctgtcatcgtggcaagcacctgcagtctcagctacttgggaggctgaggtgggaggattgcttagacctaggagattgaggctgcagtgagtcatgattaccccattgcactccagcctgggcaacagagcaagaccctgtctcaaaacacacacacacacacacacacacacacacacacacacacacacacacacacagtcttgaaaccggaagacctggagtaaagttgggccctgagccctactgccagctgttcgatcacaggcaaaattactcgaagccttgagcctgttttttatttccaaagcgaaggtaatacctaccttcagagtttactgtgaaactttgatgtcatcatgtttgtaaaagtgccctggcacagtgaccacattctaccctataaatattttctatctttccctgttgtccccaggcatctcaggctctgttcctatccactccatgcccctttcttagcattataaggtcaagagtgaggaatctgggaccacgcaacccagattcagatcctgactctgtcacttgctgactgtcatcttggacaagtttaacctctctgtgctcagttccctcatctgtaaaaatggggataacaatagtacttgcctcatggggtgacagtaaggatgaaatgagttcatgtgtgtaatgcacttagaacaattcctggcaccaaaaactcattgtaagaagtgttgttactatgattcctgaggaattctcacctgtccactttccacaagccgaaagatcaagctccacttctgccctctcacctacaaaagcgcaccgtcaatggctacacattccgccccacccccaacgcccccagcccgggtttcctaacgtccccagcccagtccttaaccctccaggccgtctggtccttccaccaccagcaaagcccaaaacagctttcagcgtcccctagcagcgccctagcgggaccctgggaacccgccgctgcaggagaggcggggcggctctgtgacgtcgcgcccggcgctacccctggtgacctggcagcggagcccgcgcagggtttgccaggcgaaggcggagcgctaacgtctaacgctaacggcggtcgtgccccgccgctgctgtcacccccggccgctgctgccctccccgccgaggttctactgctctccttcttaagaagggtgggaggcactcggtctctccccacacctctcgcctgaggccaggcgccaggtgtcgcctgaagccagacagccggtttgggagcgagcctgaggtagccaccccgaggggaagtggagggagggcagggctctgagcgccccgagggctgcgctggtctgagggaggagccctgccggacgccccctggattctgagcctctccttgttcacagggcaaggggaaggcaaggggatcttcaagagaatgtgactgtgggggattatggctttctggccaatttgtgtgcgtattttgtacccagaatactattatacggtttcttacccggaggacagtggttgggaggctcaagagtttggaatcagagccctccaccgaggagccacacctctgctttttcatcagcgacagggatataaaaatacctctgggtgaattgtcatgtggatgtcatgggcatacctagcacttcatagactcctatcacacattattttatacctagcacttcatagactcctgtcaggcattattttatacctggcacttcatagactcctatcacatattattttatacctagcacttcatagactcctatcacgcattattttatacctagcacttcatagactcctatcacgtgttcattttatagctagcacttcatagactgctatcacgcattcatttttactagtacctattgaacactaagttccaggcactgggctaggcactgggatggtgtggtgagcaaaaactgaccagtcctgccgtggagtttgctgggggagacacatgttactcaaagaatcacactaaggataggtaagtgatgctctggaagggtatgtacaatggaactgacagggtaatcagggaaggttaagcagacctccaaaggaagaatcaacctgttaagaggaggagaatgtattccaaacaagagtaaccacatcccaaacccaccatctccaattccaaacccaaacagggatgtgcagttgcctgtgcttggttccaagtgatactcatagaaaccctctgagattctgccctggagcctttcattcatgttactggagactttcatttatgaaacggaagccctgtttagcccataccaataaaaccaagtgagagatccctgaaacaaggctatagtctattttaagacctacattcttcagcacttggcaggtatatgttggcctccattttacattgagaggcatgtaggtttcacttaggaggaaatgcattgaattgaaagagttggggttatggataagctctggaatgtataattgaagaagacctacactatcaagagatttaaaaatggaaaataactttacaaaatgttagaattgaggaatgttaagatagaatggacctttctcccacttctttgatgtgaacaaatgacccttattgcccaaaggcaggaaagctgggctttggtgcctcttcaactcagagagtctatgatttcaactctgtgattcaaaagtgcatggaactcctgaaagtaaatgggaacatggggggataatttgacctgaccctcctttagtgttttctatttctacaagggtaccaccactgtgcacccagtcatccaagcttgaaaactgatagtcactctagactttt

SEQ ID NO: 9752 - DNA, 6000 bp, Homo sapiens
cttgctcctgggcaaacattgctcttgagttaagtgacctaattcccctgggagacatacgcatcaactgtggaggtccgaggggatgagaagggatacccaccatctttcaagggtcacaagctcactctctgacaagtcagaatagggacactgcttctatccctccaatggagagattctggcaacctttgaacagcccagagcttgcaacctagcctcacccaagaagactggaaagagacatatctctcagctttttcaggaggcgtgcctgggaatccaggaactttttgatgctaattagaaggcctggactaaaaatgtccactatggggtgcactctacagtttttgaaatgctaggaggcagaaggggcagagagtaaaaaacatgacctggtagaaggaagagaggcaaaggaaactgggtggggaggatcaattagagaggaggcacctgggatccaccttcttccttaggtcccctcctccatcagcaaaggagcacttctctaatcatgccctcccgaagactggctgggagaaggtttaaaaacaaaaaatccaggagtaagagccttaggtcagtttgaaattggagacaaactgtctggcaaagggtgcgagagggagcttgtgctcaggagtccagccgtccagcctcggggtgtaggtttctgaggtgtgccattggggcctcagccttctctggtgacagaggctcagctgtggccaccaacacacaaccacacacacacaaccacacacacaaatgggggcaaccacatccagtacaagcttttacaaatgttattagtgtccttttttatttctaatgccttgtcctcttaaaagttattttatttgttattattatttgttcttgactgttaattgtgaatggtaatgcaataaagtgcctttgttagatggtgtccttgtgtctggggcttttttttcatttctttttctttctttcttttttttttttttttttttgagacactgtcttgctctgtcacccaggctggagtgcagtagtgtgaacatgactcactgtagcctcaaactcctgggttcaaacaatcctcccatataagcctcctgagtaggtggggctacagaagtgtgctgtcatgcccagctaatttttttttgttgttgttagagacagggtctcactatgttgcccaggctgagtttgggggttttgatgatgcacacagcagttagtctcattttaaatagcaaacgtgacacatggtaaatgggagtgactgatatctgctatccttattaggggttattggattacccaagataacgttctactgcatagtagacatttgcttcctccacgcacatcccactcctaccccatgatgatgagcattttgggtggggctgatcctgctcccagctacagaggttggctctggttggctcaagccaatcagcgaaatcccatgcctccttgccacagtaatcgtcctaaaagtgaacgtgtggcataagtggatacaattagaataaagcctaaactttggtaggaagtttggagaaagagaaactttcttcttctggaaagtgggcttgagggtgtgaagtcttgaactgcttctgttttgctggggacaaagctgacacacacagaggagaagaactgagagaaccagagagaaatggacctggcaccttgatcaaaccatacctgaagcctctggaatttcctctgctacaaggccagtttgagtagttttttcctgttatttgcagtcaaaaaatcctcactgataccacttatgtttattcttgtattctcatggctaaatggtgaatcacatataagaaacatactcttatgagctattaatgcccacactgaagacattagccataaaccaatcagttaacagcagcagagttattgcaggcagaacttaaaattggctggccactgtattttgtcatcacagactctatttctgacctgcatattaccccctttgtatttaaatatgattctggattcagtactagtagaaggctatttctaaagaggcctttcccccttcctgatccccctttggaccagagcatgccaactcctgtcacttctcaaaggtcctgagccatactaattctgggcttcctgggccattcttcaaagacttgcattgctattgtttgactaaaaataatctcctaaagatatatatgtataatgtttatgaaaatggcttttgcatttggattcaaaaagttctttttgattattgtgcaatatgacctataattcatttgtttctgcttgctggtaactttgcaaaggttctcttactaattgttctgccactttggagggctgtcagagtgaactttctacgatgcatatctgattgtgacactcccttgcttaagctttcaggggtcatccactgagaaatagagctcatagaataaagtcagactcctggtggcatggcactcctagacatccagttactgccgctgattgtgctggctttgcctcatgaccctccccacgatgcactaccactttggccatacctgctgtttcctaaacataccacctctttaatttattattattattattattttattttatttttttgagacaaggtctggctctgttgcccagcctggagtgcagtggtgtgatcttggctcattgcaaactgcctcccaggcttaaaccatcctcccacctcagcctcctgagtagctgggactacaggcacttgccaccacacctggctaatttctgtgtttttgtagagacgaggttttgccatgtcaccaggctggtctcgaattcatgagctcaagcaatccacctgccttggcctcccaaagtgctgagattacagacatgagccatcgtgcccagccaacatatcatctcttcatgcctccattcctttgctcatgctttccctcttgcttttcctcatgctcatgctttcccattttggaatgcccgtttccttcaactacctaatgtcttaatctgtttgagctgtattacaaactaccacagactgagtggcttacaaacaacataagttatttctcacagttctggaggctgggaagtccaagatcaaggtgtcagccaatttggtgtctggtgaggacccagttcctcatagatggccatcttttcactgtaacctcgcatgttggaaggagcaagagatctctctgggtttttttttttgtttgttttgtttttttgatggagtcttgctctgtcacccaggctggaatacagtggtgcgatcttggcttactgcaacctctgcctcttgggttcaagcaattctcctgcctcagcctcccaagtagctgggactactactgcagccatcacgcccggctaattttttgtatatttagtagagacgaggtttcaccatgttagccaggatggtctctatctcctgaccttgtgatccacccgcctcagcctcccaaagtgctgggattacaggtgtgagccactgcgcctggcctggggtctcttttataaggacattaatcccatccatgagggctccaccctcattaactaataacttcccaaaggtcccacctcctaatagcatcatatcaggctttaggatttaatacatgaatcttgagggtacctaaacatttagaccacagcacctgataaatacctccatctgtctagatcaactaaaccattttctcctctggctaccccagtactctcaagtagagttgcctccttcatgtcccaactggtcctgtaaccagttcccccagagaagtggttgtatccatggttccttctaacccagcacaatgcctggcatagaacaagtattaaataattgtgaaatgggagtgtaaaacaggactcttgcagctcaaccttgaagaatatgatcattatcttgattgtggcactggtttcacaagtatacacatgtcaaacattgtccaattgtacactttataaatgtacactttggtgtatgtcaattataccttcacaaagctgggtttttttatttttattttttaagtggggagtgaactattatgcagagctgtctccaaccttgagggcggcaccttctaggcacagccctaagacaggacgagaaaacgcacatgtcacactgctggcttgtcgcattagaccgaaggtcctctgaggttggctttgggtgaaacaacaggaatggcccgctgccctgacagcggcaggtcttagcttcacattgggatcccctgaggaggtataaaagttactgatgcctgggtcccattccagagcacatcagtctagggcagacctgagtctcaggagtatttaaactctcacctgcacgtttttttgttttgttttgttttgtttttgtttttgacagagtctccctctgtcacccaggctggagtgcagtggcacgatcatggctcatggcaggctctaactccggcctcaagccattttccccgctcagcctcctgagtagctgggattccaggagccacccgccacgccctgcgctcccaggtgcttctaatgtgcggtggagtttgagaaccactgtttcaggtcactgcgttggctaatggtccaactcgaggtcacatcacatcatttcccattccttcctccaagagtctagaagccaagagtcacattgtggacaagaagccccagtaagctccaagtctctctatggagaaggtgaccaggcatccagattgcatcaacaccaaaaccgtttgaggctgaactcttttgtgccattttgcccccaaacctaccctggccttccgcccctttctgcggctgggcaaatctcggggccggtaggtggcgctgtctcctatggcttgcagaaaactcaacttccggcggggcggagcttttaaaaggcttttttgaaatcattaactttcattttattatttctttttatcgagacagagtctcaccctgtcgcccaggctggagtgcagtggcgagatctcgactcactacaacctctgcctcctgggatcaagcgattctcctgcctcagcctcccgaatagctgggattacaggtgagcaccaccatgcccgactaattttgtatttttagtagagacagggtttcaccatgttggccaagctggtcttgaacccctgacctcaagtcatcctaccgctttggcctcgcaaagtgctgggattacaggtgtgagccaccgcacctgaccttaaaaccattaacttttaatgcaccatttctaaatttctccttggacttttccttggttggtctctttattccttgttcttgtgctagggagaaatgaatgttacgctgtttgctcttgttgagatatttgcatcatttttactgaatcattagagatcatatattgtcctctttattgctcttataatacataaccataagcaatgttaatgtcatattaatggtgcataaagtttggtacaattgttcagagaaatcaatgttttatttagcggtgattgtacaaaattaaaaaggagataaatccattttcattgaaaaattcttcagttaaataaaaaacaaaatgccacccgtgggaggtgaggtgagcaagatctgtctgggttttccctgagggttctccgagaactccagtttgccattaattgacaatccacagtgcaaaaagcaaggttggagattaggttggggagagccctggaaaacatatgggggtgttcttctcagtctcagggctatgaaatgtggtgcttttattcaaagacagaagcctggggcaaaccatcaaaggcctcataatttctgcaggcctggtaacatttttcctgagcccacaatcacgacatgtgggccaataaggaaattctctgctacttccaggtgagagagccagtttgaaaatcaacaacaacaataatatttcatatattatgaagcactccctat

SEQ ID NO: 9753 - DNA, 6000 bp, Homo sapiens
gctgaggcaggaaaattgcttgaacctgggaggcagaggttgcggtgagccaagattgcatcactgcactccagcctgggtgtcagagtgagaccctgtcttaaaaaaaaaaaaaaaaaaggccgggcgcggtggctcacgcctgtaatcccagcactttgggaggccgaggcgggcggatcacgaggtcaggagatcgagaccatcccggctaaaacggtgaaaccccgtctctactaaaaatacaaaaaattagccgggcgtagtggcgggcgcctgtagtcccagctacttgggaggctgaggcaggagaatggcgtgaacccgggaggcggagcttgcagtgagccgagatcccgccactgcactccagcctgggcgacagagcgagactccgtctcaaaaaaaaaaaaaaataaaaataagcttaggccgggcacggtggctcatgcctgtaatcccagcactttgggaggttggcgggcagatcacgaggtcaagagatcaagaccatcctggccaacatggtgaaaccctgtctctactaaaaatacaaaaattagccaagcatggtacatgcctgtagtcccagctactctggaggctgaggcaggagaatcacttgagcccgggaggtggaggttgcagtgagccaagatcacaccactgcactccaatctggcgacaaagtgatattccgtctcaaaaaaaaaagttttataattattatacatgtctattttttgtaattttatttatggaattaatttataattgttttatcaaaataattatacatatcaacagtttttatcaaaacaattataaatatcgacaatacttattatcattacaataacctattatgtcagccactaagcactttatgtatagttttctgtttaaacttctccacagcctgactggttccatcagacacagggctgccatgaagtggttgaagcctgggcttcaaggtccctcacttgcgtgagctccttccaaagccttgttcctaattttatattcataattttgtactttcaaaaaaatttcaggccgcatggaacctagatcctcccacaggttctattatttacccattttacagatgaggaaacaaagatttagagaggttatttccccaacatctcccagccagtaagcggtaaaccccgttgcttcccataaagagagaacacataatgttggtgccgcccctcatccagaagccaataaatcttgcctgggtcctggagttggaaagttgcattatttgacactgtctgtcccagcagcatctctaaaacattgagagggagggaaactcacaagttttgctccaagaacagagcaagacaggtttagagatttctgcaggaacagctgaacaaaccaaccaacaagccaggtatgggaaaggaatggggtttggaaatcagaaggaaggtaaagagaggcagaccagtctttaggaatctgagggatttctgagtaaggagcagagcccatctctcctgggtgagcatttatttagcacctacaaggtgccagccactgtgctaggtgcttatgaatatctgttccaacttcaccacagtcctgcaaagcaaacagtataatccccatttacaggtgaggaaagcagggctcagagccacattgccaccaaacagtaatagatcccttttttcagttaaaaaaaaaaaggcagcagatgagacttgggcacgttagtgcatgtgtagtctaccttcataagaaagaaaaataaagttatgaacttagaaaacaggcagcagagaaacgattaagctataaatggaaagaaaaagttgaagagtttctgaggacacagatttggattgaaaagtccccaggaggaatcttggaagttccttgagaaagagtaagtagtcctttatgaactaacaggaacctgaaaagcctagaaaaactgttgggattttcttttcctactaatcttcattttcaggaacagaaaagggaattggggtgggaaacgggcttgtggtaattggtgataagtaaggactttgatcaatgtgtgccactgggtgattcagggggcagggaagaaaagagatgacctacccacttgcaaatgttggtaagtggtcattgacatttacactggttattttacccaaggatatatttttgagagctataaggggttgattcattttctggccctctatgtcttctgtgagaccagacactggaagtaggcgctgaccccaagtcccctgttcacctggtgccatccatcgaaactgtaggtgtgatgtcaatgtctaggtggctacggatgccactcgaggtgtagcctcataaacctaagctggtcaagtgatggctgacaccttcagacttgcatatcaaaactgagaccataaatatgtgcctgaaggccccaggactggggtggaagaccaagccagaaggctttccccatattaaggaagctgtttacctaagtcacatggtaacagtgtgcagaccagacagatcatcgttgtgatgcagggagaaaaaatgtttttgggtaaagcaattaactgcttcctggaattggcgtttaaaacccagaaatgccatcaatccagcactgtctagagattaggagctggtgatgcaagtgcctgtggcgaaaccaatgcatcgcgccgattataactgataagctcagccttcttgtgggtatgtaaccccacattaatcatgcaattactatttcagaaggggaaatctacaaagagcaggggtgttaggaagaaatggagaggctatgtgatgtagtggaaacaacactgacttggaatcaggaaacttgagggttagtgctggttctgttagcaattagcttggaacacttgaatcaaatggcttcccttctttgggcctccgttgcctcatctgtgaaataaaaggttggagtagatgatcgctagggtatcacctagatttaagaatcatgattctaaataactgttttattttttatttttattgtttttgagacggagtcttgctctgtcacccaggctgaagtgcagtggcgtgatcttggctcattgcaacctacgcctcccagattcaagcgattttcctgcctcagcctcccaagtagctgggactacaggtgcgtgccaccatgcctggctaattttttgtatttttagtagacgcggggtttcacaatgttggtcaggctggtctccaactcctgacctcaggtgatccacccaccttagcctcccaaagtgctgggattacaggcatgagccactccatccagtcctaaatagccaaatttaaacaatttttggaagcccgccaagaaaagtgtcgagaccaaatagtaattataaaatgggcactgagtgtttcccaaactgtgctctgtggaactttaataatgaagaaagttttcatttctttaaaaaaaaaaaaaagggttcaatgccaaataagttttgcgaaactgtgtgctgtatttctcttcttagagatggacaatgaatattagcatattataggcactacaatagcccagcaccgaaaacctctctaattaaggttttcccaaccttattttcaattgtggaactttttaaaaaatgtaatatttgtaaaacacctgggcactaatgctctgggaaatagtatttgttctattacgccaaccctaaatgtaactctaaccttaatgatagtgttttaaaattgcactggatgcaaaaagaaagcaaactagagaatttctgtgacacttaacacagacaggaaaaaaatactaagtcaaaataatttttctagctctaactagtgaatgagacatttataattcaccgaagctagggaacattgcccaagaattgtgtggtaacacagaggtagaattttggaaatgacagccacagtgtgtgagcccctataacaaatgtgcaggccaggcacggtggctcatgcctgtaatcccagcactttggaggccgaggcagtcagatcacctgatgttaggagttcgagaccagcctggccaacatggtgaaaccccatctctactaaaaatacaaaaattagccagacatggtggaaggtgcctataatcccaactacttgggaggctgaggcaggagaatcacttgaacccaggaggcggaggttgcagtgagccaagatcacactattgcactccagcttgggcgacagagggaaactccatctcaaaaaaaaaatccaaacaaacaaacaaacacaaacaaatgtacactttgctgtgggaaccacccacattgccccagcaggaatcacccgtgagacttcttgtctgcagtccgagttgcctgcatctccttgtttctggctctttgtgtctgtgatataatctactttctggcttctctgttttgtctcaaaagccaagtttctggccatatctgggcctggctcattcctgtgtcacggtcagtcctttctcctcccactgagcagcatcctaatgtactgcacaacaggcagcctacacagaacctgggggaggagtaaagggggtttgttatggagacagtaagtgtttggaagcaggaagcaattaggatgaatcagtcattttcctccacagaagcatatattgctgtggtgttctcaggggtcttcatgggttaacttctgtataaaagatctgaaggaaggtgtacaaaatgacctgacaaactgtaggaggtacaacaatggcgaggaataaagagcactatgtcatgatatggtttggctctgtgtccccactcaaatctcaccttgaattgtaacaattcctatgtgtcgtgggaggaacctggtgggagggaattgaatcatgagggtgagtctctttcccgtgctgttcccatggcagtgaataagtctcacgagatctgatggttttataaataggagttcccctacacaagctctctctcgcctgctgccatgcaagacgtgactttgcttctccttccccttctgccatgatttgtgatgcctcctcagccatgtggaactgtgagtcaattaaagctgccttagcctcctgagtagctgggatgtgtgtaccaccatgcccggataacttttttattttatgaagagatgctgtgtggtccaagctggtctcaaacttgtggcctgaagggatccttcttttttttttttttttttttcctgagatggatctctgtcacccaggctggagtgagtggcatgatatccgctcactgcaacttctacctcctgggctcaagtgatcctcccaccacagcctcccaagtagctgggattataggtgtgcaccaccacacctggctactttttgcatttttagtagagatggagtttcaccatgttagtcaggctggtctcgaactcctgacctcagatgatctgcctgcctcggcctcccaaaatgctgggattaaaggtgtgagccattacacccagcctcaagtgatccttctgccttggcctcccaaagcgctgggattacaggcatgaaccaccacacctggcccttaaatctgttgcatttttaattttaatgatcatatttttaatttccaaaagttctttgttgttcttggattttttttcatagcaccttgttttatagatagaatattcttcttggatgtacctggagctactaattagtgttttcttccaaattctctctgtatcctgatttatgtttcttccagcctgggttgttctgtttctatttatgcgtgtatttgtttatttgttgctggttttcatcacacattgggtgatcttggttgtgggcatggatttccccagctgtcgcatggttaggtctgtctccctgctggggccctaccttgatgagaagtttgtgagtgctgttgattcttgagcagggctttatttggggtgcaaacgtccagccctggttttcctcagtgtattgagatcttg

SEQ ID NO: 9754 - DNA, 6000 bp, Homo sapiens
gtttcaccatgttagccaggctggtctcgaactcctcaggtgatgcacccgcctcggcctcccaaagtgttgggttacagttgtgagccactgcgcctgacccctttttttcttgtatgtgagtatatctattcttttcttttttgtgagttggagtctcggtctgtcacccaggctggaatgcagtggtgcgatcttggctcactgcaacctctgcctcccaggctcaagtgattctactgtctcagcctcccgagtagctgggattacaggtgttcaccaccacgcccagctaatttttttgtatttttagtagagagagggtttcactatgttggccaggctggttttgaattcctgacctcaggtgatccacctgccttggcctcccagagtgctaggattacaggtatcagccactacctggccaccttttttgttttctgtgttatcttcatagttgtctttctttggttgttaagtttaatccttgaattactttgagttcatgtacagcaacatcctctcaggagccacattttaatgcgtggtgattatctcaatttttcttggtgattatcttgattttccactgagtgtatgaagtaggcatctcaccagccccgaggctgtaagatctgagagttagctttaaataagtcgctattaaaattgctttctcttgctttaagagactcctctccctctctgaggctgtctgagtaccctgtctgtgtttattggctctagctgctggcttgtagcgtcttggataggcaaggtaacttagttattaggactgtgctttttgcatctttactgcctgggatcaaatcctagctctgttatgtttactagcattttcctcagtttcctcatcagtaaaataatagtgtttacctgatatgatcatggctaagagtcactaaattggccaggcgtggtggctcacgcctgtaatcccagcactttgggaggccgaggcaggcagatcacctgaggttgggagttcgagaccagcctgaccaacatggagaaaccccatctctactaaaaatgcaaaaaagttagccaggagtggtggtgcatgcctgtaaccccagctactcgggaggctgaggcaggagaaccacttgaaccgggaggcagaggttccggtgagccgagattatgccattgccagcctgggcaacaaaagcaaaactccgtgtcaaaaaaaaaaaaaaaaaaaaagattcactaaatcaatatatatataatgtacttggagccttagtaagcacttaataaattttgaattaatcacaaagaaggctaatggaatggaaggaacatttcaggcagagatatctgtaaagatacggagggttgacatttcatggtgtgtttagttaactgggctttcagagtggctcttgctcagaggaaggtgaagctgtgtagggtgggttgagttcagtttaaggactgctctgaaccattattaaaggcgtgggctttatccttaaagcccacagttgggaacattaaaaaattttttttcatagcttaccattttattcatttctagttatatgtgcatacattatatgaatttgtctttatcacctcttcctgccacagaaactgacctatatggggttctcagtaaatcagtttgagtacatgagtaaaaaaccaagtcattcacacaatgttctcccattagatccagctagagaagagctttaggaaaaaaaaaaaagacctgctccatgtacatcagtttagacagttctgtgttgtctagccttttattgattgaaaaaccttcattagctggtgcttccacattttggtaagacttgatgttcctaatgatcttggagtgctgaaaggttctgatttgtcttctgaattatcaaagcaaaattaaattatgtggcagcatttaacaacttgtaaaatgaatgtgggaatgttgatttgagattgtgtagatgggctggggggaagggagattaggagattaataggaagagatgcagtagtctaggcacatggtattggtttgaatggaggaggaggcaaaggaagggatgggtctgagaggaatttctgaggcaggattgcccaggtattggggacagggcagagtgaggcatcagaagatgcctgggtttctagcttagagttgatcagatggcagtggtattaagagagatcaagacttgggatcatgaatgataaggttttgttgaattgcatgtggggtggtcagtggagctgtctagtaaacatttgaaaatttgattttagaattcaggacagagagtgggatgagaagcacatttgggacttgaaactaagaattggttaagactgtcctgaggagaagattccgctacttatattttgagtagtgaacgtcacagttgtaatatgaaatataatggtgtgactgataaagacatgcaagttttgtgttctataaagtcatatcaggaagagtgatccatgttctcacctttgaggacaaactcattgaagcttattaattcaatttttcactagtggtttctacgtcttctaaaaattgttctcctggcttggaaaactgattcagtttagaattagtaccctgtgaattttaagtttccaggccatctgtttttcttttttttccttttttgagatggattctcgctccgtcacccaggctggagtgcagtggcacaatctcggctcactgcaacctccgcctcccaggttcaagcaattctcctgtctcagcctcccgagtatctgggactacaggcgcctgccaccacgcccggctaatttttgtacttttagtagagacagggtttcaccttgttggtaaggctggtcagccatctgtttttctttaaaatattagtagctttatttttttcttgatatgaggatgatacaagctccttataagacaaattagggcctggcgcagtggctcatgcctgtaatcccagcactttgggagcccgaggcgggtgtatcacctgaggtcaggagttcagaccatcctggccaacgtggcgaaatcccctctgtactaaaaacacaaaaattagctgggcgtggtggcggacgcctgtaatcccagctactggggaggctcaggtaggagaatcacttgaacccagcaggcggaggttgcggtgagccaagattgtgccatttcactccagcctgggctacaagagtaagactccgtctcaaaaaataataataataaaaaataaaatgaaattggaaaagacaaactaaacttattctacaaccttgagacagttaccattaacattttgttgaacattccttgaaatactattctttacattcattcatttttttttttttttttttcttgagacggtatctcgctctgtcgcccggctggagtgcagtggcacgatctcggcgcactgcaagctccgccttccgggttcacatcattctcctgccccagcctcctgagtagctgggactacaggtgcccgccacaacgcccggctatttttttttgtatttttagtagagatgggctttcactgtgttagccaggttggtcttgatctcctgacctcgtgatccacccatctcggtctcccaaagtgctgggattacaggcgtaagccaccctccccgggtctatgtatgtttttaaatggagttattctttgtcatttgtaaacagattttcgttatttacattgtacatggacatctttccatgttaatatagatatgtaggttagccatatttctaatgactgccaatattctattgtgtgaagccatatttctaacgactgtcagtattctgttgtgtggttctattaaaatttttttttttgagatggagtctctctctgtcacccaggctggagtgtagtggcgctatcttggctcactgcaacctccgcctcccgggttcaagtgatcctcccacttcaacctctcaagtagctgggactacaggtgtgcaccaccacgcccagctaatttttgtatttttaatagagacagggttttgccatgttggccaggctggtctggaactcctgacctcaggaaattcacctgacttggcctcccaaagtgctgggattacaggcatgagccactgcacccagccaagagatcacctttaatatagtaatttaagtcttttattaacaggacatggtggcaggtgccagtagtcccagctactcgggaggctgaggcaatagaatctcttgaacctgggaggtggaagttgcagtgagctgagatcatgccactgcactccagcctgggcgacagagcaacactctgtctcaaaaaaagaaaaaaataatttaagtcttctaagacagatatgtagctgtttctctcagggctgtttataaatagcaagagtgtaaaacagtgtaaatgttcaacaatggaacaaaagttaaaaacattctaataggtaatcccagctattcgggaggttgaggcaggagaatcgcttgaacccaagaggtggaggttgtggtgagccgagatcgcaccattgcactccagcctgagtgatagagtgagactccatctcaaaaaggaaaaggtgatctcttaaagataattgcttttgtctttggttcaaaattttgttgtgactttgaactgctactactgttttcagtatcctcagtctctcttacttctcttgccttgttcttcctttagtgggagattcttcacagtcaagctcccagttgctcttgatcctggggccaagatttcagtcattgtggaaacagtctacacccatgtgcttcatccgtatccaacccagatcacccagtcagagaaacagtttgtggtgtttgaggggaaccattatttctactctccctatccaacgaagacacaaaccatgcgtgtgaagcttgcctctcgaaatgtggagagctacaccaagctggggaaccccacgcgctctgaggacctactggattatgggcctttcagagatgtgcctgcctatagtcaggtaagctcaggtggagtccagcccatccctgtctgcttcagagaatgtcttgcagagtgactactggttgataggcttgggtggtgtggggtggatgaaatctgcagtcatttctaaggtcatcccaaaagtgtttaacctgcagtgaaatgactccatgggggtcttgtttctccttgggggatcacaggtagaggctaggggtagcatttggagaggtggaatgggtgttggagatggaagcaaggcattccacgcagaggcagtaagagggacaaaggctttgagatggtgtggctgggcagatactggggtagcaaagctgttggagtggttgagggccttccttgaatgttgggccttggttggaacttgaagagagagggagcaattaaggcttacaaagattttgttactatggcaaatcgcaaacatgccaaagtacaaagactagtataaactcccacacacgtcacttagattcagcggttatcaggttaccataattaacctacctctttttttctttggtggagtacttaaaaaaatttttttttttaagagacaggatcctgctctgttgcccagcctggagtacagtggcataatcatagctcactgtaacctcaaactcctgggctcagtccatcctcccagctcagcctcccatgtagctggagtgacaggtgtgcgtcaccatgcccagttaattttttatttttgttgtagagacgggatcttgctttattgcccaggctagtctcaaactcctgggcccaggtgatcttcctgcctttgtctcccaaagtgctgggattacaggcatgagccatggtccctggcctttttgctagaggattttaaagcaaatctcagcagtcatgtctttttacctacttctataccatctctaaaaaatatgggtattttagacgtttaagatttctttgcactgg

SEQ ID NO: 9755 - DNA, 6000 bp, Homo sapiens
atgggcacagtgtttcatgcctataatcccagcactttgggagactgaggtgggaggatcacttgagcccggaaggttgaggcactgcactccagcctagatgacacagagagaccctgtctcaaaaaaaaaaaaaaaaaaaaattcaatcttggggaaggcaagatcaaaagagttaacaaaggacatttgggcccctgattaagatagtatcatggataagaaacaatacttgattatttaatcaaaatgagaataaaagataaggtactacaattgtaaagaacctaagctctttcacaagtaaagaacctttgttctttccggtttggtttgttttgtatttaatcatctagaacataatccaacataaagccagagaattattgtgctctctaagaaaattatacacaaataagaatcatctttcatattatagatgaaggcattaatcagtaaaccaaagacgcaaacccatcaaagctgattaaatgttgccaaaattttaacatgtttcatggcttcttttcacatcccagtagtatattttacaaggcaaatcaaattcactttttaagatttgtctttctagcctgggaaacatgctgaaaccccatctccacaaaaaaatacaaaaattagctgggcatggtggtgtgcacctgcagtcccagttacttgagaggctgaggtaggaggatcacttgagcccgggagatggacattgcagtcagccgagatggtacctctgcactccagcctgggcaacagagcaagaccccatcttaaataaataaataaataaataaatgatttgtcttttacattctttaacaaactgttactttagtttgggacaaaaaaatgctccttttcctttaaaaacaaaaagacttacaccttatatttctctgttactattgttcctagtgtagttataaccacctgtatcaattatgacttctgtttcagagagaaaactgggtagagagaatggataataagaactacgtcatacacaagcatcttagcagactagtaaagctcacaaatacacatagcagactttctatagtcacacacatctctttaacaccttcttaacaaggcaaaaatgaagccatttgttaacattactcaaagatataaccactctaatagcatatacaaaacaagcaaaagtatgtaagcttaaaactatgtttaaacaatgttttactcttctaattagaaattcatctgggcatccaaaaattactattaattagctccatttaacattagtctgtgatttttaaattaccataagatcctggagatatttaagctgacacataattgctattgatataaaaagcttgtcagcattgtgattcaatttagattaacacaaactttcgtttttaaaatactaaacattacaaaagaagagtaatattaattttatcactaaacctgtataagtaagtttacaaagttcagattaaattttttctacatgaaaaaacaaaccccaagtgaaataaactgtatatagtattatagttaactctgatactagcctcagtttgccaaatatttaccttaagtatgtgaatttggattcttaaaatgtttccaaactgatagaatctgtaagaagaatcttttgttctttgtctagcatatttaaagtgtcagatgttcacttttttcttttcttagatttgtagggatgtttgacatatatatatgtgcttatttagctctgtaaaacgaatgagatccgaggtcctttaatttaggagacattataatctaatttattaatactctctaaaggtaggaaaatgttttatacttacaaacaagaggccatggtctttctgttttgttttttaaagatagagtctcactcaaacccaggctgaaatcatagctcactgcagctcaaactcctaggctcaaatgatccctttacctcagccttccaagtagctgggactacaggcatgtaccaccatgcccggctaattttatttatcatttttgtagagacagggtcttgttatgttgcccaggctggtctcaaactcctggccttaagtgatcctcccacctcagcctcccaaaatgttgggattacaggcatgagccaccacgcctggctgttgtggtgtttctgaattacaggacacataaagacctatggctttagttctacaactttttagccacgggtcaaaagtaaacacagaatcacaaaacctcactggtccagatctcaaagagctgttccctttcattgcccaggctggtctcaatctcctggcttcaagtgatctgcccacctcagccttcctaaagtgctgggattataagtatgagccaccacgcagagccagaattcttaattgaattacactcgacatagacaaatggacagaaaagtctgacaagctggataatgttttgatatctcattcaacagagaatagatatctatcactcttctgtagagacctcaaatggtcaaaccataaaaccaaattatcaattagtgctgccatcagtgaggagtaacttactgaccatgcataaaccagaaacaaaaagtcagcaagagaagaaacaaatgagaacaaggaaatcagcaaaactaaagtcctactgccacttaggatttcctttgggagctaagaagagatgtacccaggctaaaacagtcaatgaggaggtacatttatctagtaactcagtttacttggttctgtcagataaattcattgccatcttggcggaacctctaaaaatgtgaaaaggtaatttttttcaaaaagataaaatcattacttttatataatgatttaaaagcagacacaaagtctgctttaggcccagacaactctccagggcagctgtcctccatttagtggtttatccaatcaaagcagatttgatccatggcaccatgtctcaacatatgcttcagtgatctcagtggtagggtaagagaggataaaagagcttcacattagcaattaaatgctttgacttaggttacacactcacttcctttttttcacaacccattggtcagaactagtcacatggccttgcaaagggaactgggaaatgtagtcttccatgtgtgttcagaaagagaagcagcactggaaatatcagtgagtgccaacaattgtacttaaaattatacaattgtaacaaacattaatcttacaaaagattaaatactgtacctacccagggaagaatatgcagtccccaacattcagctgtataattgtgaagaaaataataacttactagattttattttagactgcacacaatctagtagctcggtatatttaaaagcccacatcagatatattactatgggaatacagttacaataagtgatttttgagagaaggaaggcaaaaaatatggattctcttatagagtccttcaaattgaaatcacaactgatttgaaataacaaaatacttgtacatatatttttttaaaactgaagggatggaaatcacagtggtaatagcggtttgtttggtcttctaagtggtgagattacagatagtttttgctttcttttctgctcatttgtggttttctacaataaggatgattgtcttagaagatactgaaaatgctagtaaacagaattaagcaaacagcagctagtgttgatgctagtggtacaggattagggtttttgttgtttttgtagaaacgtatttactcagttgaaaccttaccacctaatttttaagtgaaaacaaaacttctattaaatcaaattctttattaatttgttgtggaaagtcagggtcagagttctgtgtctctagagatggaaaaggaatttctggagccatggtttcaacccagcattttctttatattcattcaaggtgctttggattccgttcagagggctttgtatggtttaagtgaaagatgttaaacgcagctggtgaatactgatagaccttctttgacctgttagtactgtgctggcctgagcttccagacccatacttaactagaagtaaagaaattatcacacctccaggctcatagaaaggctcatatcacacccccaggctcataggctttactgtattaaattgtcttcatgtctgattcctttctgcatgttaacctcagagaaatattagtagatatactttatacatgccacactatattttgtaatcatttaaattcctcctatgtgtgttccccacaactgcttttacaaataaaggaataaggttcagatctgataacttgcctaaatcccaaagtgactttttcaagtcagaaacagtcttaataagatattcagttctgtcacgtagtgtcttgggtgttcagtaaatagtgtgtgtgatgatacaggggctgagcctgggcttatgattgtgatgttttaatctcttgcttagatttcagagtgtttttctctctgtccatagtgaatacgattttagagtgtcgtgctcagttttctttttctagttgttctctcactcatgttctattttcattttaaatgattttgccaacctaaaatgaaaaataagagaagaaacattacaaaagcatggaaatctgttctggcagtcttctgggcctttattgaaacataggtagattgctttttctttgtatttattgaaccaagctacctaaacagtgttattttatttagaatgtttttaatcttctttaagcgattctttcaaccttatctgatttaaatgagaagacaaatgtgaatgttgaattaataccctgtagctttaaatccaaccagtgtggtgcttttgtcttttataaaagatgctcacagctggagaagagaggcagatactgtctgtgatctccattctcagagtcaaactattcatttgcattagctgctctagcaaactgcgtgcgcgcgcacacacacggatgcttgtttggcagaagctttctgtttattcagcacagagttctcctaggctcccagatatagaaagctctaagagttgctacaggagatagaattgaaactatacataggctgaggtgggcactgcggaggattggctatgcgagggtattaatgtggtgcggctgtacctgcctgttttgtgaaagtcacttctctgagactgtgaaggtgagaagcccagggatccactagaagcttcactgcggctctttggtgggggaaagcattcccagtggtagctgtcctcatttgcagcgttattctcggaaaccaagtatgtgcagcagtgacagactatgccacagctcctctgcagtttggaagctggaacaaatggaaagagcttatagccaagagaggttgtgatttttttttttttaccatccaagctttctctggcagtgcacaaatgaaggatgagctttgtggcaagcaaaatcagcagactgcctgacagggggttttggtaagataaatgtgttgtgatttttttcttattttttgacttttctatatcagctgtatggaattgcttcttagcaataactaaaacattttgcaaaatcatgtttgatggaaaaggatgaccaagggaaccagaaggagaaacataacttgtggtcattcagttgtgaccttcagagataatccaagttttctcatgtgtctctcaacagacagaagccagaaatttccagagcaaagaatgcagactaacaaacctcttttcttttctttgaatagtcataattatgcttttttttccctgctttttctatagtctgaagcgggagaaggaaaaataaagccttcctcctgttatagagttgttgccactggaacagtaataggctgagaacataagtatggaggtggaggaaggcaggataaggagtctgctattttcatagctgtgcgttggtgggtatttgtcttgggttcattgtcattgctgtttgatatcaagtggttgtgaatgctgtatctctttgcct

SEQ ID NO: 9756 - DNA, 6000 bp, Homo sapiens
attttcttatagctcaatttgtgtattcttgttacattttaaagacactggtgaagacatttgaagtatgtgatcttcctgttcgagctgcaaagtttgttgcaaggaagaattgggttgtgacaggagcggtaagtaattaatatgaatctctattcccattttctgaattggtcaatgattgtgtaaatttgttgcaggattttgattcccgatttgttttgttatttacagcaatgttttgaggcatagactttattccttgagcctgtgatatagtttttttgtataatttacttgataacagggatgatggttttaaaatttctgtttctaggatgacatgcagattagagtgttcaattacaatactctggagagagttcatatgtttgaagcacactcagactacattcgctgtattgctgttcatccaacccagcctttcattctaactagcagtggtaagagatgaccttttttggtcatgtgcgtctctttgggtaattcattttcattcactgagacatgctatgctttaactgctgttacaaatataattctaattccaagcggcctttaaactatttagatccattactgtgctattgatgctgcttgtgtttgtactataatgaaatatcaactgtacttaggatttgtgtaatgattgctccagttcctgtcagagaagacctacaagtctagatgtttaaacatctgctgaacagaaaggtcatttacatgttgatgagtgagtttttggcagattgccatagaccctattcagttcaatctttatattcaaactagtttgctccttggtattgtgtataaatagtagacctcttggaggactggaaaaagaggtagcactgaattagtaatagctctttgaaatgtttttaaattaaaaattgagaagtaattaaaaactttttaaaaaccaatcttgtgagggcaaatgcttgttctctacatagtcattgctatcactattcagtcatgcttagatctagtcaaacttatattactctttggccattctttaatgcccactgaatttttaagttttttcacagaatttttatattttctatttctaatctattttatttattttatctccacttttctgtagagagttaaatttatttttaagataaataagcattttgaaaactctatttggttttgattctatttctgtaagtcatggattatatggtttgtgttaggtttgcttcttctaaagactgtgtcttagttatgaagtgaaaaaatagaattacaactaacttgagactttcttttggcctagatgacatgcttattaagctctgggactgggataaaaaatggtcttgctcacaagtgtttgaaggacacacccattatgttatgcagattgtgatcaaccccaaagataacaatcagtttgccagtgcctctttggacaggactatcaaggtagggcatccacattttgtgtcagttatcattattagtgaactatacttgccttaggtgttttactgttgactggtcagaaatgtacccatcttaaaaattttcctcaaaagcctgttttgaagtcaaaataggatttctcattttaatccaaacgacatgttctgtttagaaaaatattgtggcaactcagtgctcttaatgaggagcgtttttctgtgtggaggcagcatgttataaaaattttttagcctttggaaacccagaataagaaaaatgccaatatctttttaggatactactgtcctctccttttagtattcattgttgacttctgctcatcgtttatctattttacatttaaattccatatgcctctattctctctttcttactccattttaccacactgctgtctgttatctttctgaaacagttcctgatctaaggataaagtccaaatgccttagtgtggaatacaaggatttccaggactagcctgggctaatattatgcgacatctcctaaaaccctggtctactcaccatcctctagagaggctatgaatgttcacaaaaccttacttcattgaactgttccatcttcctgcacttctctttattttcctattttgatatattttcctccggagaattactcagcttttaaggtttagcacaaatatttactcttgagaacctcttgtcagacatcaacttcacctctagacagagccagttatgcttatcccatttcttccattgctttttgcctctgtttcagcctttctcagattgaattattattacacgtttttggaaatctttatcccctgaaatactggatttgggggatagaaactgtgtcactccctttccccagccattcaatagcaaacagcaaagtgccttacctgacctagatgcttaatacatgttgcagtgagggcaatcatgcttcttttttttatcataatatttaaaatatttccatgccaggcacggtggctcacgcctgtaatcccagcactttgggagaccgaggcaggtggatcacaaggtcaggagatcgagaccatcctggctaacacggtgaaaccccgtctctactaaaaatacaaaaaattagctgggtgtggtggcaggcgcctgtagccccatctactcgggaggctgaggcaggagaatggcatgaacctgggaggcagagcttgcagtgagccgagattgcgccactgcgctccaacttgggggacagagcgagactccatctcaaataaataaataaattaattaattaattaaaatatttccatatgcattgacttaaaataaattaacttttgcttacatgtttgctttcacctatataaaacactgttagtagttttcctttatgtaaaatgttatgtgtctgaatatcttagggttttaaccttagctattttgcctttgattggattatccttgcttttgacatagattaactttgaaattagttgtaaacttttatttttactaatttaggtttatcttgagaacaataattgtcttatcttcagttccaataaagtttattttatacagtaattgataaacatttgttacacgtttatactccccacagggcctcccatataataggcactcaataaatatttgtaaagataaagcttaattctgtgctgtggtaatttttaacaattttctacactttaaattggtaattaggcagtaattttctccttttaataggcctttatttttatttatttatttatgtatttttgagttacggtctgtgttgcctaggctggagtgcagtggcatgatcacagctcactgtaacctcaaacttctgggctaaagcgatcctcctgcctcagcctcctgagttgttaggactacatgcgtgtgccttcatgcccagctaattttttactttttacttttttgtagagacaaggtcttgctgtgttgtccaggttggtcttgagctcttgggctcaagtgataacttccatctcggcctcctaaagtgctgggattacaggtgtgagccaccacacccagcaacttttaatatatcttactaaatctactttcatgagctgtatattaaatctataataaaataatttcataacatctagattcctgggcgtcactgtggattgactgacttataatctctagagataaagcctggaaattggcacttcttttaaagaacgccatagtgattttgctccctgaaaattcaagtaaaatgagaaagaacaaaaaccaaacaggataaaaaataaaatttgatagctcttctctcctgggctttggcattttacataatgtgtcagaaatatggtggatttgccttttgtaaagcaaggccccatattgactggccgatgctgtttctctctgcaggtgtggcagttgggctcttcgtcaccaaacttcactttggaaggacatgagaaaggcgtgaattgcattgattactacagtggtggggacaagccatacctcatttcaggtgcagatgaccgtcttgttaaaatatgggattatcaggtacagtttttcataaccttacttccatatgttagatatgtttcttactatttcttataggacagttaagacttgggttgttgaaaactgttcacagcataataacttaaggtatcagtatttgcacctaaactgtgttcccagaattctccataaaaatgaaaacaatgcatatcaagattttaaaaataaaataccaacatgttcatatttcatttcataattgcatttagaaattttaacattttaatgttgaattatcctccataatcttcattgatagacttctattcatttttgtaagctagcagatcaacaattaccaaccattttgccaaatcgtactcttgtaaacctagttatgaattcttgttaacatgcttcctatctctaagattttcttatattttgatatttttgttttccacatcaaaagttcccataagcaattaataaaatgaggtctagaaagtcagtttttccttgaaacattttcagatttgtacttaaatccagaataaaaatattaaaggctaaagcagcactgtctacttagccagtgatggtaggtgtgagttttaagggggaaatctattatcctgagaatttgggggaataatattcagacaaaagccttcttgggtttttttccccttctttaaatgtgatagttacatttacatttattttacaaagtaattagataaaatattcatatatacaacaagatcatcctatttcaaaaatttctatattggatattatttagattttcatgactactatcatttataatgtatctgtacactgagaaaattaagggcgggctggttacatgtttttcattaataaaacatgttttctatgtcttaattacagaataaaacatgtgtgcagacactggaaggacatgcccaaaatgtgtcttgtgccagctttcatcctgagttgccaatcattatcacaggttcagaagatggtaagttagaagggtatgtttattcctgtgctagtaactactcagtgggcatttaaagcaagtaatgtctctgcattataattgtaggtttccaaggattttgatatttttattaaagtaccagacttaagctataaaagagtaaaggggcattattttcatcatcatcatcatcatcatcatcatcatcgtcatcattctcatgtattttgattctgtcacttaaataagaggaccgtcagctgtcctaaagagaaactgaaaaagcatgtgctttggagtcaaacaaacctgggttcaaaatcaggctctgttatgtcatgaatgtgtgtttgggcaaattatgaaatggaaacatatatatctgcttcataaaattatagtgagaagaaattgtgggtagaaagcatctggcacataggaaacactttacccaggaaatcctgttattatttcatgtttaaaatcgtaattcttagtttttgtttcttatatgttatgtgttatgtttatgttgcttttaaaaatcatttaaagacagtaggtcaaaaaattggtcattaagctgccaggaagtgttatctgtttgaatagaaagacttctatgggtctctttcacctgacacagtttattgtcggatgtttgtatcaaaagggagtatttacattgttctttttaggaacagtacgtatttggcattcaagcacctaccggcttgagagcacactgaattatggaatggagagggtatggtgcgtggccagtctaagagggtcaaacaatgtcgctttgggctatgatgaagggagcatcattgttaaggtaattatactatccctctcagtaggtggacataggcaaaaccattttctttgtattttagtactgtcatcttccaagtaaccagttttataaaactggcacttctttcattaagcactagacattaagcaatgaagatttaaagtggaagaaag

SEQ ID NO: 9757 - DNA, 6000 bp, Homo sapiens
ttagtgcatcataaaaccttcacagagcatgtgcatggaaaaggatgacatctatttaagcagaagtaatattttattcttccccttcattagtcttgtgaaaccactctagagaccccaggaagaaaataggtgaatttgctgagggaggggagtgtagcattgtcactcccttcataaagccttagaaaaccaaaaaaaaaaaaccccccacccccaaaacaaaaagcatcctcaagtttcccttagcttttcttcaaaacagatgcctgtcagctgggcgcagtggctcacacctgtaatcccagcactttgggaggccaaggtgggcggatcacttgaggtcaggagttcaagaccatcctggccaacatggtaaaaccccgtctctactaaacataaaaaaattagccgggcatggtggcatgcagctgtaattacacttactagggaggctgaggtaggagaattgcttgaacccagggggtggaggttgcagtgagccgagatcataccactgcactccagcctgagtgacagggcaagactccacctctaaaaacaaaaaacaaaaaaacagagagacatgtctgtcacccagtcagtagcaggcaggaacagtgccagataactcagtctcccactgctctctcccagccctctacctggctttctgattgcacttgtcactagaggttgctacagttacacctgataccattagattttccacaattaggaagcttagactatatgacttggtagtgactatatttgacctgtcagatcatggctgttttccatttagggaaaagggaagcactttgtttaaactatatatatatatatatatatatatatatatatttttttttttttttttgagacagagtcttgctctgttgcccaggctgaagtgcactggcacaatcacagctcactgcagcccctgcctccaacgttcaagtgattctcctgccttagcctcccaaatagctgggactacaggtatgcaccaccatgcctggctaatttttgtatttttagtggagacagggtttcgccatgttggccaggctggtcccgtactgctgacctcaagtgatccacctgccttggcctcccaaaatgctgggattacaggcgtgagccatcgtgcccagcctaaactatatattctgagaagagggactgaaccctacagagttctctcttaatacagagtcttgggtacaattaagcactaggtccatagtgctgtgcttttctttcttcctttccttccttcccttccttctttccttcttttttctttcctttctctctctctccttccttccttctctctctccttctttccttttctttctctcctttctttcctttcttcttttctttttatttctttctttagttggttgttttctggctaaaaattagacaagaaaaaattatttcctctaaaaataggtatattattagccaataacacagcatatttttctgctggttttacagatagctaactgcccttactaaacaacatcaaatttgcagtggcatttttacatatacttaatattattcctgtagaaagaaacaaaaacgtgtagttggtctacaagaacattaccaaagcaaaccagactgaaaagagcattcatcccttttgctacagtttcaacacatgacacatgactgcattttgcagccaggacccctcaacacctggatgtacagagcctccactgaactaccaacaccacatttgtggtcttgatttaactttaattgatagaactagctggcatttgcctctaaatgccagcagtggctttccagtgtaacttggtgattcttgtctgtcaaaaactttgcagtcagtcctggttaccttagagatgccttatgtcccaatgcaccttcagggaatggcaccctgctcattgcttctgtttagccaagtccagaggatgtgagcatggttcccactgacaagagacagtttgctggagttaaaacaaactacaaaactcagcctgtgcaggatttgggggccacatttttatatctcaatttaaaaagtaagagaaattaattctatagattggtagcaattaaggaaaagccatattgctgttttactttataagttaggtcagttttgctgtttccttagttcctttttactgagctttgtcaaggtatagcaaggacagctgactgggctctgcaccagtgaactttcatgaacaccactcactccatggcatcaactggttttgtgcctcaagcagggtaggggatgtgtgagaaaggacaaaggcagatatcacaaagactttttcaaagacttaacatgaaacattttttttttactttataaaatactgattttttaaaagaacatattttattagagtcaatctcaccattctttgtcataaagatattttatctaactcaagtttttgcatacccatttacagtcaattccattgttttgcttgaagtgaactttctattatatttttctagattatgtaagcgagctgattatgcaactaagagtgtggtaaatataagaattattataggatcaccatttttacacgtgacagctctggttgtttgtggagtaacaaagggaatatgaaaaaaaaaaaagttcgggcctgccctggattcaagtttatcattcctacacttgattaaaacacctaaatttaatccattttacaaatagccatgggtcctcagtccagatataaaaggaaattagatttcaatttaaaacaagctacaaacagtggaaaaccagaaaacactaaaataagacactggctaaataactacaacaaaatctcacttcttaaaaatccacgcctaaaaaaaaaaatccactagacaggaatgtgtggcagtgcagaaaggcagaagactgaagcgcacgtttgatctaattgtgtaagagcttgctaaatcagttactacttgaaagtatacttcagagagaagactgaaacttctagactgtttctagcatccttaagtaactgcagacacttataatactgaatgatatcctagttataaataattcttatccataacttaaatccatcttgaggctctactaagtaaatcttccttaacctacttagaggatgtgcagtagcgatgaaagtagcctttcttttctttttctttttttttttttttttgagacggagtctcgctctgtcgccaggctggagtacagtggcgcgatctcggctcactgtaacctcctccgcctcctgggttccagcgattctcctgcctcagcctcccgagtagctgggactacaggcgtgcgccaccactcccacataattttttgtatttttagtagagacggggtttcaccgtgttggccaggatggtctcaaatctcttgacctcgtgatctgtgtgctgggagtacaggcgtgagccaccgcgcccggccttaagcccctttctttaaggctcaagggcatattttcacactgcagtgcatcacaaccgttttcattcttccagtgttcctttcttctggtctccagccacctgccaggtacttctgattaattacatataagatttatccaagccaccccctccgtttctaccaactggacttcattctcttcagttcctgctagaatgcacctcctacctgaagtcttccctcatcaatgccctccatgatcagcctttgactctggaatcccttaatatattcctcagatcattagaggttttctgagtcatcatctgagatttttcattaaattgtggagtttgagcagccagtcctgagctgtcggactcagttccaaatagaagtcctagttaaagacacaaaaacaagaagatgggttagctgcggctcgaagagctggtgagcgcgaccacagggcagcttgcggacggttctttcggacaggacaagggcgagggaaacggcagaatggtgacgcacctgagtgcgcccactagacgaaagaagaccaactaagccttcgtgtagtgcgtagacaggccgacacacacacacacacacacacacacacactaacacacacgcaaagacagtgagggagcgagaggcgcatccccaggtagctgacaatgacacggccccgatccggacgcgggcttaaagccccccgacttccggagtgcccccctccccggcgacctccggagattaccgctggcgcatctctccgccctgcccggctccggcgccctcccctccccccgcagccgcagctccccgccccccgcgaacgcggctccccagtgtcctccagaacgcccgcgtggctgtcgggtttcgaaccccagggccgactctagtactcggcgcgcgcgccgccgcgtcgccgaccagcctgcggcccccgcatcaatcattaacggggcggcccgggctgcggcggcccgaggagggggatggtacggaactcgagacaggggacaactctatcccccgaagcggccgcgaaaccctagcctgggaggcccccgcccttcctcggtgcgcccgtccctccctccgcgcctcggctcgcacatccccacctcccgctccgggggcggcggcggcggaggcacccgcaccgcgcgatgcccagtcaccgctgccgcgctgccgccgcagtcagccgcgccgccgccgctgccgcagcgcgggcggccgcgcgccggtagcaggggcttggcgaggaagccgctgagcctcgcgcgctccgcgctcctggcggtcgcagcgctgcctattaattgattctcttattgatttatttaatttttaggagcggctgctcggaggcacgggtcttctcctaaacctgcagcgacgcccccggcgtgggcacaaaggctccgacggcggccggcgggggctgcccagcgcccgggagccggcgccagaggtcgcctgcgcgcgccctagccgagccccgggcaccatgccgcggcgcctgcagccccggggcgcgggcacaaaaggccctccggccccggccccggcagcttcgggggccgcccggaactcccactctgccgcctcccgggaccccccagcgtctgccaagccgctgctgcgctgggacgaggtgcccgacgacttcgtggagtgcttcatcctgtcgggctaccggcgtctgccgtgcacggcccaggagtgcctagcctcggtgctgaagcctaccaacgagacgctcaacttctggacgcacttcatcccgctgctgctgttcctgagcaagttctgccgtctgttcttcctgagcggcggcgacgtgcccttccaccacccgtggctgctaccgttgtggtgctacgcgtcgggagtgctgctgaccttcgccatgagctgcacggcgcacgtgttcagctgcctgtcgctgcgtctgcgcgccgccttcttctacctggactacgcgtccatcagctactacggcttcggcagcacggtggcctactactactacctgttgccaggcctcagcttgctggatgccagagtcatgactccatacttgcagcagcgcctgggctggcacgtggactgcacgcgccttatcgccgcctaccgcgccctggtgctgcctgtggccttcgtgctggcggtggcttgcactgtggcctgctgcaagagccgtaccgactggtgtacctacccgttcgcgctgcgcaccttcgtcttcgtcatgccgctcagcatggcctgccccattatgctcgagagctggctcttcgacctgcgtggggagaaccccacactcttcgtgcacttctaccgccgctacttctggctggtggtggccgccttcttcaacgtgagcaagatccccgagcgcatccagccgggtcttttcgacattatcggccacagccaccagctcttccacatcttcaccttcctcagcatctacgaccaggtgtactacgtagaagagggcctgc

SEQ ID NO: 9758 - DNA, 6000 bp, Homo sapiens
ggatttttttttttactttaacttgaagaaaaatcagtattgatgcacaggaaaaatgctataggtaaaagttcttaaatcttatggatgattattcaatttcttgccacattttagaatcagaaagctaattaatattagagggaataatgagataatatagaaatctgatccatatatactatataaacatgaaatttattaaaattttgaagatacctttgtttcctccacataaaaaatgtttgagttacatataaacagatatgcaaaaccagtgacataaattatggtataaatattcagcccctaaaatctagcctcaaaagatgtatttaaggcaaatatcttttaaaacatcttttgattggaattattttgagtctgtgtctcacttcctccctgctggctctctgtatttgcactttgtaaagagaaaattaataatttctagaaatattctaaatttcagaagatatctttttggatatttatattactccatgtattaataatattttagtaaatatccatatttgaataaagaacttgtcccaataaaataattctttagcttttgttgaaaaaagttgagatatctttgtgtgtggattttatgccagagattggtcaaaaagaatcaaattcatggattagaataaagagaaaccattttttaatatagagccctaacccttaattttagtaactgaaagaagtgcaagtgctagtaaactcatgattattccttgataaatattaataactgaagtgaaggcagaaattttaaaaactcatttaaaaaatcaaatttagagtaatttactatagacatataagacagaccctagttaattagttcactaattcatttttacaaatacttgttggtagaattttgctccttgtcttttacctttaagcacacctttatttacctactctgtgtatatattaaaatactgatggtccccaacttacggtggctttacttaggaattttcagctttatgttggatttatcggggtactgtgtgtttttaacctcccacgggtttattgggacataaccccatcgtgagtcaaggagcatctgtaaaatgtgtaaatctattcactgtaagattacttaagttttaaaatcctgaggtacaatatttcataaataaaaattttgtatttcatagaatgacataagcatattcagaaccaggcaaagattaggctatatactgtgatttctgaaaattactattttgtccactatacataatcatttataagttgaataatttctaaaatgcatatgctttatacttttcagtgaagtatttataaagatatttgttttaatatgtacttctttttataggactggaaggaaaagtatataaaccgtgattattcaaagattttcactgaaaatatagttgaacaggtttgtattaatgattacaaagtatagaaaattttgctgttattttccagaagaaatattattaatactactttcacagaagatgtgaaagtggagaaactaccttttaggtaaaatttatttgattcaattactgattaaatagcattaaggaacatacagttgtaaaatgtagaacatagaaattaacattttaaaagcatgcctttttaaaaagcatgctcctatgtgtcatagctttctgaaaccactaaaaatagaaactgttgacagatctctgatgtagaactcttgcagtgaaagcttatctttggaagaaactgggctgtctttctggaagagtcttttctcagagacatctttgaaacatgaattctcttttagcttagtgttcaaaactattgttaatacctaatttttgagaatgtaagatgtcatcaattctgaggtgcaccattatttatgtaccatgagaaaaaaaatactgtcaataaaccatgacagaaaactatgtttcctagtcatacaggattttttattttacacatattaaaataactattttagactattaagacacagaagttattatgtcttctaacgatgatgcatattttatagccctgtccagatgtcttttggttccccatattttctgaaaaagcctgtgatgaattggtagaagaaatggaacattacggcaaatggtctgggggaaaacatcatgtaagttgtaatttcacactaagaactaaaatgtatgtgggggttaagtagatactcagagaattcggaggggttatatactttttctcatatgtctctgagttctagacttagataaattggctagccaaggctctgatttcagtctacttctcccaccaaccaatttttttaacacttaagtaatttcattagtttgggcgggtttctcatttatgcatgtaattacactggatgttccctaagggtcgatgtcctcaggccagagtttgttaggtaacacatgtctttacagagtgatgtcactcttttccaaggccactttttattccttgcgttttcacagtgagctgtggtgaaaattctaaggcaaatgttatctggctctgaaaactgtttttgtgtgtaaagataggaaggagggatctgagtgccttaggtgtaattcagttttgcatttgcattcagtgtcaaagacttggcaggaaatactactgccagtggttagatgtgtttctttccctctgagaacagacatgccattttagcagaatactctggaatattactgcctctgcacggttatgtcccccaggtaatgagctgataagggagagggaagcttaaagtataaggaagaacttaagttagtgggtgatgaaataatgaaaagcaatcattcaaaaacttttgagtgttacaaatagaagtgaggaagggcggggaaagcttgtttttagtgtttggtaatacagacagcagatatgctaagtgtatgctcatcaagcagctgagactgcctaaagggtcactgtaaaaaaagactcatttttaagaaaggatgtgagggcttaggaagtcaattttatttactttatagctaaacttcacatatacatttaagaagtaggaaaggagtctactgaccttacattactttgtttcgtcattgtatcattgacaaagctgttacctaagttattttgataattttacagttaaagcagatgatataccacattggaacaactgttatttttattgtctattatgatctgtggttgaaaaaaaatactataatataaatgggaattgcacgtggagtacagcttattatgtcattaatgttgtttctaggatagccgtatatctggtggttatgaaaatgtcccaactgatgatatccacatgaagcaagttgatctggagaatgtatggcttcattttatccgggagttcattgcaccagttacactgaaggtctttgcaggctattatacgaaggtagttatcctctcacccctccagcctatttcttacccatttttacacaggtgttctttttaatgtttttattaataagcaaatccactggcttactttgctttttcagggatttgcactactgaattttgtagtaaaatactcccctgaacgacagcgttctcttcgtcctcatcatgatgcttctacatttaccataaacattgcacttaataacgtgggagaagactttcaggtaattatgactcttgtgtttttagatttttcaaaagaaatatatcattatgaaaaggactttgccttaggccttagtttcttttttaaattttgctcaaatgacataatttgaattttgccactggttaaatataatctgatgtatttcttcattttaacttttttagggaggtggttgcaaatttctaaggtacaattgctctattgagtcaccacgaaaaggctggagcttcatgcatcctgggagactcacacatttgcatgaaggacttcctgttaaaaatggaacaagatacattgcagtgtcatttatagatccctaagttatttacttttcattgaattgaaatttattttggatgaatgactggcatgaacacgtctttgaagttgtggctgagaagatgagaggaatatttaaataacatcaacagaacaacttcactttgggccaaacatttgaaaaactttttataaaaaattgtttgatatttcttaatgtctgctctgagccttaaaacacagattgaagaagaaaagaaagaaaaaacttaaatatttatttctatgctttgttgcctctgagaataatgacaatttatgaatttgtgtttcaaattgataaaatatttaggtacaaataacaagactaataatattttcttatttaaaaaaagcatgggaagatttttatttatcaaaatatagaggaaatgtagacaaaatggatataaatgaaaattaccatgttgtaaaaccttgaaaatcagattctaactggatttgtatgcaactaagtatttttctgaacacctatgcaggtcttatttacagtagttactaagggaacacacaaagaattacacaacgttttcctcaagaaaatggtacaaaacacaaccgaggagcgtatacagttgaaaacatttttgttttgattggaaggcagattattttatattagtattaaaaatcaaaccctatgtttctttcagatgaatcttccaaagtggattatattaagcaggtattagatttaggaaaacctttccatttcttaaagtattatcaagtgtcaagatcagcaagtgtccttaagtcaaacaggttttttttgttgttgtttttgctttgtttccttttttagaaagttctagaaaataggaaaacgaaaaatttcattgagatgagtagtgcatttaattattttttaaaaaactttttaagtacttgaattttatatcaggaaaacaaagttgttgagccttgcttcttccgttttgccctttgtctcgctccttattctttttttggggggagggttatttgcttttttatcttcctggcataatttccattttattcttctgagtgtctatgttaacttccctctatcccgcttataaaaaaattctccaacaaaaatacttgttgacttgatgttttatcacttctctaagtaaggttgaaatatccttattgtagctactgtttttaatgtaaaggttaaacttgaaaagaaattcttaatcacggtgccaaaattcattttctaacaccatgtgttagaaaattataaaaaataaaataattttagaaagttttgttgttctattattggtgtttatcttccaacgtgaatacatgatggaattgtctgaaagaatgaagcctttgatttttcattttgcttagtagatttaatgatatacgaaactattgaattataaatgaaattataaaatcttcaattttaggatgactagggatttgatctaactcgttttccaagtgagaaaatagaagccaaatgttattcaatataggtttatttgtttattaatattttctgggtctctattatgggtcaggcactgttccaggcaccaaggatatgttgatgaagaagacattatagtcactgtgagatggacttaaaaagataaggaagttggttctactcctgttctcttctttggcgacacttaatacccaaagaaaatttctactatccatcaactaggataaggagacattttagtaatgatttgtgaattatgttactgtacatcaggaatggttttcaaaatatgtaacacctggtatgatgtagatgccaactcatcggaacagactctggttataaaagcagatcggttcgttcctaccagtgcaagccagcttaatatctcttgtggtacagttcaaagacatctcccaggtactagttattttccattttggtatccatgggtggttacttagcataactatttcagtctcatgccatgttttcagaaatgggatccaggtag

SEQ ID NO: 9759 - DNA, 6000 bp, Homo sapiens
cctgtatgcatatcatgcccccaaaataccaaggcctctgcaattaacagctctccagactttgtaatactaacctgttatggagacacagctcagttttccagtctggtttctgacagatatgaagccaaaaatcaattttttcaagatacggcactttttgctgttgctaagtgatagggaaatctgaagcagttcactgaatattaaaggaggattaagttaacaacattcatgcttctactaactggaaattatcctgccttgcacaatattttggctaaaactatattgtaaaattttataagaaagggaatagaatatagggtggtgagaaaaaaatactagcagctcaaaggagatggaaggtaaacagacttcgagtatctgaaacttgtgaggcaatatgtagctagttttcttttctttaaactcattgagattagttgctttgtaatactttaaatatttctaaaattttatttattttttcaagttatcattcaattacttgaattagatttgaatgcttaataatgcctggcatggttgagaactgttacttttctttacattgaattagtctcagacatgcctgatcataaggatcacctggaactgtgttaaaagtagagatttccaggcctggaccccagaggtgctacttcaggtttggagtccagaattctatattttttccaagttttattttgaaattaaatatttaaaaattaatattcaaatgtatttctgcactgagattcagcagttgttaaaagtttgccactatagatagctagatagatgataggcggacagacacatagatataataatttggcctcttttcactaagacattaaataatctgttgtaattagtttccactctggctccttgatagtttgcaatcccaagaacttaacatataatcaaacaacagaccattagttagaagaaggtcacactcaacatataactgtcaaatggttcttgtttattgtgaaataatgcaatgcatataaatatgcatatttaaacatgtacataccttttaaaaactaatgacaagacattagccttgttcttatcaccctaatagaattttaatgttggcaggaacttagggttccttgtgggccacagctaaacagccacccctcatcacttctttacacataacccttttctgaaattttgtgtttttaattccctagcatttctttaaagctttcctctatatatttatcagatgaagtattttgtttagaattcctgctactgaacattcttacgtggaatcatactgcgaggtgacagtgtgctggcagtcctcagagccctcgctctcggcacctcctctgcctgggctcccacttcggcggcatttgaggagcccttcagcccaccactgcactgtgggagcccctttctgggctggccaaggctggagcccactccctcagcttgcagggaggtgtggagggagaggcgccagcggcaaccgcgtgcggcgcttgcgggccagctggagttccgggtgggcgtcggcttggcgggccccacactcggagcagtcggccagccctgctggccccgggcaatgagggacttagctcctgggccagtggctgcggagggtgtagtgagtcctccagcagtgccagcccaccggtgctgtgctcgatttctcaccaagccttagctgccttcctgcggggcggggctcgggacctgctgcctgccatgcctgagcctcccaccccctccatgggctcctgtgcggcccgagcctccccgacgagcaccaccccctgctccaccgcacccagtcccatcgaccacccaagggctgaggagtgcaagcgcatggcacgggactggcaggcagctccacctgcagccctgctgcgggatccactaggtgaagccagctgtgctcctgagtctggtggggaagtggagagtctttatgtctagctcagggattataaatacaccaatcagcaccctgtgtttagctgaaggtttgtgagtgcaccaatggacactctgtaactagctgctctggtggggccttggagaacctttatgtctagctcagggattgtaaatacaccaatcagcaccctgtgtttagctcaaggtttgtgagtgcaccaatggacactctgtatctagctgctttggtggggccttggagaacctttatgtctatctcagggattgtaaatacaccaattggcactctgtatttagctcaaggtttgtaaatacaccaatcagcaccctgtgtttagctcaaggtttgtgagtgcaccaatcgacactctgtatctagctgctctggtggggccttggagaacctttgtgtccatactctgtatctaactaatctgatggggacgtggagaacctttgtgtccatactctgtatctaactaatctgatggggacgtggagaacctttgtatctagcgcagggattgtaaatgcaccaatcagtaccctgtcaaaacaggccactcggctctaccaatcagcagggtgtgggtggggccagataagagaataaaagcaggctgcccgagccagcattggcaacccgctcgggtccccttccacactgtggaagctttttttcttttgctgtttgcaataaatcttgctgctgctcactgtttgggtccacactgcttttatgagctgtaacactcaccgcgaaggtctgcagcttcactcctgagccagcgagaccacgaacccaccagaaggaagaaactccgaatacatcggaacataagaaggaacaaactccagatgcgccaccttaagagctgtaacactcaccgcgagggtccgcggcttcgttcttgaagtcagtgagaccaagaacccaccaattctggacacaatactacatgtattctccagtgatttgctttttctgttgtgctataattttgagatacatctctgtccacgtgcacagctataatttgttttcactacaggatattattgtatcatgtgaatgtaccagaatttatttattcagtctaccattgatggacattaggcaagttttcattcttttaaatatgaatagtgttatcaagaacattcttgtctatatcctgtgtgcatgtgcaagagtcacttccaggtacataactaggagtgtctaaatttctagaaagctgtagtcattttccttaacaacagggattaccatcattaaggaatatgactaaccccttgaactccttttactggcccagaattgggtctgactttttggtatgccccagaataaataaataaataaataaatatttattatttataattattatatatttgtattattttatatttaaatattaatatatttaaaatataaatgtaaaaatatataatatatattaaatatatatttaaaacatttttacataatatatattatataaaagtaaatatatatgttttaaaatatatttatatgtattttttaagcttggagacacatagggcaccgtacaacaaactccagctccagaggtgagtggagatggtccaagactggttaaactttcacccgtcttggcaagacaatcatttcagctgggaatctgcatactggctcgtaccatggcagttttcattgagtcagctcagtgtccatattgatgactcactaatacgttgtttgaatgcttttttgacctactctaacttgatacttttttactccacttggacaacgcaaatgactgtattcttatgaacatgatcacatattgaaaagtacataggcttaggatttagaagcacttgcctttagcagggttggccatttacacattagagagttgttataatcagagatatgtgaaaagaattgggccctttgcctaacacttgataagcattcagtaaattatagcctttgttgatactctttttgttatttgtcattactcagaactcagaaattcagatatattgaaattcccttctcaaataatagccttttttttgcctgactgaattcagaaaaatttaccttcaccctcattccttgtttcaaatctcgtctcaacttctagtcttcttctttgagttattctcataatgttcccatacatatttttaatttaaatgtttaacttcttttagtctcttcttaaacatgccccagtctaaactttcaattcttaccctcctccatccccactattcccccactatcctcctctctagttttgttaataggatcaccgtcaactcagttaccttgggctatgactcagaaccctcttccactcctctctttaccttagtccatcagcgactcctggaggccctgcttccaaaccgtatcatgcctctgaacactcctaacctgcagtgtcacctcccccatctaagctggtgtcagctctcacctggattgctgctgccatccctcactgctccctgcttctactcttgctctcattgtatgatgtcggtcagatctgatcactccaccgactgaatcctccagacttcccagttgcaaataccaaaaatgccaaaccccttgccatggccttcagatgagatcagacctttatctgcatgtcttacctcagttcgcttcactcactgtggcccagtcactcctaaaccactttctcttttcctcccttcagtatcccatgctcactgccatctctgaccctttgcactaatttcctatcttcctggaactctcttcccacaattgtagtgtgatgtttatttttcatagttgaaacagctcaaaggtcacttcctgagacaggctttccctgactctcctagaacttaccatccgtgtttctcttaagcttgttacattgttttcctcataactgtactatctaacgttaaactttaacatttcttgactttttttaaatctcattctactacaatataaactgcagcacagtaggtggcagagtgtctgtctgcttcattgctgtactctcaacatctgtattagtgcctcgtacataataggtgctcaataagtatttttttaattaatgaagggacaaatgtaaggtaactggaggttaaaaaaattacagaaatccttacctgtgttactgagtagcaatactatttattatgtatgtattttaaaggcattaacattttttatttttcaggattaattggaattcttcaaaatgtcaggtaagtttttgtgaataaatttgaatatgctttattttcaaatgtgaattttgtgattattttccctaaagggggactttatttcgatttttttttgtttaacatttggcaaatataaatacgtgtgtgtgtttgcatatatatatgtatgtatatatttgttatttatgtatatagacattcctatcattgtcagaaaaagattaaaaagggacttacagtgggacacatatctactgaataatctttgaagtttgtggggaaaattaggtaataaaaaaagcaagatttgcaaagcagttctgcaaagagaggttgtagtaataaagagcctgtggcaaggtcctgccttggtagaggaggatgaaagtaggccttgtattttctagtaacttacataaagagagaaaaaccacatttatgggatttttgtttgctaggagataaaagtcaactggttgtttaggaaactcagcttttttttgtagtaagcagagagagaaattagtctctaatctcaataagaagacaaggtacaacatcatgaaactgacttcagtacctcccttgcagcaattactgtgacctagattgcttttagaaagaatacagtgaaaatgtgagtcactggagatgtagactaaactattgctaattcagttgtgtgtgacaccactgtttattaaaccattatttgtttatggtgttatgttgtgaatctttttagacagcactttccaaaaataattaggaaaaaaaatcaacttcact

SEQ ID NO: 9760 - DNA, 6000 bp, Homo sapiens
gacggggcggctggccgggcagaggggctcctcacttcccagtaggggcggccgggcagaggcgcccctcacctcccggacaaggcggctggccgggcggggggctgactcccccacctccctcccggacggggcggctggtcgggcggggggctgacccccaaacctccctcccagacggggcggctggccgggcagagggcccctcacttcccagtagggcggccgggagagccccctcactcccggcagggcgctgcggggcggggggctgctcccccacctccctccgcacggggcggctggtcgggcggggggctgtccccccacctccctccgagacggggcggctggccgggcggggggctgaccccccacctccctcctggacggggtggctggccgggcagaggggctcctcacttcccagtataaaggaaagaagtttaattgactcacagttctgcatggttggggaagccttgggaaactttccattatagaggaaggtgaaggagaagcaagacaccttctttttgttttgttctttttttgaaactgagtctcgctctgtcacccaggctggagtgtagtggtgctatctcggctcactgcaaactccgcctgccgggttcacaccattctcctgcctcagcctccccagtagctgggattacaggtgctcgccaccacgcccagctaatttttgcatttttagtagagacagggtttcaccatgttggccaggatggtctcgatctcctgaccttgtgatccacccgcctcggcctcccaaagtgctgggattacaggcgtgagccactgcgcctggccgcaagacaccttctttacaaggcaacaggaaagacaatcatcaagagaagggggaagagctccgtataaaactgtcagatctcatgagaactcactcactatcacaagaacagcatgggggaaactgctgccatgattcagttccctccccccagtctctcacttgacacgtgaggattatggggattacaattcaagatgagatttgggtggggacacaaagcctaaccatatcagtagtttaagcatcactttcccccattttggccccaggtgggatagatcagcagacaggagggttgcaatgattatgcttcaacaaaggatgccgtcattcacccataggctctgtcaccagtggaatcctgtctctaagccatcgggccaaacacacgttccctgttgttggacacatagtggtgacccaatgacactcttatgaggatttgcctgcctccgcctgagcaggtgggtggttccacgcttcccaactccactgatttatttcctcaggccatcctggattctggcttcacccctgttagtgtgctgaggccacacttcttgggccctcctccggtcccatgccacatcactaaccacagctggtctcctcaaatttggtatgtgtcccgccctctagttccgggccaaatccttcagactctagattcgtgaacctcattcaccttcttcttctaagctaatgcctccctaccttggtccttttctattttctgtactctctatcttgtcctggtgacaaggccctccaggcctggccccacccggccaccctgtccacctcccaccaccatccactggctggtgcaatctgctgttcaaggcataaatttattcagtgcccagcccctccttctgcaaggtaaccacctagaaagttagtctaacaccctttctctgccctgtgtggggagcctgtggaagctggtctcaggatctggctgggtaaaccatctgtttacctctgtgtgggttctgacactcctagccagttctgtttctctgaaccttgtttctccactctgcttgccaagtccctttgtcttatttttttctccctctccctccttccttccctccccccatccttccttccttttttccttccttccttcctccctccctcccttcctccctttttccctctctccttctctccctccttctcttctttccttcctctcttccttcctcctttcctctttccttctctcccattctcttcctccccctctcttcttcctctttttatttttgtcccatgctttaggccttccttggcccttcctggcattgcttttcctgacagcaacactcaataatttttaaaaagcacctgagccctttgtgttgactgatgccacctctgttgtggtgcagatttgttttagaggcagatgtccagggacgctgaacactgaaatccatcctgcagagcttgctgtaggcagagtaaagaagtttgctctgtagttttcccaacagccttctcaaatccatgggagacgtctcagacaccttgtatttaatagacaaggaaatgagctcaggagatttgccccaggttgtaaattaaatcagcacaaaggtagaaatgaacacagagctctcagattggaagctgtccagacagctgcatggagcaggggcacagctcactgtctttcaaagcctcaaccagggctgttgcatctcggacacttggcagttactggaaagtcatgttaggctttcctgttgattctttatcttgtggaggagttgcacagtcaatgccttgttcaagattaatcattttccctgttgcctatgactgaggctgtttctcacatcctgcccctggttttgcctgtcccaaggatttcgtctgaagggcgggacattccccctgcctcttcgcaccacagccagagcctgccattaggaccaatgaaagcaaagtacctcatcccctcagtgactaagaatcgcagtatttaagaggtagcaggaatgggctgagagtggtgtttgctttctccaccagaagggcacactttcatctaatttggggtatcactgagctgaagacaaagagaagggggagaaaacctagcagaccaccatgtgctatgggaagtgtgcacgatgcatcggacattctctggtggggctcgccctcctgtgcatcgcggctaatattttgctttactttcccaatggggaaacaaagtatgcctccgaaaaccacctcagccgcttcgtgtggttcttttctggcatcgtaggaggtggcctgctggtaagtcattcaggattattactgaattctctcctgtttcctagatgttttcattatgtattttcatggaaagttttttgtaatgcatatttctaaatcaagtgacttttttgttgctgttcattcctttgaaagcagattatacaaaagcgagattggtacagtatagcgtagtaattttatgagatgttgttttacaaaatgctctttcaactaaaagtgaactgcctttttgctaaactctataggtaggaaacagatattcgcttttaaatcagatttgagagactatagagtttctactagaacgggcagtcatttaacatttgctctggggagccggaaggggttggctggttctctgcctaaatcaacagttttgaatccaaattctctgctgtttattttcagccatctgtgatagggaaaaataatgaattgtgagtgcattgctattttaaaagaactctaagctttctcctttatgtaaggctggggtgtggcgtctaggaaaaaccctacagttagcagcaggtcggtgtctgaagctaatagtggaatgtgttattttttccaagaattgtttttgattgaagtgagaggaatttccctgccaacctgggagctgaaagcattagcttcaaccacagcatggaaagaatgtgagcaaacttaagtttgctactttaaagtgctgggattaaaaattttaaggagaaattttatggaatggtaccatacgtgataaattttcttaatcaagtaaaagatagtaaaacatttaaacctaatacactgattatggcatggcaaatctgccctaaattatttatttaatgagattttatttaattttattttatttaatgagacggggtttcgccatgttgcccaggctggtcttgaactcatgggcccaagtgaccctcctaccttggcctcccaaagtgctgggattacaggcatgagccacagtgcccgtctgcctcaaatttaagcattattatcatgttaacatgattatttgtcttaaacataacatcacacttaagtttctttcgatcttgaacctgaagtatttcatatttactatattttaagagcttaatattgttaagttaaaactatgcatttgtataatcaaggaagcagttaatatttattatatatagctttcatgtctcccatttacaaaaaagtttcagttattctattaaagatttgttggtatattctgcattttacaagtggaaaaaatcagatttaaagaaagggtttaatatttccaaaacagagtttgttatctggggtcgtgtgataaactcttgtggaataaacacgtttacagtttattattttactcctcccatgttacatcctcaccctaaaaaatgctttgacagattacatgaaaacaagcagatatgacatttaaatggtctttttctcctcagaggtttacattctttgagatatctggtcaacctaatcaaagccagttaatgtcattggaaataaatatattttaccaagagatgcctaacctgacccatatgagcctgagcaagacaatgacctgactttgtttgtttcctaaccagatgctcctgccagcatttgtcttcattgggctggaacaggatgactgctgtggctgctgtggccatgaaaactgtggcaaacgatgtgcggtaggtcctcctgccctggtggtgaaaatgactcctaagatgtagctgtggcactctgtggctcacttcctgtgtgtctgcttttccctagatgctttcttctgtattggctgctctcattggaattgcaggatctggctactgtgtcattgtggcagcccttggcttagcagaaggaccactatgtcttgattccctcggccagtggaactacacctttgccagcactgagggccagtatgtaattactctctacatggctacacatttttatccaccacatgtatatagtggcagctctatcaaaccagataggcatccacttatccatccatccacccacctagccagtgtttattctcactgactcaggcatggtttaggcaataggtatccaaggatggatccccagtccccgacctaaacaaattctaaatgcttcttttcttttctttctttctttttttttcccccagagacagggtcttgatctgtcacccaggctagaatgcagtggcacaatcatagcttactgcagcctctaactcctgagctcaagcaataccccttcctcagcttcccaaatacagagtgcttttgaatagattcaataattcagtccttataataaccctatgaagtgacttcctattttaaagatgaggaaacaaaatcacagagagatggagtaattcatccaaggtcacgttgccagaaagtggcagttagcatttgaacccaggcagtctagatgtagagtttgtgttcatatagtgcatctcaattacttcatacattataccagaacaattgcctgattaagtgtaatacattttactactttataagaaagtattatagaatccatatataataagaatggcaactatatgaatttaacccaagcccagggcaaaccatgcccttacccctgtgtatacatgcactcatataaaacatacacatacatacactcatataaaacatacaaactatgtacaatgcccccttttttagttattaagctatataagtaaggcctattcacaatcataatatcaggataatttgtgctgttctaccattctatgttgatacttattttttttatcagttatccagaaaagaacagaaacagcacagctgatagaaacggatgtatgtggtgat

SEQ ID NO: 9761 - DNA, 6000 bp, Homo sapiens
cagtggcgcgatctcggctcactctaagctctgcctcccgggttcacgccattctcctgcctcagcctcccgagtagctgggactacaggcgtccgccaccacgcccggctaattttttttgtatttttagtagagacggggtttcaccatgttagccaggatggtctcgatctcctgacctcgtgatccaccctcctcggcctcccaaagtgctaggattacaggcgtgagccactgcgcccggccacgagatcttatttaacagacagcatgggcagcaactttactccactccctggttcctctctgtggcttttgtgtcagaagcacaattctttcacttattctaaatgtctccacaaccatcatcagccccaaaaatccctgtactgaattctctcctctcagtccaaatccactgcgggttcatctgtattccaagagaactttgttttctttttcttcctttccctcaatccttttaatcctctagttcaagcaattagctctacaaatattagctgcaatcaaggtctagcacatgtggtaattttctctctaataaatcaatcaattctttccatggagtgtttttttcctttacagtcattagaaaattacaatgctacttgaggatcaccagcaacttgaattagtcaaggcacgtcaatcaaatttgccagattttgctttaaagatgagaaaaatggggtagatttacaaaggcctcttgtcttagaataggaagcttgatagacccttgttgaatctctcttagagaggccttggagtataatgatccatttggaggaaaatcaaaatcagtactaccagtgacaaatcagacaaaacatagaacctctcattaaataatctaaaaattaataattggaataatcagccatgcagtgtccctgggcaatgcaatattccgtaatagctaacaggttagcacagcaaagaaaaaagagacataatctagcaaatggccaaactgtagttctatggcttattaaatttttttttctttagttaaatgggaactaaaggagccaaactgtgcttctcgaagctgtctttcacgttggggataggacactgtagggagtagggagctggggagcccagtgacaactccttgatcacccaccctcccagtatagcagctcgatttttgtcttatttcacacaagttgtgttgaggcaatggtttttcttcttaaaaatgatttgagaatcacctatgcagcccagaccactcttttcataaatatgtaaaattaatgccagagaaggaattcttaatttagccatacagctggaaatagaccctggacaggatcttcccatgccatgctatactgtctcttatacttggcgaacaaaccaggtgagaatttgcatccctttgtaatggggctgctttttttcttttgttttcaaatggttataaggaaaaactgatgcagccaagttagtgtgagaagaggcacaaatgctacactggaagtgaaaacagagtctgcaattgtgctcctttctctacagaatctctagtcactctgaagaattatatcattatccagcacctgaaaggggtcagaggagggggaggcctagttccattttcttatgtcaccgaatgtattcctattaagattgagagaagtaaagatttcagcaggatacttggtgaaaacttgctgacattaatgactcaaattctcagagagactgcaaggaaaatggtgtcatcactgtcattcaagacatttaagatgaaatttcaaaagaaggctgtcaggcataatgactgccaggttccattatatcattctcagagggtggatcacacacactactacgcagcctgtgggtggctgatgctgaagtttgaaaggaagctgcatggagaagaggtgaggggggctgcctcacatgaacaggatacagcaccattgatattcatatggtgatttgggggtaaatctatgaatcggggcctggtcttttgttgtggatatgctgaaacctagtgctgaaaaaatgtaggaaagtttgagctgtaaatggtagtgcctatttattaatttgctatgagcatattcctctctagcgacccagatgctcatgtctgtgtgcattccagcactgagatgcctgcaaagcctagtttgtaatcagtagatagccatgtgaaaaggagataagggcagtggcttccaaccttggctgcacaatgcaatcacctggggtgattcgacgctaaggccatactctaaaatcaaataaatctgaatctcagggatgaggacacagacatcagtacttttaaaatcttctcaagtgattctaatgagcagcaaaactgagaaccaccgtgtcaaagcaaagggtgaggttttaggcctcaaagggtgagtctcaccctttccactcagggatcttttatgtcatagagcagtgggtttgatttggttttgttttaaatcaggagtagacataggtttgccagtttctaaatttgtcaaataaaatcattaaaaattcaactaccattatctcattaaagaaagaaaatttcaacaataaaaattaggaagggcctaacttcaggatataagagtaactcagtatgttgtatttatttttcccatgtctctacagacgagtgaacatgtcgctacagactgatgcaaactgatgcaactgatgtgatctaattgctctctacacccataatcaaggctttcctccttggacagctttagatatacttggctgagtttgggttaattaaaccgctgtcctatgctaactatccttctcttgccatatcctttagtagaggttattaatagtattgattaagttgtaggtgatttcttctcccaggctttggaaatgttctgtctcttccaattacagaatatgttgatttagtaagctcagctctgcttagacatcttaaactaagttttctagggtgactgtggcacatatatgcccaaataaccacttatcaggggcactggcacccccttgttttgctagtggaccatgatagcgattattctaaatccagtggtgaattcattggagggccaaataaactgagatgagttgcttattctgtgttctagcaattattctaaatccagtggtgaattcattggaaggccaaataaactgggatgagttgcttattctgtgttaagttatacaaaataaaaaagacttactaatattgtaaactttattttaagtgcctctttggaatcttctatatgcccagttcttctgtggccatgttttatattgcccctcttctccccgaaggtacattggcattctagaatgagttctatacttagttgtctgtccttaacgagactggctgttgcgactcctaggagaggcgagctgtgagagaagtttaccagtactccgagtctatacctcaaagttcccttcgaagtgtgcataatgtagagactcatttatgctgaaaatggtgtgaaataagtcttcatttattaatttcctctaagctgtcatgcttaaaggtggatcaaaagaatagaagctagcatacacatgtgcttttggccaactgaaaaagttctatttactgatgtctgtgttcttcaaacactcaatatgtgtaactaataatgggctagtctgcccctgttactcctagacgaacccaacccaaactgaaatgtttgccatcttttcaaggtcaggggctttgcttggaatagaacatcaacctcagaagtagaagacctggatttgaatcccagctccactactctcttcagcaagttgcttaaactctctgagcctcaattcccttatatataagatacgaataattgctttttcttcttctttcttctttcttattcttcttccttcttcctttctcctcctcctcctccttcttctcctcctccctcctcttcttcttcctcttcttcattactttatatgctaattatgagaattacatatgataatttaggtagaatacttcacaagttgccagacataagttcttactaaacattaactttgtaggtcagagctcaggacaataacatggcatataataaacattcactagacacttcacacacacacacacacacacacacacacacacacacacacacacagtcctgtgtctgtagaaggaggaatctcattggaaatgcaaagttaaaaagctgttactgaattctgaactttagtttccaggtcttgaccgtttaaccagacctacctgctgcttaatctttgctcataactgtctctagtctcccaaacagattacctttgctgagacctgtgcatttttatgatgaatccatagagtcacctatctgaccaccatccctctttccatcaatatgcccttatctttacagatcctggtattccttggacccagaaacacattcccttgctattatcctaaagcagctaagcctgttaaaggaaagcatttagaaatctagatatctgctcctgcattttcatatttctgtatgccaagaaaaatttgaatcaaattctctattgatacattaggtataaaccatggatctgggagaaattaagttggaaggacaaggacccatggttgatccagagcacttaatattcgtgtaggaccaaattctgtttaatatttttatcctgctgtaattaaaaatttttgacatcaactatcaatacaggtacatatgttctccctacctctgctaaagctccttcccccaccaccaaaaacaataacaaacaaaaaacaaaaataaaaacatcgataagtgaacttctcaagttgctgaaaatgtaccatcagattcaagcctgtttctgaaagtttcaactcacccaatcagacaaaaggctgaggaagggaaacatttatcaagttacactgaggactccatctgttatcttcgacctttgttaccaagtgacacagaggagatacttgaaggcagtttgaaagacttgttttacagattcttagtccaaagatttccaattagggagaagaagcagcagaaaaggagaaaagccaagtatgagtgatgatgaggccttcatctactgacatttaacctggcgagaaccgtcgatggtgaagttgccttttcagctgggagctgtccgttcagcttccgtaataaatgcagtcaaagaggcagtcccttcccattgctcacaaaggtcttgtttttgaacctcgccctcacagaagccgtttctcatcatgccaagccaacagaagaaaatcattttttgcatggccggagtgttcagttttgcatgtgccctcggagttgtgacagccttggggacaccgttgtggatcaaagccactgtcctctgcaaaacgggagctctgctcgtcaatgcctcagggcaggagctggacaagtttatgggtgaaatgcagtacgggcttttccacggagagggtgtgaggcagtgtgggttgggagcaaggccctttcggttctcatgtaagtagcaattgcatttgagttatttaatgctttaggcagactcttcccagtgttgcgaggaattatatttgagaattttgccgtgtttactgcaggactttttaaatcggtgtgaaccatatgaaaaacctatgactctgagcaatttcttcttcctagtttttattattttatacttgctttttattataatatagagttaattcattgttacataattaaggtttttggaaatattggcaattaagatgcttaagtattaatatttatgtaaaaaattatggagtctttttaaaaaagtaaacttggggaaataggaaagctgtaaagaatgatctttatgctttttgttctttataaaaagaaccaaggtcatgggctccgtatttaaccaggttgccacctttctcatgattttgtttcctgctccccactccctcccattattcctgc

SEQ ID NO: 9762 - DNA, 6000 bp, Homo sapiens
tactgctcactctttgggtccacactgcctttatgagctgtaacactcccagcgaaggtctgcagcttcactcctgaagccagcgagaccacgagcccaccgggaggaacaaacaactccagaggtgctgccttaagagctgtaacactccccgcgaaggtctgcagcttcactcctgagccagcgagaccacgaacccaccagaaggaagaaactccgaacacatctgaacatcagaaggaacaaactctggacacaccgcctttaagaactgtaacactcaccgcaagggtccacagtttcattcttgaagtcaatgagatcaagaacccaccaattccgggcacacaagattgctttttttttttttttttgagacagagtcttgctctgtcacccaggctggagtgcaatggcatgatctcggctcgctgcaacctccacctcccaggttcaagggattctcctgcctcagcctccccagtagcttggactacaggtgcctgccaccatgcccggctaatttttgtatttttagtagagacggggtttcaccatgttgcccaggctggtctcaaactactcacttcaggtgatccaaccggctcggcctcccaaagtgctgggattacaggtgtaagccaccgcactaggcccaagattgctaattttaaagtgagcttaaaactgtacaaagggagcatggcaaaattacagttagccccaactttattttcatcctgcaaaccagaacccagtacaactctatcccctcaaaaatggaaattaaatacttgcaaacaggcctcccaggttggaagcaaccacagctttcactaatatttctgggttccatccaacacaagtgcacaaaagaaaaaaacctaacatttttgaaaagctagtacttattgggctctttctatttgccaggcacttcatacacaatgtctcatccaactgagaacccttccaaacataagtcagatcctgcttatggtctattttcacacaaataatggaaatggctgagggcatggcctaatgtgagtacagaagtgtacttggaccaaatataagaggaagcacttgggcctcacatacagtgttagttgactttgccagccagccagtacccaggggacatcagcctatagtggattagtaacatgtaaatatccaaaaagtatttaattctgtaaacctaactttgtctcacacttactgtcttcatgacttttctgaagtcacttccagttttcaaaaatggtcagctacaagggaccacttgctttgttttacttaccccaacacattttgttcccaccaagatgtggattggattttctttcttaataacatttcatgtttgttaaaactgctattaacattattaacatttaaagttttaaactgctttaaatagctgctttgcatattttgaaccacaaataactctagtctggaggtggtttagaccacaaaatactatttgtgggtttaagctctgtatctttttaaatccattatatgtacagtgtaaacttgagtacctaataaaataaatgtcacaatgtttaaatagcatttctctttagttcaaatgctttgtcatctgtgcaggaataaattgtgtgctgaattctttttagccctgagaatatgattattgaacaaaatttccagtgagacaagtcaggcctttaaatgataaatatcctcaaatattaacagttagtcaaccactacagcgaaacctttgattattataaatgtatttcctgtggcaagttcaccactgataagagctttttatccgaaactgtactatgtgccaaatacaacttagtatttattacatgaatatatttttaaaaacaaaaagaataggccaggcacagtggctcgtgcctgtaatcccagctactccggaggctgaggcaggagaatcacttgaacctggaggcggagattggcagtgagccgagtttgcaccactgtactccagcctgggcaacagagtgagactctgtctcaattaaaaaaaaaaaaaaagaataaagctctaatggcattaacttaacactcttgtaatgaatttgatgctaaaaatgtggtactgatagctcttattctgtaatgtaaattaaccaagttccttttattaaactcagcatccaataaatggcccataataagcacttaataaatgctaataagttcaaagactgaaaattggtaactgccttatgcacttaaaaacaacttttgtagtttattatttgcttgtttagtgaaattattgcttcatttctgagattttcataggattctaatgaagaatctaagattccaactcacatttgttttgataagcgattggtaaaagtgatttcattctccctttgtaaagatgaagttaatgtttctatacctattattttaagtagctactgaatttacaggaaacaaagtataaaaatttttctgtcattttgttctacctccattgatagtgtttttaatgccattaaatgagttccaaatcatcttaaagatattttcttagggactactgatatcaaatatcaagcattttatgagatctatcaaccacatgaaaaatattaaaataagtatagtagccctggtttgcaatgatgtagagcaattagcaatcttaaacactgctgttggggtgaaaaattagaacatttattatgttttaaaccccttaaaatgttcaaaactattacagttgacacatgatcctccttcttccttttgttcaggaattcagacctctgtactgccctccccctgtcctacccccaagcatgcatgaatcagcccaagtccagaagtgagttcagattagatcaattctgttagcaccttcccctttaccagtgattaaatcaggaatgcgtctatgatccaattatgactagaagttccaagagacgtttgctggaagctttaggaaaattctttcttattagcacatatattcagtgttcaccacagtcttataatgttttaaaacaggaaatactaaaatgtgaaatacattgatttactcgaacaacagtgtgcagctgttagaaatgatgatgtggttctttgctgatgtggttgaatgtcccaatagattgttctgtgacaaaaagcaagttaaaaattgtgttataactacaaaaaaaaaaaaccgtaatattctaaacagcattctaaatgtatattttattatttctataaatacatatctcttctcatagaatcagaagaggtaaacaatcaagtttcaggaaagcaggagccagtattgctttgagaacctcagatatgcaatgtggaatttgcaaaagccataaaaaggctcagcccttagaatctaccacttaatgaaagttggttccattttcttttattgttggcagtctctgcacatggcagagcagtggtggctgacggtccaattttgtcaccaaaaggaactggggagaaggcatctatgcccaccctcctgttagaaaattgccaggaaatgactttctttggcacaacttggatgatatgcaatctctttaaccaaattactaaggccaggaggagtcaagtgctgtttgtcattggcttaccttgagtcaggtatatgcctctcgaccaagtgtggggaccaagtaggcaaggccacacacaatgacacctccctttctaactacattctagaagagtaaaggcagaagcacaatccaggcaggaagggtaggcagttctgtcccagaagaaattaagcgtgctgggcagaccaggaaaaaaaaaaaaaatcccacgtgagaatcagtcagctggtagaacattttaaaattaaacagtgaatcttgctgccttttcccacatatggtaagctgagatgagaatatgtatttttgagaaagcttcctaggagtttattgtgtctattctaaccctagagaatcccccctttcctataatgttacatgtatcacaaaaacaaatgtgtgtgtaactaggcactataggcctaagagtcataatagggaaataagagagcatagattcaccaaatcaaagtttaagtacatagaaaataaactaatgtggaatttcccaagctttcagttgactggggtgctcttgtgttaaaaactatcgtggtaacattttttgttttgtcctctaaacttgatttatctgcaaatctacaaacattttaattatgtaaatagatatctgtgcgggcaaaacactttttgctcacatgatcttgagaaggaacttagattctggtgtcttaaaacgtggcaccttttttatgtccttggggcttttgagtcaccatataaatgaggtctctcatgttcgtatgccagggagatcaaccacctctgattttaaaataaaacactgcaaagaaagcttccgggaggaatgagagcatgccccaaatcacgactctgtaattagtctttgtgcagagcggacagaaatttcgtcccaaagccaccgtccttgctctggttcctttctctgtaagcatgtcacacgaaccacactcctgcgccatgcatcgcaatttaaagctttccttgtaaagtttccccagcttgattgcttatggaaagagcagctccggttcccaattcgtttaatacatcctgtccgagcgcgttttattaccgaatgttacccacgttgtgataacaaggggacgctgtgtcctcccccggtgaactcactccctgtcccagaaatatagcgtgactgccctccccggcggtgttttgaaagtagaagccgggcgccgccctccagcacctgcacctcccgcccggcgacggccgcctgaagcacgaagtgcgtgcgaccgcagcccggcaggtcacgcaaccccaggccgccgcgccgcctgcgtgcctgcagcccgccggccccgcccccgctgcctgcttccgccgctttagtgcacgctcgggcttcctggtgcgcccggagcctgcctcgcgtgccgaccccgccgcgtaatccggcgaggcatcccagattccgcccggctccagacgccctccaccgactttagttcgagcaggtgacgccctcattttaacgccgaaaagtgtcagttcccgatatacaacaaacacctcaggctgcgaaacgtgggataaggggacagcgggctgagagtcgacctcgcccctgggcccctctcggcctccttggcgcctgctccctgcccgctccgtcgggcggccctgtgcgggcggagagagcagcaaggcggcctcccgcactgcctggatttcgagggcgggggcgggcgcgggggcagcccggccagggctaggagacccgggaaggggtcgccagcgagtggccttcgcggagctgcctcaccccgcctgcctggagccgggagcccggcgtgcactgacgcctggggcacgctgggggcgactttcgtggccgggcggctgaccccggcgacccggcgcagtgtccagaagtgcgctggggggtaatgaagggcagcgctcgctgaggctgaaaggagcgagggccggcgctgtgtaggttagattctttgttgacgtctgggagccgtcttttgaagaatgagaacggggccgttattgcaagtaggatgggcttcatcgtgggcctcgaaggatcaggggtgggcgcgccggctgccagggcccctctcacgccacgccgcgtgcaggcgaggggaagcgcgtgtcgtgacgacctgcgatgagatcagtttgagtaaccacagccgtcggggctgagaaatgcagccagtcacgcagcgcagcgcagctcagcgctggctctggccgggtggccgcagccgctccgcgcttcgcagagggaggtgggggtggatcagccccttccaggtggtcgccggtgggggcgtcagaactattctaagagggtggggagccagagaagaaaaccatacaaaat

SEQ ID NO: 9763 - DNA, 6000 bp, Homo sapiens
aaccatgatagtaccacaccctacccaaagaatgccaaggtcaccttttcacttaaaggaagcactttgagcttctctttgacctatctgaagtgtcagcatcctacttttctgccttggggccattattaggtaaaataagggtgacttgcacacaagtactgagataccatgacagtgaatctggtaactgagggctcctatgtgactaacaggtgggtagcatatatagtgtggatacgctgggaagagggaggattcatgttctacctgagacagagaaggatggtgcgagattttgtcatattactcagaacagtgcgcgatttaaagcttatgaattgtttatttctggaatttttcacttaatatttccagactgtagttgactgtggataactgaaactatgggccaggaaactgcaggggtaatttctagacatttctaattggcatttttcttttaaaaatttttaaattatttatttatttatttttgaaacggtcacgctttgtcacccaggctacagtgcagtggcacaatcacagctcactgcagcccggacctcccacacccaaaccatccttctgcctcagcctcccgggtagctgggaccacaggctcatgccaccatgcctggctaattttattattcttttgtagagacagggtctcactatgttgcccaggctggttttgaactcctggtctcaagtgatcctcccaccttagcctcccaaagcattaggattacaggtgtgagccatgacacccagcctataagtggcatttttctataaagaagagctttttctcttcaattagagctatttgcttcctctgaactatagatgattgattctttaaagcaggaaataaaaaatgctgtctttcctccatcatcccagtaattttcaagtaagagattggtatagtagctaccgagttgaaacattttacattgctcatgtgcagtgcagatatggtgttctctttaaatttatggatgaaacaaattgtgtatataaggattttgagcttctaaacaattttttttttttttaaagtagagatggggtttcaccgtgttagccaggatggtcttaatctcctgacctcgtgatccacccaccttgggcttctaaacaaatttttaagaaattttatggtttttaaattttttaagtgttttccatattttttgcaattgatttataattatgctgtggttagagaatgtagcctgtattattgtttttaaaattgttgagaaggcttgtattacctaatattattagttttctttttaaatgtgttatgttgtcttaaaaatgaatgtttctattctttttattggatgaaaggtactaaatgtttcatttgatcaagattaataatattatttgaaacattcatatccttttttatctgcttgatgtatcagttacttagatgtattaaaaatctcccattaggattataagttttcccatttatacccatactcttcaggttttgctttatatattttgatactgtgtttttatggttatagagcttcatgattgttaaattatctttttggatggtttcttcttacagagctttatgataaagtatctttttggatggtttcttctgttagtaataacatctcctttgtcccttattaatgatgtttgtttatttattttgagacagtcttgctgctctgttgcccaggctggagtacagtggcaggatctcagctcactgcaatctccgtctctcaggtttaagcagttctcctgcctcagcctcccaagtaggtgggactacaggtgcgcaccaccatgcctggctaatttttgtgtttttagtagagatggggttttgccatgttggccaggttggtcctgaactcctgacatcaggtgatccgcctgccttggcctcccaaagttctggaattacaggcatgagccaccatgcccagcctgagagtcttttttttttagtagataagtttacatttacatttaccttaattaacagcacatttatatttattcctgccatcatcttttgcattttgtgtttgcatgcattttttctttttatttcccgttttcctaccttatattgaatagacagataacttaatttgtgtcttctatttctcaatcaatttggaagatagtgttctatatttgttctttcagtgatcaatgtaaaggttaatgtacattcttaaatgaagtttttagcaaaatgtgaaggtttattcatatctctttgttaaaatatactaagaatgttagcatattttacttttcctatgaaacatctttttgtagccatcatgtcatttttacctagtattttagttacattttttaaccacatgaaaaaattttttgcccctccctccttttcaggataatctattttgacagtaagaatcattttagagaacacaaatagaatggaaatgatgccaagggtagaaccacagctgataataacagcttctgtttgttgaatacctaacacaggccagaagttttgcatatattatcactaatttgcactatattaatatcttcaatatagagacaggaaactgaggcttcaagagatacataacatacccattcatcctggttggtaaaggacagagctggagagtggactttggtggctggctttggagccacctgtgttgtaggtgacctagtctgttctggccagttctttagagtccgttccttgcttttggactagatagtttctcctctttttgctgctgctttattttattcatgggtccataaatgatagacatcataaccatagtcacattctcacatttagaaactatggcttatagaatgtgcaaaaaataacttttataataagatttgccattttaagttcttcccattattgaagagtagtagggcccccatcatccatatgcaattataaatggcacctcttacaacacttgccttctgtttttccaaaatctgttgaaatatgctgatttgttagaatgagatatttgttgtcataaatgtacaagtcgttagtggctgagttgtaaatggttccctcaagggttgcgtagtgcccagtagccaggtgaggagaaaacgtataaaggcagtgttaattactttcataattcttgctctcaaactattccatttcaggtttttttctgggattggcagtgtatggcaagtaaaggggataggggaggataggaggtgggtggacagatctatattttatccttttacaaatggagatagcatatcaagcctcagtgtccattgcactcctgctgtaggcctccctttgtcttgcactttgactcctgagagaaaaattgtttttgccaacaaggtcatagaatgtaagtggagaggcaagacacatatacgtggaaccaaactggagagagtttgctaaaacattacattgcgttgtgtgggttaaaatatggaaagcattacatatagaaaagataattgtggtgagacgtaatcagggcaggtaagagatgaccagatgaagaggacaaggagccttgaaatcctgttattttcatatgtattaagagacagaggagctgtatgtccagagaccctaaagttgacccaaggtagaacccttggtagactagccttcccataaggacattaatgtctgtcctccatagttaattccagctttccaagaaccctcccccatataattgtgggtaaaagggcacctgccagcagcctcctcagcccacccttcctcatgttgttcatctgtcccttatgctaaagttccttagcatttgatgtaaacagtgtgtactgcactgtgctgccatgtttatacgttgtcttgggatttcttctttctcccgtctcctacttcctttggtctccttagtgcctggtctttggaagcagatgtccagtaaatatacatacatgaatgcccttagactgaagtctatgctcatggtgcaaggaaagctctatggaatcccgaattataaaccaccctctgccttgagatcaggaacagagctgtcacttcacaatctgaatgttctgtgcctcctcttgtctcagctggagcttctgtgtaaaagcaagtgttttaggagtttccatcccatgattctgattgggtgtgtgatttctgaagaggttggaatgggaaatgtgaaaacttaatactaaggacgggcctttgatttaaacagttgctatgcagactgagcattgagtttaaccaatgaggtaaaaggaggggagaggtggtgtttggggcaggtaaaagctgtttcatagtcagtgtttgaaaactcaagagagatgatcctatttgtgtctggaggacttgcctttcaggtgaagaatctctgccttatcccacatcagcagtcactaagaatagaataatgatcactatagggtttttcttatccagatttgctagaatccgtatcagaacacacagctgagaaagacccttcgtttatttgggcatgtggctagtaacatccccttgaattaaatccttctttttttatagttataaagaggagatacattttatttatttgtttttatggtagatttattttttaacccatcattacccatctctttctgtccctatcatatctgcacctaggatagaattatatttaacagtaaactgttaatttaggtagagtaggataactactacaaaataatcaaaggatatgttttaaccttggtcttgatgtaagaagctaaaatagatttttggttattggtttctatttgcttacagttaaatgaagtagattcaagtcaggattttttgttttactctggagattctgttctcctactctttctccttgagtagatagtcagatgtcttttgaaaatgtgttttcggtgtggaatattaacccaatctttgataactcttccagaaccttcggctcgcgtgcttctgagctgctgtggatggcctcggctctctggactgtccttccgagtaggatgtcactgagatccctcaaatggagcctcctgctgctgtcactcctgagtttctttgtgatgtggtacctcagccttccccactacaatgtgatagaacgcgtgaactggatgtacttctatgagtatgagccgatttacagacaagactttcacttcacacttcgagagcattcaaactgctctcatcaaaatccatttctggtcattctggtgacctcccacccttcagatgtgaaagccaggcaggccattagagttacttggggtgaaaaaaagtcttggtggggatatgaggttcttacatttttcttattaggccaagaggctgaaaaggaagacaaaatgttggcattgtccttagaggatgaacaccttctttatggtgacataatccgacaagattttttagacacatataataacctgaccttgaaaaccattatggcattcaggtgggtaactgagttttgccccaatgccaagtacgtaatgaagacagacactgatgttttcatcaatactggcaatttagtgaagtatcttttaaacctaaaccactcagagaagtttttcacaggttatcctctaattgataattattcctatagaggattttaccaaaaaacccatatttcttaccaggagtatcctttcaaggtgttccctccatactgcagtgggttgggttatataatgtccagagatttggtgccaaggatctatgaaatgatgggtcacgtaaaacccatcaagtttgaagatgtttatgtcgggatctgtttgaatttattaaaagtgaacattcatattccagaagacacaaatcttttctttctatatagaatccatttggatgtctgtcaactgagacgtgtgattgcagcccatggcttttcttccaaggagatcatcactttttggcaggtcatgctaaggaacaccacatgccat

SEQ ID NO: 9764 - DNA, 6000 bp, Homo sapiens
atacttaaataactaggaagttcattaccttagacttttaaacaagtcatctaggggtaaaaaaaaaaaaaaaaacaattgatggaaagtagaagttttaatttgcttaactgttttttcaatcagttggatttgtccaaaaataaaatggcctgctctgaaatgcactaagctccattacctatgtaacaaacctgcacaccctgcacatgtaccctggaactaaaaataaaagtttatttaaaaaagtatatacataatcttgataacaacttgccaggggacagtgaagtagattctaatatcacgtaattggtcagattagattaccttccaagtccctcttagtcttgagattttatgattctataaaattattatttccttctctcataatatcatatttaaaaatatgtttctaccactaaagcttatctgatttgcctttttccattacatataacacctacatttatttcctgatacattattcaataatcaatttacttcaacttacatttgatttatttctcttcatcttagtcttttaaaactttttcccctctcagtaattttaatcttaacatctacaatttattaattcaaaataattttgaaaaatatctttaaaagtagacaaataactttgtgcttaatccagcctataaataaacatttgttcatattgaatagtttaaatctgattgtctcaaaatagctcacataacctttaagattaaaacacttgtttacttcaaaaagaagctgaaggttcatttggaagatgcctataaagtgctttaaaatgttttagtgaaacaagatataaaagatcaatgtttaattgaatattttataacttcttcatacttatagcttgttaaatctatgctgattcactaagacttataagatgctattaaaaaaacaaaattatcaattggtgtggaactttttctacgatataaaatgtttcaaaagtgtttctcctatggagatacagaaagatctacagaaataaacatacaacaaaactaaaaatattaattcatgttttatcacatttttatttgcttaacttttatagcctatgttcccatttataaaattgtgtgtaactatattttcaattgtttcaacagtggtatatcaaaagttaagcaaatgacaatgcacttaggttttgatggttatcagacatgcaatttgttgacctaaacagcatttgaaatgaacaaagagaaaaaaaaatgttttttttcacaaattttttacaatgcttcacaaatgtttttacaatgcttaaaaacagacaaacacaatacgtaaatggctacatgctgtacataatcacagattaccacagctacatttcaagtttggaactttcttgagtggctacttcattatacaacaaacagttctctaaccctagtttaattagtagtaaatcttttaaaagatgtatttattttatttaaaccatcagaatgagcaaaatatatgctagaccaaaaaataaagtctatcttagttatttcaatatcattgttcctctctgaaaaatgacagaatcattaaaactatttgaaatattgtaatgtttataatttaaaaaccaatcagcaatgtagacataattaatatttgttgaactaaaaattacatcctatatattacttttatgttttccttttatccattgtgcatcatcaataaagaacatctttttttaaatgagagttctcctttttcacaatgtaaatgatgtttggttaaaataaaactagggacatgtaaatgtctgtatgcaaagcactaaaaagtcacaacataaaatcaaatatccatcataatcacttactctacaatatttttatctggcctgtaatatttgtatgggtagtactcatgtttaacactaacaacctattctagctattcaatcttctgcagctccccagtaccatcaggccacactaacatctgctcagagtaaacaaattaatatattcagaactctctcatcaaaatgaccttgaaaatagttccaaaaagttaaagagattcagtaactttaggagtgatgttgcccaatgtctttcagggttactttaatatcctccagccctgaggctcaaagggcatgtgtgtgatttcacacttgcccacataaaatatggtgtatccaggagtgagtctcctcaaattgggcaaccacctgaaaaggccaaaaatatctctgtgacacatcaaactactgatgcagtttggtttttcctaaatctgactgattcattatggggatgtactcctttggcaaccctgcctagatataccactttgaagcccaatttggcgacccagtgagtgaaacacctatgacaaattttctttgtatatctatgtcttcctgtatgtaaaattcacatggaagaatttattatcctagaaaatactggaaagaggtttggaattcatgccagtgagtctgaaatgctatatttaaaaagaatccattttaatacatggtgctttttattactttctgggtccctgtagatattttactaatcttaataatcttgaagaatgctgagtattttaaagaacaaatgaaaacattgtaagtatgatatatacacacacgtatacacgtatatatatataatctaaattcattttatgcagaaccaacacagttgccatactaaatttagagtgtgtgtatatgtatatatcccaaaaaattccacaggcccctggctgtctctgtgaccaactccatcctttcctatcttttaatgtaggtaatacggacactaacttgtggtattatatgtcaataatatgaactaacgatggtataaattatagtatatacaaaattcactaaataaagatgtaaaacatatatccaggcctgtctatcgaaggattttatgcataaattaaaagagagtactgtttctttgcaaagggtgagttagagttctttgaatgcttttgaaaataggttcaagatcattctacctacaattataatagctaaataactttgccttccttggacaatgtattgcattctcttcaggaagaaatggcaagagatacagagatgattccccaggctaccttctattcactttgggagttagtggaagactgccctctttccaacacagtctctgatgaaagggatctattaaaaagaattgcgttggtttacactgcagattgaatggagcattaaacgaatgactgcattagtatgactgcagtgggggtaatggtcgcctctgtaatgttgtaataatactttcacatacgtgttattacacgtattaattgttccagtgtccgtatctaatttatcgcgaaatggtatccagcatctctcaggcaaatgcccccctcccaactccctgtgccctacagttttatgccccccgcccccggcaaatgtaaacagatgaggaaatatgtgtactttcaaatcgtcacccatgtatcatgaaggtgggggattactgcaaatcacttggaaaccgctccccggaggcgtttagcgataccgcccaccaatacagctcagatgttcttaatttgatcaccctccaccttttgggctgtaattttccaaacaggcatctctctcatttgcaaataaaagttacaaatcaatccacgggtacagaatgctgacttcccgacactcaatttcacagggtgtctcttgaagagctgccaggttgtgaccgataatgggggagagggaaaggcggacagcgaaagcgagagagagagagcgagagcgagagcgagagagagagcgagagagagagagacagagagaggagagagagagagagagagagagagagagacagagagagagagagagagagagatcacttgcttccttgcttcctaagccgggattttgcctgcgatgcgcggcgagaggactgcggcggctgatttacacagttggcgcggaggaggggccgggggtgcgggggggacgcgctggcggagctccggcgatgggctgatctgggggctcccgagcgccgctcccttggtgcgcgatttgggggcggctgatggatttgcattcaggttccagccctgcgtttcctatattgactccttatacacgacctggcgctccagtttaggaggagacgttggtaagtaacgtgtaatccgattttagttatttcctaggccattaaagtggcacttttaaagcaggtcagtcttaaaagatgccgccgccgccgccgccgcgagcgtctccttggcctgaaacgttcagcagtcccctccccctcccacccccctcccccgcaccttctcccgctcgagaagtgagggtgcttgaatggtgagcggtcagaggactcactctctgccaacggtatcgcttcaccttcgtgctttgcctgagatctcccaaatccaagtggaatttggtgtgcacagccatactgtgtatttgtatcttctctccccctctccttctttccccccaccttcgccgtctgaccaatgctgggatctgagatctagtcgcccccttcctgcctcctttccgcctctccccacccttttcttctctcatctacacgccaccaacccccactcccacccacctaaagggcaaagagcaaagacaccctggaaaagcaagggctaattccatcttctcggatggaaggaggcctcgggcagggattgcgctgtgagtgacaacctttgaggaagagagaaagagagaaatccagagactgagctcaggctctcgggaacaacgaagctctccactgatccagagcaccgagattttaaatcaaaggaacctagtcctgggacactcactctgcctgcctgcctaccaaccatcgagggcatagggagctgtggtcgtgagctccctgtcgctggcatcgccgcgctaggtgcgcgccccgctctcccattggtatgcagcgaccatttccctgcaagtctcaaaggtggaaacatttaaacggattacaagcgtgattcggtagcctttcggaaagttggtggccagaagaggagaagctacaaggctacagtatgatggatacaattcagcttcgcagagagtttgcccctcctgctgggtagcccctcgcagcaaacctcggagatcctgagcgctctgcaccataggtactcgccgccatcctttcctacttcgcctaattgaaaccagtatttctcgtatgtaggatgtgcattgtagagcacatcgagtttggccgcggtgtattctgtacgctcacaggtgctaggggtttgttgcagttttgaattggatcagttaggtgtaaggacgttggtggaaggaggggtaccggagactaacataccctcggacctcttttctgggtgaagacatcgtaagtaactccaacaaataggccaggtggcggagcgaaggacccctcccccagtggaatgctcgctggtgttgtaagaggtagaaggaaaaaggcttgagcttttaataattttccgtttctaaacagaccattgtgcgtttcgcctgacgacagcagattagaaaaggctctatagacggctcaaagctcttcagaaaatgaatgatgcagcgttttaattatttgttctagggaagatagttttgcttccatattggaatacttaatcttagatctgaaaaaattagtgagctgtaagatccagcagtggggaggaggaagtgggaagggggcacagcagggagaaagggcttcttgtcctccctctggacaaacaaatggctctgggcgctcccagcaggacacggaaaaaactggggccccatggctcaatattccctaacttttggagccctccctgtcctttagacgcgctatcctgagctaaagaaaaggaaaaaggtgagatagcctttaggacacagcccaggtccagaacgtaaggggttttagttcaagaaat

SEQ ID NO: 9765 - DNA, 6000 bp, Homo sapiens
gactgcctctggactttgtgtacaacatctgctcttcctggttttccagcagactgcctttagactcaaatgcaagtctttcttgagtctccagcctaccagcttctcccatcagatattgaactcaccaagcctccataactatgtcagcaattccttaaagtaagtctctccatatatacacacattatattgcttctatttctctggagaactctaatacatatactatatgattctatttatataatattcttgcaatgacagagttatagacatgtaatagattggtgattgccaagatttaagaatgagtaagggtaagagggattcagtggggctataaatgggcaacatgaggtatcctcgtggtgataggaatgttctgtaacttgactattggggttaatatcctcattgtgatattgtactatagtcttgtaagatgttaccattggagaaaattgggtaaaggatacatgggctgtgttatttcttagaactgcatgtgaatctacaattatctcaaaaactctgattttttttttttttttttgagacagggtctcactctattctctaggctggagtgcagtggcacaatcatagctcactgtaacctcaaaatcctgggcctaagtgatcctctcacctcagcctcccaagtagctgggactacaggcgtgcaccatcatgcccggataatttttttaatatttttagagagacagggtctcactacgtttccttaggctggtcttgaactcttggcctcaagcaatcctctcaccttggcctcccaaactgcctggattataggcatgagccactatgcctggcaaaaagtttaagtttttaaagtaaaacaaaatatatctgttttcattattttatagtggccttctctgaagtctagaagataaacttggattgctactcagatgattaaagaattctacacccatactattaaatagcatcgtcacagtcatcccagtttaacaagtaagaaaactatctatcggctgggagcggtggctcacgcctgtaatcctaacactttgggaggccaaggcaggtggattgcctgagctcagaagttcaagaccagcctgggcaacacagtgaaaccccgtctctactaaaatacaaaaaaattagctgggcatggcaacatgcacctataatcccagctactcgggaggctgaggcaggagaattgctagaacctgggaggcagagtttttttatgagaacataaaaaactctgtgtgtgagcccagattgcaccactgtactccagcctgggtgacaaagcgagactccatctcttaaaaaaaaaaaaagaaaaaaaaaaaactacctatcaacccgagttatctctttccatcctctcccaaaagcaattatcagcaagtcctatctgctttacacaccaaaatatatcttgaatgtacacttctctttctctggtatcactattagccttggtggtcaatagcaagcatgaattgttgcaattgtacctctcctcttccacaaatgctcccatccaatccacccctcactcaatggcatgagtaatcttaagacatatattggatcatatcactcccattcttagttctctctggtgacttcccattgcccttcacctgaatcccaaattattcctatagcctacaaagccttgaggtctcaaccaaaaaggcacccctacacagaacacttttctgagcaccttttctaaaatgggtgccccctgttctcttccccagcacttttagtttctttcatacaatgtaagccccacaagatcagagactctactctgttttgttcactgttataaccggtgcttagcaaaatgttcagcaaatactacatttactgaatgttaaatcaataaatgtccaaatcccagcctgagataccccttcctccaacacaagaaagcatgtgacaacccttttggacttaatttattaaataaatacttgttgagtgcctgctatgtaccaggcagcattttaggcactggggataacaacaaggtctccacattcgtggaatttagctttggcaggaaagtggcaaacaacaatagacaagcaaataataaaatttcaagcataagcattaagaagaaaataaagcagagtaactggcccagggatgagttggagaaagtaggtggtatctatcttaagaagcctggttagggaatcctcactaagccgtcatctgaatgaagagaaggagccagctacatacaaatctagggagaagggctataggcagaagctcattgaggacaaaggtgctgaacatggaacatattagacaagtctgaggccagtgtggctgggcccacggaaggggagaaggtctcagagccacccagggcctatgtcaagtcaacctcttgggctgtggtgagaaacgtgggtttcttgctaagggtgattgggaagcctttggagacttttaagcaggagtgtattatgatctaactttaaaaatatatcttaactactgtgtcaagaaggtactgcagggtaagatgggagcagggaagtcaggtaggaggctgtgaagacatgtggaagagatgcagaccacagagatatctagggagagggtgtggagaggcgagaagaggatgtaaagagtttgccctcttttttggcaagctacaatggggaaaaatttggctcaaaaatcttaaaatacactgactgtccttcagggactgggaccttccgatattctcttgtactcctggcttggccaagtttgacctcatttaatttgttcccaggagatgcctttgcacttaaccacatctgacccaactggagaggaatgcagcatgctgaaatagctggtttatctctccactctcccctcctcatttatggaagaagaaaaaaaaactaattttactgaaggaaaggatgacaatgaaaaaaggggagagggagggcggactcttttcagtcctgtcaccacctagaacttctggcatccaccaagattacattaatcagcgaagtaatccgaatgtgacctagagggcttaaaagtatgaagcctaaagaacaaccacacagaactggtttcgccctgcccagtggaaatctccgggtgattgcaggcactggtgcacgttattgaatagcgcccactccaatggcaaagtgcgaaaagactgacttcaccacagccaggagtgcaacgacctgcagctcctcggtgggcgccaagacacgctctcctgaaaggctggaatcgcttatcagttctccgcgggcaaaagcaatcagagcatcaatgtaaatgaatcgcaccccctccccgcacggagataaagttttagcatatcccagatggtgcagagattactcattcatttctgagaaagagcagaaccacagaggccttggctgaacctgaggaaactgatcagggtgccccgaaggcccgctagtgaatggcgggtcgcgctcccaatgggagaagagaatggtttcctgccgccgtgctccgcgccggcaggccggggctgagcacaagaagttaaaggctcactggccgcccgcgcactcaaggcaaattccgtttctgaaaaggcaggttcaaaagacaaaggttggtaaaccacaccggtatcatttacgacgcggcacagagacgctttcctgcagaatgtcatgtcactggcaaatgccatggaaccgctcctgactgtggaccgctctggcaatggggcgtgctcatcaccagccaaaactgatgcggaaagtcagcgtggctaactgggcgctttaaagtctgacttcaaagctgctccccaaagcttggcactatgacacagagcacctcatgttatgactaaacgagttaatccatgtcaagtgctgagagcagcacctggcacccggcaagacctcagtaaagattaaccatcattactattaatatttgctcacgcttttccactatgaaattattgtattgtgtctgcattacatatgtctcatcttatatgttataaacacctagaaagaggaggctgtgacttatttatctcagtcatctcggagcatggaactgtgctggactcagtaaaagtttgtagtttgattgaattaccttctcaaaccaaacatttcaggtgtgtcaccttgcagaggtgacagaaatgaaaacagggtggcaaaataaaaaggtgaaatctgaatctcctctaatccttcattttctcaccctgtttcttcataacacccctcattgtgttgctgcttgttacatttttgttccgctgggaactggttccatttgagcctcagtgcaatctgtggccccagttgccacacacacttaaagctcaataaatttgatatctcctgaacccccacagggtttggatatcataagggatacttaggcccaagatcaagccatatgagcaggtttatttgagaactctacgttaaagcctccagcaagtgcttcttgacatatatgaagcaataataataacaaccgctatttgctaagtacttattatatgttgagatatgccaaacactttcacatattatctcatttaatccactcaacaaaacaaaatgtgtgttatttctattttatcaggcaaaaataaaaaactaatcagagaaaagtcacagtgagccacttgcttaaggttatactccccagtaaaatgttgagattcaaacccaagtccctaacaatccaaagctcatccaggtaaccattcaagtcaacaatggtctccggccacacagctcagctctaaacagaaacaccacagcactaattatctgtggagcagagtgcagtgtgcctcccatgctccacagcacagcacggcagctcagcatatctcatcttctacaaaagactccaaagatttctcttttcaccagctcccaattactgccacataacacatgccttgaaatgtgattgcctctggtttgtaacttatgcctaagggacctgctcccattttctttcctagtggaacaaaggtattgaagccacaggttgctgaggcaaagcacttattgattagattcccatcaatattcagctgccgctgagaagattagacttggactctcaggtctgggtagcccaactcctccctctccttgctcctcctcctgcaatgcataactaggcctaggcagagctgcgaataaacaggcaggagctagtcaggtgcatgtgccacactcacacaagacctggaattgacaggactcccaactagtacaatgacagaagataaggtaaagcagcattatattcatttcaagtctggttttcaggagatagttaggggaatacagtcaagtcatacagaggatttgggggaggttgggtgtagctaccacagatcaaaattaattctctttactttgccaattgaagaactgtttcttattcagtaattggggttttaaggatttttgctctgttaactgactagtctgcataagttttttcaagtaattgtgcataaccatattactaaagaaatatgtcccctcctaaccaaaaaaaaaaaaaaaaaaaagggggcagattgacctaaatttaatcatgaaaactcatcgggaatcttcaaaaacgtcaatgcaggagagacaaaagaggtagaagggttgttctctagattaaaagggattaagacaaactgacaaccaaatgcaacaaatgatttagattgtggaaggaagaaaaaaatagcaataagggaactatggagacgttgggaaattttaaatatgggctgcatcttaaataatattactgtatcaatttcacactcttggatataataatggtatctaattatgtaggaggatgtctttgttctttgtacatgctaaagtatttaggggtgaaatgacacaaatatctacagcttatttgtaaatggttcagccaaaacaacacacacac

SEQ ID NO: 9766 - DNA, 6000 bp, Homo sapiens
tttctattcttttattttacagaaaacatttgcttagaaaaaacaatactaaaatttatatggaactacaaaagacccagaatagctaaagatatcctaagcacaaagaatgaaactggaggaattacattaccttacttcaaatcatactatggagccatagtaaccaaaacagcatggtactggcataaaaacagacacacagactaatggaactgaatagagaacccagaaacaaatccacacatctacagtgaattcattttttacaaaggtgccaagaatatccactggagaaaagacagtctctttaataagtggtgctggaaaaactggatatccatacgcgcaagaatggaactaaacccctatttctcatcatacacaaaaatcaactcaaaataggttaaagactttttttttgatccaatgatagtttttctcacataccatttacagttggttttccattaaaagctattcatatatgtggctcccttcgtaatccttttaaacatagtagccctatggacttaacctgtaagttactattatcctttattttattttattttattttatttacaaaatggattaaagactgaaatctaagatttcaaattataaaaccactaaaagaaaacactgaggaaactctccaggacattggagtgagcaaagatttcttgtggagtttatggatttttttttttttttttggaaactgaattcaattgcgcttatagttctttaatataattgcagcaaccaattggcatgtaattgtgttattccaaacaaatattcatttttaaatggctttttgcatgtttgcttatttactaatcatgctagtttgcataaatgtgcaaatccatgaaaacaaataaaattataaaagttatgtaaacattatcccattactggatatatacccaaaggattataaatcatgctactataaagacacaagcacacgtatgtttattgcggcactattcacaatagcaaagacttggaaccaacccaaatgtccatcaatggtaaactggattaagaaaatgtggcacatatacatcatggaatactatgcagccataaaaaaggatgagttcatgtcctttgtagtgacatggatgaagctggaaaccatcattctgagcaaactatcgcaaggatagaaaaccaaacaccgcatgttctcactcataggtgggaactgaacaatgagaacacttggacccagggcagggaatatcacacaccgaagcttgtcgtggggtggggggctgggggagggatagcattaggagaaataccttatgtaaatgatgagttaatgggtgcagcacaccaacacggcacatgtatgcatatgtaacaaaactgcatgttgtgcacatgtaccctagaacttaaagtataaaaaaaaaggttatgtaaacattgaaaatacagaaatatttcaaaaaagtcattagatagggggagtgggatccatttgggcttgttggacatgaaaaagcttcacagggactggctatgggtgactgagaagacttatctttggtattgcagggggagctgtaggcgtcagtgtgggacctttatagtcacatgctaggcagctcacaagtcgaccgttgctggaaaaaatgatgaaacatacaaatgggccacaggaagctgaaatgaggatacagaaacacaatgctctgcacatcttggcaatatctgctgtgttgctgtgttcctcattctctcttgagatttttggtgttaaccactgtcatttttttacaaaaaatttgagcctcactaatgacactgttctgatctttcagtgagtcactgttatggtggttgaagtgatttatgtcatcaggtaactggggatacaacatcttgctctatactccatgtctctagagaaacatgtgcattggttaattaacattagcaattagatgtttgcgaatgaatgaatgaaatgagtagttgctaatccacagactgtcaggtggactgaagggcacagaagtcatacagattatgtcagtgaggattattggggacaaataatgaatgcagacttgctctctgaaggaaaagggcaccggggcctcacagaatcaagacaaagtggaagaacagcaggaactaaggaagcaacaaaaagatttaaaaaaaagacccacaaaacctaggaagtaaaagtttcctaggttttactggtcagggtaaagctgctgatgggccgcttctgtctctgttcaataagctcaacctcaaagatcaccggctccctcatcccctgagattcagtccacctggcctatagggtaaatggaatggtggtgggaatatggaagaaggatctgaccttcacttttgaggttactgcttgaaattgctgtcttgccaggcctatgcctatttggggagaggtaattttctataagaaaatggaactgtcagaaaagatgatagatgttggtatcccaaaatgactagatgatctggatggcagtgcttgtatcaaatgtaccacaagggaaaatctgggggagcaccatttgtatgtcactttgataaaatagttctgtttctgttgaaagcattattgcaaattaacaagaaactaatttaccatagaaaaagaacaggtaatggacatgaatagatcattttcagtaaatggtacaaataataacatgaaaaaatcgtgttcagcattactgattataaaaaagttgattaaaacaagatatgattttgattcgtgacattttcaggttataagcaaggcaatatttaatactggagggtatttttgcagcatcacacagcaccttaaaaatgtttctaaatgctgatccagtatttctacttttaggaatctatcctaaggatgtagagatcttgacaaagatgatgcaacgtagtgttcattctagcatgatttgtaaactgcaataaagtctgaaaatatcctaaaacatttgataaatgattgtaatattcttcaaccacagaaatgatatcttaaagaaagtttaataacagtaaaaaatagtcaatttataaatacttagtgagataaggaagattctaaactctgtaaagcatggtgttaattttataacaaacctctgggcatagaaaaaataaggaaatatactaaatgctaatagagagtgtgtgtgtgggagttataggtgattttaattaaaaatgtttttctgtggtctctaaaacatagatgtaaaattttttttctaaaatatagatgttaaaattataaaaatgaacatatatgtttttattctcagaagaaaatagaacaattaaaaggatttcaaataccactttgacaaaaatgtcaagtgcatattgagatgaatgtatagcatgattacttagtcactgtttcttgacatctttgaagatatgaaagagttggaaagaaaaatcacaaaatctctcaggaaaataaaataattacatacaaaatcatactacttctaaaattcatgtttgggagtccataagcttcagttcatctctaaacaacatatggcatttcctattttattcctctatcccagggaggcagaaattcagttattgtaagggcacttagataattttctttctttctttctttcttttttttttttgagacagagtcttgctgtgtcaccaggctggaatgcagtggtgcaatctcaactcacagcaacctcctcctcccaggttcaaataatcctcctgcctcagcctcccgaatagcttcgattacaggaacctgcctccacctccggctaatttttgtatttttagtagagccggggtttcgccatgtggcccagactggtcttgagctcctgacctcaggtaatcaacgcgcttcggcctcccaaagtgttgggattacaggtgtgagccactgcgcttggccttgataattttatttctaattagatttagtagaaagacctattgttggaggcaagtgccaaatgttttcatagtgacacttaagaatttgggatgcaattttatagactgctgcttctcaaccaaaagcattataatttctaaagacaagcttgtaagaatgcagttacgtgtgtgcacaagacttatcagaccatctgtgactaataaagcttgagaaagaggggaggagagagggtattctgccttccagtaacatgcttgtctgaaacttactaaactcctcttaggcaatactctgctcagagagtcatgtgtttaattgtaaaaatctgtcagtatcataggattcaaaagacatcaatcatttatgtcaacaaggaaagagtgagggctgtgtgactcttctatcattaggaaaagatgtgctcaagagacaaaaatgtggtctaaggagggctgagcaactgtaggttacaggaaaactgagttccagactataatttggcccccctcccctaatttggactggtatattatatttttcatttcatgcaatgccatgtgtgcagtaagacattatgtaacttggtcagtcgcagttgtgtaatatccactaaatgctttaaagtggctgacgttattagcagtttggtgcatggggaggccattgcttcccctggctttggcgggatgcaatatcgtgtaatgaggttggaactggcctatattcaaaattacattcccaaagggctgctattcaagccacatgacaactggttctctttttcttaagactttattctaagtggactgaaaacagcaaaattgccgtgtttgaacggttccataggtggaatgggtcttttccctgttttgctcccaatttattattttatgctaagatttctgaattataaccagttttagagacatcgggacacaaattcccgtccccctccatctaagctgtgtgacctcgggctggttctgagccttcatttccttacctgtaaattggcgataacacttccctaaggaggtgcaagaaggcttataaagactccagcaaagctccagtctcttaattatgtcacctcaggcaagttatttagccgtttgatttgctgattccttacttataagttggaccagttgtggctactatccgcagtagtcgaagaatagatatcataggcaaagctccgggaaaggtggctggtccttggcggctcgagaggacctgataatggtcctaatagcgagcattccctagggtgatgcggtcgagttatgaaactttgggaaaagagaacaaggaacgcgggcgatcagaggcccagtcgcgagacctgccccgctggggcctccagccggcaccgcgacgccccgggacctggcaccgcctcgctccacccctgcgaatccggggcgaatccgggcggagagttcctgccggccgcgcagcgcagagccccctccggcccgccctctctccctccctcccgctgagctccagctgtgccagaggcacccgagccctgagagtccgccgccaacgcgcaggtgctagcggccccttcgccctgcaggtaggagccgcgccgagacccggatcaccgggcgcccgtgggagccgggtttccactgccctcgccctccgtccctcctccgcccaacctgggcagctggccgctccccgcccaacttggacgggatttcagcgagtgagtcggcggcggactccctagcgatccccaagggcctccctcgcacgccttcgggtggaattcctgcagggtgaaagctgacaactctggcacgcacttttgccgcgcgggcggctgcctggagcgcagagccgcgcaggctcaggctgaagcccaggcgtcctctgcaggatgcaccgcctcgccgccacagggcttcgggtgcagtgtgtgtggtgtccccaggtcatccgggcgcccttggttcgggtgcgcggtggcatgactgggctggtgggggcgatgggaccggcatcccgtaccaaccagg

SEQ ID NO: 9767 - DNA, 6000 bp, Homo sapiens
ctctcgaagtgctgggattacaggcatgagccaccgcacccggctgcttccaaattaatttttgattatgatcaaaagattccaaagaatcgcttaagcataggagttcaagaggctgcagtgggccaagatcacaccactgcactccagcctggggacagagcaataccctgtctctaaaaaaacaagaagattcctacagagcatgaagtcaagcaagcataacaaattggagaagctcaataacagcaaagtggggccagccatccatatacattcatttgctatgaggatgtctcagccatagggaccagacacacgagtcttccaacagggtactctgttctctgaacagtcctggataaactgcctctctgattcccattttcaataaaaataataatagctaacagtcattgaacaccaagtactatgttaagcatttataagaattatttcagtttactttcatgttagagccatataaaggatactattggctgggcacagtggctcatgtctgtaatcccagcacttcgggaggccgaggcgggcagatcacttgaggtcaggaattggagaccagcctggccaacatggtgaaaccccgtctctactaaaaatacaaaaattagccaggtgtggtggtgggcgcctgtaatcccagctactcggaaggctgaggcaggagaatcgcttgaacccaggaggtggagtttgcagtgagctgagattgcaccactgcactccagcctggacaacagaacgagattccatgtaaaaaaaaaaaaaaaaaagacactattattactattcccattttctacatgggaaaattgaggaaagtggtaagaaactttctcaaggtcacatagtcagtggaagagccagaatttggacccaggcctctatcgctccagagccagagctcttaaaccactgtgttcaactgcctcccagttttcaagaggcccactcaccttcagtcgtgacattccattgttagctatatccatatgaccattaggctataattcacaatgtagtcattttaccagttttaagagttccagatgcctccctactcccatctgtgtggtgtcacaaagcacccttactttaccacttccttgctgcatgacagtagtggacactgtcagtgttctgaccagatgccctgggagtctttttaccgatttttatttttatatccctgggttttggtgtgtgtttgcttctaatggtgtacatctgtgactcttcaggctgaaactaccttcagggaaactttgcttcttccctttctctgttccctctagctcttaccaattctcctgggagcacattcttgacaagtaacttggacatgaatcctcatctcaggatttgcttctggggaactcaatctaagacaatgagtgcaggggttgccaaatgcagcttgccacctattttgttagataaagttatattgaaacatggctattctcattcactttttttttttttttttttttttttgagatggagtttcaccctgtcacccaggctggagtgcagtggtgaaatcttggctcactgcaacctccgcctccctggttcaagcaattaattctcttgcctcagcctctggagtagctgggattacaggtgcctgccaccacacctggctgatttttatgtttttagtagagacggggtttcaccatgctggccaggctgctctcgaactcctgacctcaggtgacccgcccgcctcggcctcccaaagtggtgggattacaggcgtgagccaccctgcccggccatcattcacttttgtattgtctgtagctgcttttccactacaatagcggaaccaagtcattgtaaaagagactgtgtagcctgcaaagcctaaaaaatttacttgtttggccattttcaaacaaagtttacagacccctaacctggagtaagtctcttagtacttttgacttgtcttcaggggttgtcataaggattaagtaagttagaaagggcccagcacattctctggctcttatcaggcactcaacttaagtctgttgaggtggaatgtaacgtagagtatttcccaagttgtgggtcctgttcttacatcttggggattctagaaattccccttttgatttttagacttcttgcccctcctatccagaaaaggatagttcccagttaagcagattttttttaaagcatcagtttggtgaaaaaccagtcaagcagattttaaggcagtgttactctgccaatcaccagcataagaatctgctgtgaagcttgttgaacatacagattcctgagacccacattagaccatccctggaattagaatctcacagtgcagtctagttccccaggtaattttgatacacactaaagcttgagaaaacagatctaaggtaaatctataaataagtgcaatggtttaaaatcacagattcaagaaagtgtttacttgtggggagaaggggttttaggaggaccacacagagaaccttgaatatacttttcattttgccaggcattgttctaggtatccttcatgctcatttaatcaacttaaagcccaattaataaatatgcttatgtttttaaggttgagaaaatggaagcacagaaattcaagtattttgtccaggattacacagccagtataagccgagccaagattccaacataattcactgcctctggagtccaaggtggttttttgtttgtttgttttttgttttgctttgttttgagacagggtctcattctgtcgcctaggctggagcccattggagccatcacagctcactgcagcctggatctcctggctcaaacgatcctcctgcctcagcctcttgagtaactcggactatgggcacaggccaccatgcccagctaagttttaattttttttttttttgagacagggtcttactctgtcacccaggctggagtggagtggtgcaatctcagctcactgcaacctccacctcctgggctcaagtgattctcctgcctcagcctcccaagtacctgggattacaggcacgtgccaccacacctggctgatttttgtatttttagtagagacggggtttcaccatgttggccaggcttgtcttgaactcctgacctcaaatgatccacccgccttggtctcccaaagtgttgtgattacaagcataagccactgctctggcctaaattttttgtagagatgggatctcactatgttgcccaggctggtcttgagctcctgcgatcaagtgatccttccaccttggcctcccaaagtgctgggattatgagcatgaatcatgaggccagcccagagtccaagttcttttctttttttttttttttttttgagacagagttttgctcttcttgcacaggctggagtgcaatggcatgatcttggctcaccacaacctccgcctccctggttcaagcgattttcctgcctcagcctcccaagtagttgggattataggcatgcgccaccacacccgactaattttttgtatttttagtagagatggggtttctccatgttggtcaggctgatctcgaactcccgacctcaggtgatccgcccgccttggcctcccaaagtgctgggattaatggcgtgagccaccgcgcccagccaagttattaaccactaaattatacttttttttctatccctagtaatgttctatttctcaaactgagtggaatagacacacacattagatttgttatttataccttacatatatattacatataccttttttatttattaaagacttcacttaaacatacaaaggcttttacaaagagcaaagtaaaaacgacaattggaagaaaatctgttgctcattcaaactttactagcgcctccaaggctgacactaggagagaacctcaagaggtcagccgaacaccccagagccctacctttcctccagcacgtctccctttggggaatcgtatcaccctgggcggcaatctcccctccacccctagagggtgctgttctcactctctaaggcataggaccaagtttcagacaggactctctctaggtgactctggctcccagtgcccaggggcaaaaagaaaagcgctgggcattattctcgaggtgcctgcgcgtgccgcctccgatgtgaactcgcagtaccatttctagaactgaatctaaagctcagaacgggttcatgacttgtcctaagttttacaagtcaattagcgctaggacttgatctcggtcctctgagcaatccggtccccaaggctgcctgcctcccgagggtccggacagggtcttgggtacccccaacgctcaaactctgagggactgtctttctccagagggccccgggaccaacaatctcttactcctgttagccttgactaaatacagccgggactctgaaggagctggatctcgcgtcccaacgcaggcgtcctccaagagggatagacaggcgggaggaaagcggaccaggccaagcccatgcggcgccggtcctgccagctctacctggcggggccgcgccgggattacccacctagcacaaggatacggtcctcgggccgcagctccggctctaggagggcacggaaggaggagaagtccccgaaccaatcgtagggggcagaatcggctgcgccttggtagcgctgatcccagtactcgacttcgcggtacccgcagttccgctccggtaactccggaggcgccctacctgcccctggagaggccatgctctcaaccgccgggcagccagagccgccggcccttcagccaatacggaaggcaggatgcagaaggcggggcgctggtgtctccgcccaccacctgcagttgctcaacacaaacacgtggaacttccgtcctttactaagcgctcttcgaagaatcctccggctgggaaaactatcgtccagaccctgaatcctccggctgtactgccaagtcatttcctagggccgcactcaaggtgtcagactcacgtgggctcatcactgcgtcctctcatattttcaatatgaatgacttttatcaggaaatctgaaaattagtgaaaggttcatttttctcagcatccggaaggctcgaagggcaggcaggaggggcgcgaacaggggctttgccctcctggagagacagcatgaacacagatgttcccagcgcaggcgaaggagaatgctggcttcagcggttgtgggggaggtaggcaggaatgttgcttttctggacattcgttctaaattagcgcctgtgtacccagggctgggtataaactgaggagtaagacattgtccctgctcctatggagcgtggagtgcatcagaggagacaaatgcagaaaaattacattttagtggagtaaatgaagactggctactcggatcggcgcttagcctggtgggacgccaggcacgggaagcggaacctaagtgtcgaaggttcgggtttccgggggtggtgggcccacacaagcggcgcaccgttaagatggcggctgggctgcggaaacgcggccggtccggttccgcggcccaggcagagggactctgcaagcaatggctgcagcgcgcctggcaagagcggcgcctgctgctgcgggagccgcgctacacgctgctggtggccgcctgcctctgcctggcggaggtgggcatcaccttctgggtcattcacagggtggcatgtgagtgcgccgagggggaggggaggggagggagggagacctgaacccgcgacccaaactggatctcagacctggaactccaaaccagactctgtatccactcactcgtcaattgcgaacccatccatatcccttacctgagcgccaagcctgctctacagaaaaccggatcttaatctgcccgcatggcagaggtggataccctagagattggccttctgcactgaacttacagcctgcaaaccagcttagaagtcagatttgagccaaaattgtt

SEQ ID NO: 9768 - DNA, 6000 bp, Homo sapiens
ctcccaaagtgctgggattacaggcgtgagccaccgtgcccggcccatctctgtgtgactttttaagaaaagcagattcaaccacaatcgtctctgagtttctttccagctttcacattataaaattctatcaccatcatgttggaataaagcactctgccattaattgaattttcatctagtgttatttccagtttcggagatatctgtcactgggtttctgagtccatttgttctcatatctatttctattttctattggtttgttataacttctgtaagacaagttctttctttttattcaattcagcccaagcctgggcttgaatttatgctaagaggttttctctttctatcttattccccttagaacctcaactataatttagttttctctatttatggttagttttattgttaaggggtcattttcatagagagataacataatctaatttctgttttgctgcagtatcatctctgttttcatgttcaaaatattgatgtttaaaaacatcatcaggaaaacatatcagtttgaattaagttgcaaactctttttgaaatgcaacaacttgaggggatttggaaaccgaacatggtggagtcctttataaaatgcaggagagaaatgaaacaaatagctctttttcaaaaagttgttgtttaagaaataattcactcgtgtgttagcaccttctttgtgaagttcaaataaatgaatgaaacaaagttttcttaattatttaatctagaaacccagaaagagctttgtctttccacataccccgtatgattcacttaacatttgctagtttggaggaagactccagaagggctggattttggttctgcctctccaacctacaggccactatgacattaggctcctcatttcacctctaacctgcctccaccctgttaactcagttgtgaaatggaaagcattgtaaacactttcctgtaaagcattatgctaatggatgtgctataatgacggaggttgccattttatagaaaactagaaaattcagtgacttctatagagataggcttgaaaagtagtgtcagagacttggatcttagtgttgaaacagggtattctgccatgcttggtaaagctctggtgggccctggcagtgctgaagcagctagctgtagccaactcacttactcagggtgttaagcaggcctaaaactgttagcctactgcatcaagacaccagagtatgtaattcatcaacacctgtgaaacaatgaggaaattaaaagtgctgtgatagtactcggctccatttttctttctctgtttcattatctaacaaatactctcccatagtatggcgaatcaaatctctgaactatttttcccttgatctaaaaataaaatccacttatgggcattaattaatatttattattagcatttactttctctctatagtctcaaagccctttatcaacatttcattatcaatctggacagtcactgtgtcacccatatttttagaaaattactgtgaaccagatggcaaactgtgaactgaacagtctcgaaaatgaacaaaaaaaaatgagctctgcttcagcgagatagcaggtgacaactaaaagtcagactcgagctgattcttgtactgaacctctcctggttaacaacagcaacggtcatagcaatacacaaaccaaaccaaaacaaaacactttcattttttcctcatcattagtaactgaaatcacctaattatcgacatggtcttttggggatcatgtatcacctgcttaatttttcttgtgggtactcctctctgatttaaaatttggtacttataaacaaggtatttagactactggatctactataatatcttagaaacttgggttttgtttaaattactatataattaaaagctttaaatcttatgctaatattgcttttaatttttactcagactggcactctcactgaagatgggctggacctctgggggactgtccctactgctgacaactggtaggcctcttatgtgaaaatggaaggtgtgtttggtggagttacctggatgatactcaaatccatcttttgggtgttaagggatgaatgtcacataaaatatatacaatagttggctggaactagttcctaattattctaacttgcttaaatgaattctaatttcagaatgagaaaggaaaagtaggtcttcaaaatctccatgaaaaatggagtaggatgaggtggataattaaggaactaaatgaataaaacagagaaaaaagagtgaaatgaagaccatgcttaattaaaaactacaaaacttcctgggtggctagcgcaggcaggtggtgtttcacagtctagcgggataaaaaggtgcaaatacacccacctttgatgtacaacacaggccatgaaaattgttactattaaggcagaaatgtcagaatggagaagaagaaatggagattatttgatataacacaaagtcctgacttttatataattacatggtgggtaaagacaaattaattttgaaatttagtgaatcaaagaaagccacctgaaggagatggcacttcagataggttttgagggacgtgcggctagaatttttacagctgtgggctaaaagctggcactagggagaggagaggacaatcacatagatgtctactccagaaagagctacagaagggaaagagggcccctggagggtgaatctcctcatggtatctccctgtggcttctagctccttccctatgggctaagacttgccttctcaatttgagcggcgatggcctctgctcttaagctctaagtaccctattttggtgccaacagtggctgaggctgctgtcagtgacagaagacactttgcaggggactcccaagatgacgaaggggccaggtaaagcatggcacaaggtaacagcagacaagcagtgtgatgttgcagaagataccctggactgggtgacaaggaacacctgagctttaaccctactgatgtgtctctgctcctggtgctcagatgtcccggccagccctttgcccagacaggcaaggaatctattggccagagcagtgaaagggaaaaaagatgtccacagtttccacccctccatcttcctcccttgtctctggtactctgaaggttttcggagactagaaacaactagacacaatcactattcagctgtaaggtgggaagagaggaagatacaagataccagtttgtattatcaaagagaaaaacaggctttagaggtgggatgtccagggtgcttcaagaagtaggggcaaactctaaagggctgagacgtgaaaaatgcttctgcatccatgcagccttctttcctatccctaatttcctgctccctaagtagccctagagacttcttgcctaggctgtgtggctttctgcagacagctctacagagtttgcaggtatgactcccagctgcctgttcagtgccttcccacaatgctgccattatgtgggctggcttcaagtaatatgaaaaaagtccctgcaattctatccaaagcctctgaaactatgttattgattggccagtggaaaattctgttgagaacaaaattcatatccaactcaaagaaatgtttatataaagataactctgtaggcaaaacaccctgtttaaaaaataaagaaaccaagtgggcaggggcttaagagcagagaagtctctggacaagcatagcaatagcaagaagtttaatgtggatctagagtacagggcatagaggacattagtaggagtggacactgtaaggtaaggtagatccgaagtggacaagactttgaataccaggctaaggggtttggactttatcatttggagcatagggagccatgggaaggttctgagcatgaacgttaggtgtttggagctccactttagtaagatttaagggacagaatgtgcaaaatgattttatcaaagactttaacattaccttctctaccagcttccaggaagcccacagctttgcctcaggccaggctgtgccatggagcccactgtgtgcggccatggccagctgccactctctgatccttctcaatgggaccatccagggagaccctctggacctcaaaatgtttgagggcactgcctgggtaaggtgatagtttaatggaaagatgagaatctgaggaaatctttactgggagtgctgaagcttttctaatttttgttaaaacacagagaaggttcataataatgtatgtataagcgtgtaacactaccagaacttcccaacctgtgcccccaaagaattctgttaatggttgctgcatgaaataggcgtccattattgaacaaacttgggaactgttgtttaaacaaagttaaactcatttcttgactgcctgatttctttaatatactgtggtgttttgtgaatattcaagagggaatatgacatgcagcatttaccgaacctatctgacctcaaaaaccttactgacacccataacccagcatgttctccaaaacatcagtgttttccaaaacactatcagagaaacagtagtcaaaagcagtgttctctggtagagcagccacgagccatatgtggctactcagtccttgaaatgtggctctgcaactgagaaactgaatttttaatctgatttaattttaaatagtttaaatttaaatagctacaagtggctggtggcgactgtgtattgtaaagcataagtctagacaccaaactggaggactgcattccaactggttcaatctcctgagctgagtgtgaatgaaaacggaagggtataaacccaccctgaaggctgccatagtggaaaaccctctgcatttcaccactctccagctgtgtgatcacaaagccagagccaggactgagtctgtgacctcatctgtacgtttggggtaataatgcctcattcacggacttatgaccactgagactatgaatctaaaggggctttgagcacaatgaagagccaaacaagtagagggtgttcactaattaactggttagttaattacaccctgttgcctccgaagaacatcctaaagctgtgtccaatgatgtataaaatacagtacagcagttaaacatagctgcaaaagaatgggaacaaatgattgcagggaaacaaagcacacctaacaaagaagctaatacaaagacatataatagggaaattttagctttctagagggcaaatcaatgaaagaggaaacctggtaaaaagggaaacttctgataccagcaagttaaaatagagcatttgctgtggaaaaacatttgacatagtgaccaattctctggatctcaatggagaggaatcggtgtatttactataagcagtgtccttaacagaatcattgggataaacacggtgatgagttgtgcagggtcattttatatctggctttggtcctggccctaactacatccccctctccattataggagggctgatctgtctttacaaataacatacttggttgggaatataaatctttagtattagctctgtaagaaccatctgttaagaatagttgtatccatcccaaacaaagcataaaaatgcatgatttttcactgagtttagagctgtgtcagaagctgtcttgagtatcttttggtaactgggaaccttccactccacatacagaggagggaaactgtccttttagactgtcaagaattttagcatttgatgggatgtcagaatatttttcagaagaaattgagatctacagaaataaagtggtgtccccaagattaaacaggtaagtggcagagtggaaaccagatactatctcctgttttctgacctctactatttatatatatgactgtctttcccatattttaatattggttaatattggcttctcagaggtattaacttctgttgtaatatccaaagaatacacgtcattttcaaacaggctttctaatttgctagcagctgacataccaactccct

SEQ ID NO: 9769 - DNA, 6000 bp, Homo sapiens
gtttgagaccagtctgggggcaacatagcgagaccccatctctaaacaaacagacaaacaaaaaaactaaaaaaattcatgcaaatatatatatatgtagtgtttctttctttttgagacagggtctcgctctgtcaccgaggctggagtgcagtggcgtgatctcggctcactgcagcctctgtctcctggtgccttagcctcctgaatagctgtgattacaggcatgtgccaccaggcctggctaattttttttttttttttttttttttttttttttagcagagatggggttttgccatgtttgccaggctggtctcaaactcctggcctcaagcgatcggacccccttggcctcgcaaagtgctgggattacaggcatgagccaccgtatccagccaacactatacattttgtatgtaaattagacctcaataaaatcgatttaaaaagaagaaagctgctaactttaatgtcttctacataaccagtttaccatgctccctgacctactcccatctctgtaaattgtgctataagaatggataaaatgattacatctaaatatgatttatctaggcagataaaccctagctcttgttaatttacttactatagctttatttttcccataaaaatcaggtgtttaaaaattctaaacataatcccttttctctttatgatctggaaattttgagagtacttttctttttctttttttgagatagagtcacactcagtcatccaggccagagtacagtggcgcaatcttggcttactgcagccttgacctccgggctcaagtgctcctcccatctcagcctcctgagtagctgggactacaggcacaggccaccatacccagcttattttttatatttttatttttagtagagatgaggtcttgctatgttgtccaggctgctctcgagttcctggcctcaagcagtcctcccacttcggcttcccaaagtgctggtattacaggcatgagccactgtgcctggccaaggatacttctcatttgactaaatactcccttcccttccaccggagggtttataccattttccttatctttagcaaagttggtaagaccaacgagtatcatcattttgcaaatgagtaaatggaccttaaaatactaaaggaacaaaaagcaaaaaacacaattcatttaaaataatagaataagccagtgatagaggggaaaaatccagtacaataagcagattaattaagtaaaagatctagtattttctctttcaatctattgtaattagtttattcttggcagtattgtgcagtgatcttttagctgcctctgtatctccgtctggaatgaggttcgggccatgctgcgcatgtttatgttccaagtttatgttttatctttaaaactctgactttatttggctacgtgcctgttactgggtatagcctatatttttagtttattcccaaatgcccacaatattagaattaccacttcttgtgtgtgcatccacagcatatcttatctgttattatgctgagagtggggtagattaaagcaaagcaaaattctagactgaaaacagtgtcaattgagtgcttgagccatgttttttcgttctcttatggtagagaagtttaggatgagcattatttctcagaagagttatttctttatctaggagaagaaataccacttgcaggagagggttgacaaagtaaagaagaaagtgaaagatgtggaggaaaagtcaaaagaatttgttcagaaggtggaggaaaaaagcattgacctcattcagaagtgggaggagaagtcccgagaattcattggaagttttctggaaatgtttggtccggaaggagcactggtatgttctttcccactggacaatgtagggagttccatgttgtggaaagaatgacagaatcattgagcaggaaggggcatcgacactgagaagttatctagtctatccccttatctgggcagaactatctttcaactgtccccagcaaggtttttgaaacctttacagaaagacgttacacattctcctagataattttgccagctctctctcaaccttaaagtctggtgacaagataagcaagtcgccttgcccagcttttatctgtggtatgattttagatagaaggaaaggaaagaataaagaacaataaaaagaaagcagcctccactacaagtagctgcagcaggaaccccaggtaaggtgggaattctgtctttgaggagtagcagtcttttcaaccaaataaaagattgagcaagtgagtcctaggttagatatcaggaaggatctgtctgtgaaggtgtttggataaattagaataatcctagactagattattgaggaagaatggggaatttcccgggtgatgacagcaggggagaacccttaaataaatagtacagcatagactatcccagtcctagatgcttcagtgatgattaagtaggatccacggtgtttttctgactcttcctttcggtttctgcagaaacatatgctgaaagaggggaagggccggatgctgcaggccatcagcccgaagcagagccccagcagcagccctactcgcgagcgctccccctccccctctttccgatggcccttctccggcaagacttccccaccttgctccccagcaaatctctccaggcacaaggctgcagcctatgatatcagtgaggatgaagaagactaatgtttcctccctcctttcctgtcctccctttctgtcccattaccttcagaagctctctgttgaattccaaattgtgaccccaacactaaacctaaggacagctacaaaggaaagacaactggggaaagaagacctaggactgggggaacccaaacagcctgtcctgcaagtgacatcactcacccacacgaaggagggggactgcaccttagaagcctgctctgcatccatttacccccccccaagggctttgtttcactgtttatgttcacgtgatctcaacagggaaattgtcattttcattaattttttaaaaaattcgtctttcaaatgtagaactaattttttgcccctgaggagtgggcagaagaaggaggtagtgtaatacgcagaggccttttcttcccggtatactatagcatttgccttccgttctgaagctatgtggcttgccaagtccttcacgaaatgagccacgctgatgggtaatttgtggagaaatatcttaattttgatttccttaaggaaaagcgaaaagcagagttacagtcacaaatcccctgaacgtactgctgtcaccagtgtcattgtggctgcgggaaggagatctgaacctaacttttcttactccctgaggagtttcttgttggacccaatggggtccatgaagacactgatggggatggaagcagacccatggcatcaactgcagtgtttctgctgtgttcatcttctcagaaaactctgtgacccagttctttgggagcttttgtcagtctctttcgtgccatctaccttcgaaggaaggaacacttttagagttacaatgatgaggagaggagcgggacaatactcaatcctataccaagtcgattgagattagtttcctactgggagtaagtgcctggccctgctactcctatttgaatgctattaatattacctagccttttacaaaggatactttgtaaatgtctgctgttggaacttgatgttaatccattttggtcatagccatattagagagatttgcacagaatgtaaaggcaaaagcataggaaacaccttcctttctaaagcaacagccttatcaccttgacctctgtccctcttcagaacattcttccctggaaccagtgctccacatctttcttttcctctgagagctgcagctggcagggacctccctctgctgctcctccagcaagccacagagcataccctcacgtgacaagagtgtggtaggttttctccccacttttcacacacgcctggtggttgtggttccatctgccttgttggcttgcccggggggattcaacacttgactttcaaatcaaagaatgctaatgcttagcacttgctgttgagcatgctctaacttttaaagccctggcctcctgtctccttagctgcttagctacgcggcctagcagatcatcacccatcagtaatcctgtggctagatccaggggaaaattgcttatgtccaggccccacccctgtcactcataaataccccttgtgggggtggaattttagtgttttcagctaagaaaaccacattttctctttccttgcctctgctaggactgtgagcatctcatagtccactccctaaacactttctggtaacacctagttttccgcctgagggtcagaggctagaatcattgcctgcacagcaggactaccttggttcttaaaacttggatcacccaggcaaggcgtggtggctcacgcctgtcatctcagcactttgggagactgaggctggtggatcacttgaggccacgagtttgagaccagcctgaccaacgtggtgaaaccccatctctactaaaaatacaaaaattagccaggcgtggtggtgggcacctgtaatcccagctacttgggaggctgaggcaggagaatcccttgaacccaggaggcggaggttgcagtgagcagagatggtgccgctgcagtccagcctgggtgacagagcgagactctgtctccaaaacaaaacaaaaaccacacacacatacagaaataaagagaaataatcaactagaaaaaaaacaaaacttggatcacccagaaagagcgtcacagaggcgagggagaatgaagcctcttgttatcctgatcgcctatgacaacgacatttctaactcttctttgaagcgcagttcttactcttaaatctggtcatacaagctttggcttggaatcctgtctgtctttgaaacagctgaagttagtgttttcctgtgttacccagtgttacatagtctcatctttgaacttttctgcgtcagccttctctctttgggaatgctgcctgtttctgtctaacttattctccctggtgtggtgtggcagtgaagtctgtgctgaagcccatctgcttggttcctccaagtgcacattatgcaagtgtatttggatagacagggagatgcccggaacgtggttttcctcctccctccctattggagccatacctcctaaatatattgtctgggtcccaaatgtttgagccctcttcctctgctctcagtgggctgctcttggcatgccctgtgcttggaacgggacctgcaggctgacaggcctctgagactgctagggccagcaaacgtacatgttattgggaaactccctttccccttttggtgagcttctaccacctcagtctaatcgttttgactgaaagctatttgtctgactgaaagctaaaatcttttatagtgtggcctgttagatactttggggtaaatgtggtctgaggtgctggactagcacgggtagatggagaaagctgttgggaagttgcataatgtggtcatctgtgcctaattaaatgaggttagaggtgtgcacaccaccacaatgcctgggatctaaatcttcagatattaacgtttgaggctatggagctgtttccctgaatcacacacgagaaagcagtcaacatgggtgggccaaatgtggccaagatgagagagccagaagtgttggccttagagcagagcctctgtgtgtgagacattagaaggccagagccggggaggtgccggcgcagccactgccttccggtgggccggacggaaagcttggtcttatgctagattcagaagcactgaagaatggaggttgacactttagaggactaggaagggatcatttgtgctcttgcagctattgctgatagctagagccaaagaccattatattgctgaggcttgggtaagaaagttagggatgtgaggaggttgaaaatcctga

SEQ ID NO: 9770 - DNA, 6000 bp, Homo sapiens
aagtgctgggattacaggtgtgggtcactggcacctggccgtctcccaaatctttcagcctcaggaagccttttgtggcatgactggttttctcagcccaggccctgttcgtcatttatgtcctcagactcccatttgctcctccctaggagcatcaccgacaaagtaacagcaagtagctccatctccagtagagccacactccgcggttattaacacgtctcaaagaggtgaagcttcagtgctttcatggcagcgaccgtgcctctgttgccctaggaggctcgccacatggaaatgaagagatagtcccaacgctagccttacgagacccgtttatctcaagtacatgatttcttaaagaagtgtcttgttcagccgggcgcggcggctcacgcctgtaatcccagcactttgggaggccgaggcgggcggatcacgaggtcaggagatcgagaacatcctggccaacacggtgaaaccccgtctttactaaaaatacaaaaattagccggttgtggtggcgggcgctgtagtcccagctactcgggaggctgaggcaggagaatggcgtgaacccgggaggtggagcttgcagtgagccgagatcgcgccactgcactccagcctgggcgacagagcgagactccgtctcaaaaaaaaaaaaaaaagaaagaagtgtcttgtccataagataatcattgaattaatcatcacaagtttacccgaaggagcaaaaacccacagctgccatcaccagccccacactaagtttgacactttaagggattaaaaacaaattccagcactttcctttgtcccacaagcaacattttaatgatatctacataagccattgggttggacatggagatatcatctaaaaatctgagtgctaggccaggcgtggtggctcacgcctgtaatcctagcactttgggaggccgaggaaggcggaacacaaggtcaggagttcgagagcagcctggccaacatagtgaaaccctgtctctactaaaaattagaaaattaaaaaattaaattagctgggtgtggcagtgtgagcctgtaatcccagctactggggaggctgaggcaggagaatcgagtgaatccaggaggcagaggtttcagtgagccaagactgtgccattgcactccagcccgggtgacagtacgagaccccatatcgagagaaaaaaaaaatctgagtgatatacggcaatcagccattcagttattctgattgcctaaatatgagatgttctaacagacactgcatgcgaaatctcttttgctggccaggtgcagtggatcacgcctgtaatcccagcactttggtaggccaaggcgggtggatcacttgaggtcaggagttcgagaccagcctggccaacatggcaaaaccccgtctctactaaaaatacaaaaattagccaggcatggtggtgggcacctgtaatcccagctactcaggaggctgaggcaggagaatcgcttagaacctgggggtggaggttgcagtgagccaagattgcgccactgcactccagcctgggcaatagagcaagattccgtctcaaaaaaaaaaaaaaaaaaaaaaaaacagaaattcttatatagaaagcagctcataaacagtttagaagacttaaactgtgcttgctttgacaacacatatactaaaattgggacgatgcagattagtttaacgtggttcccgtgcaaggatgacacgaaaattaatgaagagttccaattttatttttaaaaatggaactgtgatagccagtcataacgatcccttctcatgtatgtgcatcaggggtttcctcagtaatcgtttgttttcatcactggaagtaaaatctctgtgcagagactgtgttgcatgaattatgcattgcacgaattaattcattcatcaagtcattcttgagcttctaccatgttccaagctctgtgtgaggctcagaatatacagagcagagtaagagttagtccctgcctgcaaggacctcacagcggtggagtaagaagtgagtcacactccagtgggaagtgggcaaagatttcctaagcagacacaaaaatattgaccataaaagaagatgcataaatggagcttaattaaaatcagtactttctcttcaagtaagcccaggcggggtggctcacgcctgtaatcccagcactttgggaagccgaggagggtggatcacgaggtcaggaaattgagaccatcctggccaacatggtgaaaccctgtctctactaaaaatacgaaaattagctgagcgtggcagcccatgcctgtaatcccagctattcggcaggctaaggcaggagaatctcttgaacccgggagatggcggttgcagtgagccaagatcgtcgtggcactgcactctagcctggcaacagagctagactctgtctcaaaaaataaaataaaataaaataaaataaaataaaataaaataaaataaaataaaataaaataaaataaaataaaataagacataataaagagagtaaaaagtcaaaccacaaactgggggaaaacattcacaataaatttacctgataaaggtctcatacctggaattataatgaaccagaaaacagaaaaaaagataacccataacaaatgggcaaaaaccatggacgggaacttctcaaagaggatcttcaaatggctaatacgtatatgaaaaggtgcttactcatcaaggagatgcaaattcaaacacaaggagattacactaaacacccaccacaatgcctaaaattaaaaatgtttgtgagaatgtgtagaaactggaactgtcacacactgctggtgggtgtgtaaattaggactactttgggaatctgtttggcaatatctgccaaaattaaatattcacctgccctatgatagcaatcctactcctaagaatattccctggaaaaattagtgcatagttccttcaaaagacatgcagaagaatattcatagcagcattatttataacaggcaaaagttgaaaatataaatgtccattaagagtagaaaaagttgtaatatccaatgtaataatactcagcaataaaagaaaaataaattacatgatggatgaatcttacatatagaatattgagtgaagaaagccacacacaaaagccatactgggctgggcgcggtggcgcacgcttgtaatccagcactttgggaggccgaggcaggaggatcacttgagcctaggagttcgagaccagactgggctacatggtgagaccccatctgtacacgaaattaaaaaatcagctggcgtggtggcgcttgcctgtggtcccagctactcaggaggctgaagtgtgaggatcacttgagcctatgaaggcaaaaggctgcagtgagtcatgattgtgccactgcactcccgcctggatgacacagcaaaaccgccttttttttttttttttttaaagaaaactgtttgattccatttatgtgaaattcaagaacaactaaaacctaatcaattattataagagccaaaatgaaagttaacactggggacaagggatacgaatgacaggcgacacaatgaaacctctggggatttggaatgtcctgtatcttgatttctgtgctggttcaccagggtatacatgtaaaaattcatcagactttaacattaagatttgtgcactttaggctgggcgtgctggctcacacctgtaatcccagcactttgggaggcggaggcgggtggatcgcctgaggtcgggagtttgagaccagcctgaccaacatggagaaaccgtgtttctactaaaaatacaaaattagccaggcgtggtggcacgtgcctgtaatcccagctacttgggaggctgaggcaggagaattgcttgaagccaggaggcagaggttgcagtgagctgagattgtgccactgcactccagcctgggaacaagagtgaaactccgtctcaaaaaaaaaaaaaagaaaagaaaagatttgtgcactttactgtatataatatctagatgtttaaaatgcaatgggagcatagagaaagaagtacctaactcggagtaaagaaatcctggcagacttcactgggaatgtttgaactgaatcttgaataggagcttgtccatagagggtcacggatctcccacacagagagcaccacaaaatcctcagcaatttggtgagagtatggtacaagatgatagtggcctggggcttgaacaagaggctgagtgcggtggctcacacctgtaatctcagcactttgggaggctgaggcgaacacctgaggtcagcagttcgagaccagcctggccaaaatggcaaaaccccgtctctattaaaaatacaaacattagccgggcatggtggcaggtgcctgtaatcccagctactcaggaggctgaggtgggaggattgcttgagtgtgggaggcggaggttgcagtgagccgagatcatgccactgcactccagcctgggtgacagagtgagaccctgtctcaaaaaaaaaaaaaaaaaaaagttagacgtctagtacaggaaccatgcaacacatcgagtcagccaagggcaaggtaaggagagtgatgaggaaaaaggggtggctgccctgctcggtgctgttctgtcaaagagccgaaattcttcgcggggtggcagatgaggacaggaacagctggggtgtggcaagtgttgctgcctggggagagcggagggtgaggtgtttctcacgggtgcatccagtgactcatcaggacagcggagctcatgaggccatgtctcccgtttcctgccttagaatcacatgaaaatgagcagagggtgggtcatcaggacagggctctccggggagcggaagcgccttcaatgcaggcctgtgggcaggggcgtgggggcgcgcacacacacacgcctgggtgacctctacgtatatacagagcctccctggccctcctggaaagagtcctggaaagacaaccttcaggtccagccctggagctggaggagtggagccccactctgaagacgcagcctttctccaggttctgtctctcccattctgattcttgacaccagatgcaggtaagcagagatgaaagggtgaggtgacggccagggaacagcctagcctcacagatgagagtgcacgcttccactccagtgagcctggctctgcagcttggcgtctgtgtgactttgcgccattcacttaccttctcctgttgcctcagtctgtcaacttctggcctttgcacctagaatactcttcctgcctagtatctcatcgtccatcaagtttgggcatgggcagcccttcctccgggaagcttcgttttgcttctgccagataggattaggttcctccatgtgcttccatgacaccttaagttggatgcccctgcctggtacttactgttaccagctgtgaatccagcgagtctgcagcaaactcaatccttgccttctcgggggagagattcggctgaggggcagaagtgggtttaaggcagagggagaggctgaagcaagtttgagagcaggagtgaaggtttattaaaaagtttttgagcagcaatgaaaggaagtaaagtacacttggaaaagggccaagtgcgtgacttgagacacccaaatgtgctgttagacccttgacttggcgcctgcctgccgcacaggcacttgggaggggccgcatgcgcagtgtgtttactgaagtcgtgcgcatgctcacttgaggcgtttttcccttacccgcggagcagcactagaggaaggtcacacacaccagctaaactccaccattttgcttcttagtgtagatgcttgagcccactcgcccaattcctgagctcttaccaggaagctgctgatcaccaagttcaggtattttctatctattgggagactgtctttcccaacgctggctgtgaccaatattattttagaaagacagtgtaacaaccgcctggcca

SEQ ID NO: 9771 - DNA, 6000 bp, Homo sapiens
gaaaaagaatcatccataagagataagctaagccttaaaggataaaaagtattgtgttactgttaaccactggacagaggatgaccaaatgagtgagggtgtgtcgggcaagggaggaatggcaagaagtctactctgagctaggtaggaatctttcggggacgtgttaaactgtctcattctccttttatctttctccaccttcccctttctgctactctctcaacttcttagttcttttttgttgtaatgtcatcatttttctcaggtctcctgtatatttcagccaacagacatattgtaagttccaggtttgtattgattttagcacatgggaaaccagagtttatattaaagaagaaatctgattgatcctgattctctcatctctggattcattactctagcaagggatatggagtattttcattagctaattggtagacatttgggcttacctgtacctccattttgtggtatacttatttttctgtattctacttagtcaataccctttttatatttttatatttcttaataaatgactttaaattctttccagaataaagaacaataaagagaaagaaagaaagagagaaaaagaaaaaggaagaaagaattttggaacttcacgaattgtgatcattactattgtattagttagcagttgcctcataacaataaccaccaatactcaacagcttaaaacaataaacatttattatttcaatgtcctcataattcaggaatccagacatggcttagatgggtacttctggctcaggacctctcatgaggttgcagcaaggttttgaccagggctatggtttcatctaaagtttcagccaaagcacaaatcattcctaggccattcgtgtggctgttggcaggatatagttccatacaggctgttgaactaagggcttctgttcttcacaggccagaggtcattcctaactccataccacgtagatatctccatggggccattcacaacatggcagctggcttccttcagaatgtgtgagccagggagcaagagagagcacccaagttggaagccacagtccttttgtaacctaatattggaagtgatatcccatcacttttgttgtattctataggaacaaatcattaagtttagctcacaactcaaaggaagaggattatacaagatacaaattccatgaggcaatgatcattaaggacctgcaacaacttttcaaaagctgaggcaggagaatttcttgaactcaggaggcggaggttgcagtaagctgagattgtgccactgcactccagcctgggcaacatagcgagactccatctcaacaacaaaacaaaaacacaaacaaacaaacaagcaaaaaaaaattttgaaagacaatattagctcaattttacaggcaagaaaacaaaaacaatgccttgtctaaaaacccatttccccacaccctgctgctcctttataaagatagctaacatcttcctgtgcattatttcctatgacatccctttatagtagctgatgtgttttccaacctctttcccccaaactacatatttatcaggataattgtctactttccacattatcccaggagacacttttataagatgctgtgcccttgcataagtcctcattcttctagcttctgataatcatcccttttgttatttttctttattctttgttcctgattcctcagccgatgcctcattgtttttcttgatttgttcttgtaactgcaatatcctaattcaagagccaattatcgtatcagtcaggggagcctgtgttatgctgctgtcaaaacaactccaaaagcattttctttctcaagttatgtgtcccacagagattgcccttttcatcttaatcacttaggagcactggctggtggacgagcatccaggctccccacagcagggaaaatagaatgtaataaactgagcactggctttaaatctttggctcggaagagacacatgtcacctttgctcactttttttttaaaccaaagaaaattccatggtggcatataacacagagtaggcaaagaagtgccatcctgctttattcctagaaacctgacatacttgatgaacagctctgacaaataccacaaattataaagtgatatgtacatccaaattatattttttccaaatgcttcattgatcaaatttgataaaatcattttatatggtgtatagcttcataatgtaatactaattggtacttaaaaaaatcttgatccaaaatttagaagatcataccatttgataagcatttcactaatggatttgcttctgttcatgaataaaacacctaccataaatatagtatacttatttatgttcttaaaataccagccatttctttctgtcttaaaatgtaacaaacttgaattgttaactatattaaagaaagttatttggtttcaaaaacagaatgtgattgatttttaaaaaagaacattttatcaggatataagagaatcaaaaggatcagaagtaaaggcagaagatcaagacttggaggccaggagctccaaaagttcatgacagcaagggaaattgcatttgttctctgtctgagtccattagggctactataacaaaataccataagctgggtggcttataaaagaacagaaacttaattcccacagttcaggattctgagaagcctaagagcaaagtgccagcattttcaatgtctggtgaacgctcactttctgggtgacagatggcaccttctctttgtgtcctcacatcgtgaaaggggtagggcagctctctggggcctcttctctaagggcactaatatcattcactagggttccacccttatggcctaatcacttcccaaagactccacctctaacaccctcacattggttatcaggttttaacataggaagcttgggaggacacagatattcagaccatagcagccactgtggacatcaacaggttgaatcccacatgtcctacagaagctaagctgctcaattttaaagagaagcacaaatgttgtgaataatgaaaaattgtttggtggaaattgcttatgactttgtagacatgtgtttacagacttcgtaaacttggtaaacatttgtggtagtatcatgtgggctttactatctgtcttcaatgctaacacaaatgtcctgaaaattataaaatcttttatcacttatgactgtgttgctttacatgaatattaatattagattttgttgagctatttttgtttgtttgttttctagtgacagtgatgaaaagcctctcaaaggaagccttcggtcccttaatagggatatgcagcctactgaaagtgctgacagcttagtcgaatacggagagggagaccatggtctcttcagtgaagatggatcatttattggtgcctacgctggatctaaggagaagggatctgttgaaagcaatggaagttctacagcaacttttccccttcgggcataaacacaacatatgtaagcaacgctactggttcaccccaaccttccatatttatctgttcaaaggagcaagaactttcatataggaatagaaacatgctggccgaagatttcatccagaagtcaacatcctgcaattatgttgaaaagagtagtactttcttcaaaatataaaatgccaagcacttcaggcctatgttttgcttatattgttttcaggtgctcaaaatgcaaaacacaaaacaaatcctgcatttagatacacctcaactaaatccaaagtccccattcagtatattccatatttgcctgattttactattcggtgtgtttgcatagatgttgctacttggtgggtttttctccgtatgcacattggtatacagtctctgagaactggcttggtgactttgcttcactacaggttaaaagaccataagcaaactggttatttaaaatgtaaaaaggaatatgaaagtcttattaaaacacttcattgaaaatatacagtctaaatttattatttaaattttactagcaaaagtcttaggtgaacaatcaactagtatttgttgagctcctatttgcccagagatggtcatatttaaacagaagtatacgtttttcagtttcaacatgaatttttttatttctgtcagttatgacatccacaagcatcactttttgtgtctgttttttttttttttcttggactaaattcaactgcatggaagcggtggtcagaaggttgttttatacgagaacaggcagaaagtgcccattgttcaggattctaatagctacatctacttaatatcttcatttctaaattgactgcttttacctttttctcatgtttatataatggtatgcttgcatatatttcatgaatacattgtacatattatgttaatatttacacaatttaaaatatagatgtgttttattttgaagtgagaaaatgaacattaacaggcatgtttgtacagctagaatatattagtaagatactgtttttcgtcattccagagctacaactaataacacgaggttccaaagctgaagactttgtataaagtatttgggttttgttcttgtattgctttctttcaacagtttcaaaataaaatatcatataaatattgagggaaatgttttcatatttttcaaaataggtttttattgttgaatgtacatctaccccagcccctcaaaagaaaaactgtttacatagaaattcctacacatacgtttgcgtatatgttattttaaacatctttgtggtgagaattttttccccgatattctccttctgtcaaagtcagaacaaattcagggaatttattttctggcagttgtgctccagtccttttaaaattgtacatgaacatgttttagaaacaatatggaggatgatgcatacatgtcggtcaagttcagcgctcgacattttatggaaagatttttttaaccttaccacgaaatacttaactactgtttaagtgaattgacttatttcactttagtttttgaactgtgattattggtatactgttatatcctcaacttggatttatggtaaccccttatagttcatggagaccaaaatttggggtatttataatagtcagcgcaggaatgcacatggaatatctacttgtccttttgaacctcacgagtcatccagaatgtatagacaggaaaagcatgtcttatttaaaactgtaatttatgggctcaggatctgaccgcagtcccgggagtaagcatttcaaagggggaaggcagtgtggtccctaccctgtgtgaatgtgaggatgtagacatccatcagtgcaactcgagctccatcctcctccgatttctaaggttccagttttctggagggacagtcatcatgttttgatttatctgggagaaaactgtggtgcacagcttgtgaggagggcaaggttgtgacgttcgagcttagttctggtgttattctgtctcctcttctttgtcatcagccaaaacgtggtttttaaagagagtcatgcaggttagaaataatgtcaaaaatatttaggaatttaataacctttaagtcagaaactaaaacaaatactgaaatattagctcttcctacacttcgtgttcccctttagctgcctgaaaatcaagattgctcctgctcagatcttctgagtggctaaaacttatggatatgaaaaatgagattgaatgatgactatgctttgctatcattgttacctttcctcaatactatttggcaactactgggactcttcagcacaaaaggaatagatctatgattgaccctgattttaattgtgaaattatatgattcatatattttatgaatcagaataaccttcaaataaaataaatctaagtcggttaaaatggatttcatgattttccctcagaaaatgagtaacagagtccacggcgtgcaatggtaattataaattggtgatgcttgtttgcaaattgcccactcgtgata

SEQ ID NO: 9772 - DNA, 6000 bp, Homo sapiens
tttcagtttatcatttatagtgctacagaacttcctgatattgaaatcataagctgagaggcattcaggcattttgggagagatggtgcagaataggactgtgtgaaactcatggtttgctccataatcagccctggttgattctgggtgtggagagtgagggtggggggcaagggtgttgacggagcagagaggaagacattaggctgatgtgtttggaggatgggtattagtgtgaacacacttgcaaagaagtctgtttttcctctttgcatcaagctgtaaacctgacacaggaaacgttttattattcctactcctgatttatctttttttttttaagctctgtgcttttcttcattagaattttgatttgaggcttgtgctaatcttttgtaattgctcctatttgttagcaatttaatgtggtaccatgaacatttcaaaatgcacactgtccaaatttagttcttatcagagtggaacgtgacaaatctctctcaccccaaagactttttatgtgcagctgctcctattccaatcaaatcatcagcattgatccaaacaatataaatgtaaaaccactagcacatggtcattattgagaccatcttggaaaccctgttaggatactgatttgaaatctcgaaaaggatttcattggataggcattttgaaagcaaactgagttctgccaaattggagcatgccagaatcccatctgtctgggatacagaaaacaaatactatagattgataattatttaagaatggtttaaacaaacaacaatgcatattaaaatgatgagagtagttctgtagggcaagttgtagcaaaagctttaaatgttcttatttcttgcagtaattgatcccacaaaagtctatttatttcactaattcttcttccaaagcattttggttttaagatatgaccgaagttctaagccctccagtagacagaaggggacccctcttggctaagggggggcccagagtaacattgaaaaatgagttcttggccatgatgggagggtaatgtcagacacatctagttatacctgctcccttgctaaccgcaatgagcctttcttccctaagggctaaacacaatctagccctttgaaaagactccatcactgacatcaaccatgcacctgatgctgccccttattttttgcctgataagagaccaccaacacagaatggttctgtcattctagggaggatgtgccgtgaggggtttcatgtcctctggtctaccttttgacatcacagggccaaaacctccaccctcagatgctaatactgccatttttcatacccggaacccatgaagggttgcacatgcagatggttctcctttcataaatatccatgactcctcctgtagcttattaaatatgtatattcatatttatatacatatgaatatgtatataaattcatggcttctgtgtatgaaatatacatatattcatatttatatacatatttatgtacatatgaaaatatgtatatttcatacacagaacccatgaaactcagttgcacatgcacatgtttcttctttcataaatatccatgattcctcctgtagcttattaaatatgtatattcggccattccactcagcacaaattcctgtttgttccctttgctcctccttggaagtgcctgtttacagcttctggccaagggaggctacgcttcctagcctgtcagaatggccaccaggcagactaataaagctctcccttccaaaaagaaagaaagaaatggaaggaagggagggagggagggaaagggaaaaaggaaggaaggaaggaataaaagaaaaagctatggccaaagaattctgatcgataatcacgtaacattttttaaatcttgattggaaactgggcagagatttccactatgagccagccttcaatgacctcccctaagtgactctcagcatttcattttggactcacgttcccctgatgcagcttctgaggggagagaacacacagagttgtagaaagtattaatacttcacttgatgagctgggcagtagctgtttgaatacatctgcacttctcttttatcattcgtctgtcttcaagaatattaaaggactgactctcctcatgccagatgacagacttgatatttaatctttgctttcctcttaaactgtcatagttggtatcttagttgatgggttgtaaagcaaaagacaccacagttaactgactgcaaaatcatgagactgtaaattacagatttattcagtgagatgctatggctgtgtatttttaactgtgtagggctcgtttttctcaccaatgtaataattattttttctatatcagataggaacaatctgtaaatattcagataattggccaacattttctcttttttcttggttgaatagtctcttcagttcagtggtggctgttcctaaatgttatttgagtagcttaactaattgaataaagtcattttaactttcatgattttctgttaactgaaattcctgctctcagtatgttaaactggtatgaaattttctgcaaccaggggtcggcatactgctttcctgtgggttagaggtttcctgcactggaaatacagtactccaggattactgttatggaaaatcaactttgtcactggctcccagccctgtgcagggaaatgtttttttcagggatcctgccctggagatgaaaatcaggttctaacaatgtttcctttttaaatggagttatctgcagccatgcatgggaaaaagagcagaataaaataaaatttgcctgctttctgaagataactcagccttagctcacttgtcagccacgcttggtgttaaaaacttgtcagatcagttgacttccacagcacttggctattgcatttatgtttattcttttgtttttcctcatctagcacatcagtgacaaaaattatctaattgttttcattgtcacagccacaggagagcttaattatacataagcacttggctgtcatcttttttcctctcacttttttctggtctgggtcttcccagtgctgtgttcctaatatccagctgcataggtctccaatttaaatgaattatgataattaaaatcaccatgtagatgataaaaggtgagaaagtaccccagtcacttatccatgaacattctgtctttgttgacaagaatttcttacaacctaggaattataaaccatgggtttgagcttagaaacctgcttctttgggttccaggttgtttattgcattcatcagctctccacttcagcaaccagaagtgtgctaactcctattcagggttggcaaaatggcaatttttttccttcttgcattaaaaccattttgcattaaaaccattttgccttctttcaaaagcctactaggcatgatgattgttcccagtgtctgaataatggaagccctattgccctttggtttgtccctactgtagccatgtctttaagttaccctgtgctactcatgtttggtatgtatgaagaactgaagcaagttcagagatagaacatttttaccctaccccatcttcccaatttgtttttgctataacctgtacggtctagttgaatctacttttctcagtctgtttttggcattaaaaacttcctaaaaatagatttattttcagtggtaaaatgctatggatctctgttactaaagataaacattttccaaaatgactttaatacattatttacttgtttaacaaatttttttttattgcctaccatgtgggagacattatcaggcactatggctgcaagacaaaatccctgccctcaaggacctaatattttactggaagttaaccaaaatgcactattaagcaaataaattaactaggaaattttattttttggtaagagtgataaagaaaataatgaggttgattggccaggtgcagtggcttatgcctgtaatcccagcactttgggaggccgaagtgggtgagtcacttgaggccaggaattcgaaaccagctccgtctctactaaaatataaaaattagctgggtgtggtggtggtgcatgccggtagtcccaactacacgggaggctgaggcaggagaatcacttgaacccaggaggcggaggttccagtgagccgaggttgtgccactgcactccagcctgggcaacagagcaagactccatctcaaataaataaataaataaataatttgatatgatagaaagtagctgagagcaagagaaagatttcataagatgaagtagtcaggaaagacttgtctgggaattgccctctgacccaaaacctaaaggatgaaaatgagctaggctttcaaggggaagtgcattgctggcagaaggtgaggaagtgcaaagactctgaggcagaaaactacttgactttcttgatatgcagcagggaagtcagtgttaactaaatcatagtgagcaaggggcaaaggtttgaaacttgggaaggtgacagactgcagtactttgtaagccaggcacagagtttgggttttattctctgagtaaaatgggaagccattacagcatttcaaggcaggagggtgactcgatttgattaatgttttgaaaagaccgctcaggttgttttgtggtgaatggatgattggaaaccaagagcaaaagccggaccattgccaatatccaggtgagagacattgttggttaggacgtaagagaggaagagaaatggagagacttgagatatattttggagttagagccaataggatatgctcatttcattcctacatctgtctagtttatagatatggaaattgagtcccaaagagattaaagtaattgatttaagtttatacagtaaaaaacagagctagatttcgaatgctttgctagaggttctgaaacttcagtgtgcatcacaatcacttggaagtcttattacaacacagaattctgggtctcgttctatgttcccagtgggaacataccagatggaggctttgatttggtaagtccagggtagaaccaagcatttgcatttctagtaagttcccaagtaatgctgatgctgcttgtctgggaaccacatagtgagaatgctctatgtttaggttgtccacccatggtattgtgaagctgaagattaaatgacatgcaagagaaggtgttcctgctactctggaaagctaacagcttactgtcacatcaggcattttagccagtctacacaaagtagaatgagagcgctaaggcaattatctttgaagaaaggaaagggaaatataaaatgtatttaattcacttggtaattattcatctttgcacttcattctgtctctgtagtcacttcctttttgcccaaaaagactgatagaattatagtcatcatttagtagaatgaagtgtgaactacaagagcctgatatttaatatctttgtacagtttcttctctttgtaacaggtgttatgagagttaaaccatcttcataattaggaaatggggaatctaatatttgagcagtaaacaaggctgtatttcacagaatccagtaatacttaagctggaagcaactgctggggccaaccctttgatttttataattaaggaaaataagatccagagatacaaaataacttattcaaggtaatgcagtgaatgggaatcacagctagaactgcttttttctgctattctacctgtgttacttttcctgccaatacaacattttaatacaataggtaaggtgaaaaaaatccatcaatcatccggatactctttcttgcgttttccattaccagtgtcacaaatgaaaacatctggatgaacaactgactttttcactttctattttctaagttggtcacctggttattgagtccaaaaaaaccctttttttcttcttcaaattacatgtaagactaaatgtctagagcctttgtgctacagtcctttgcctctaaaggcaaaactgtaggcttgatg

SEQ ID NO: 9773 - DNA, 6000 bp, Homo sapiens
ctcccccttcccaagtccattcccactgtaggccgatgcctgtgcaaaggacgcagtgccatatcagagaggatccttgaagaggactcaccccaagcaagggaaaattggtgggggaacttctgccttcctggtttccttgactttggcctcctcctcttcctccttatcttctccaacctccttcctttatttgttccacagactggaccgcagatcattaccttgaaccacacagacctggttccctgcctctgtattcaggtaggagcagagtctagctgggtgccagaagaggagtgggaagatgatgatgggggtgatccctgccttcctggtctcaccattcttcaaacccttcattgaggtggagactgtggctccctggggtggctggccctcccttgacccttgctgtcctatgccttctgtctattacattccctgaatgctctccctgatcctccacagaactcctgcttattcttcatggccccattcaaatgtcaccttctccttgaaacctttccctactcctccagttctgtctttgtgttcccctggcgggcagagcatgtgctacgaacttggactggtttgaatcttggctcttgccatttgctagctgtgtaaccttgggcaagtcacttcacctctgtgagcctgtttctcatctgtaaaatgggaataataatagtaacagcctcatggggctgttataagaatgtgtgccacacccaggcttaaatatgctggctctttcctcttcctctgtacatttatttatttttttagacaaggtctcactctgttgcccaggctggagtgcagtggcacaatcatggcacactgcagcctcagccccatgggctcaagtgatcctgctgtctcagcctcccaagtagctggaactactggtgagcactaccatactcagctagtttttttttgttttgtgtagagacggggtcttgctatgttacccaggctgttctgaattcctgggcttatgctatcctcccacctcagcctcccaccaagtgctgggattataagcatgagccactgtggcttgccctgattgcactttttttttttttttttttaagacagagtctttctctgtcgcccaggctggagcaccgtggcgtgatctcggctcactgcaagctgcttctcctgggttcacgccattctcctgcctcagcctcgctgagtagctgggactacaggtgcctgcaaccacgcccagctaattttttgtattttcagtaaagacagggtttcaccgtgttagccaggatggtctcgatctcctgaccttatgatccacaagcctcgtcctcccaaagtgctgggattacaggcatgacccactgtgcccagccgctgattgcacatttaattggtcatcaggtctcatccatcttacctctgacattaatgtctctcattttctttccccctcctctccatctcagtccagcttagggctctatcatctgttttctagactgtttcaacacctccaagctcccctcccttcccatcactttcctggcattctgggcccatattctgcccccaacggtgccttttcactctattttccccatgattccccttcatgagaacattgttacatccagtggagctacttaccaagatacagctagctccctgccttttctcaggtggttcccattacctcaaatgccctcacctccttcccaaagcttttccccaaccacccggcctctcctagctccaaatccccttgcacttctatctttccttgtccatttatcacttcatttcttttattttcttaaattttttttttttttttagagacagcattttgctctgtcacccatggtagagtgcagtggcatgaacacgtctcattgcagccccaagctcccaggttcaagggatcctcctgcctcagcctctgcagctgggactgcaggcatgcgccaccatgcctggctaattgtttccttttttttttttttttttttttaatggagtttcactcttttgcccaggatggagtgcagtggcgtgatctcggctcactgcaacttccgcctcccaggttcaagccattctcctgcctcagcctcccaagtagctgagattacaggcacacaccaccatgcccagctaatttttgtatttttagtagagacagggtttcaccatgttggtcaggctggtcccaaattcctgacctcgtgatccacccgcctcggccgcccaaagtgctgggattacaggcgtgagccactgtgcccagcctgttttcattttttaatgttttgtggcgatgggccaccacacccagctcaatcacttactttcttatttgggcatctaatttcttcttgtacacaacagatgctcaataaatattatgaaatgaatgagtgttttactaatttatataaatattttatccttactacaagtgtgagtttgtgatttccttgaaggcaagcaaatcatatctaattcaaatgtaatagctttgcaagagccttgcacatagcgcctacttgttttttgtttttttgtgtttttgttttttttttgtttttttgtcttttttgagacagagtctcgctctattggcaggctggagtacagtggcgtgatctcggctcactgcaatctctgcctcctggattcaagcaattcttctgcctcagcctcccaagtagctgggactacaagtgcatgccaccatgcccggctaatttttgtattttcagtagagacggggtttcagcatgttggccagatggtctcgatctcttgacctcgtgatccgcccaccttggcctcccaaagtgctgggattacaggggtgagccaccgcgcccagccttgttttgtttttaaacaaggtaacagtatgaggtcctcactgttgaatgagtgaataaatgttactgcctaacacagccataggacacagcagatgttcatgagatgtatgctgtgatttaaatggcttcattgccaaacacagtgcctgccacatagtcggtgttcctaactaaaggcttgatggataaattaatgtattacctctagtgcttagcatagagctatgcacataataggcactcttgaaatgtctgttgaaagaataaatgaatgtgtccttagaacttagcacattccccaacacatagcaggtgcttacacaagtgattgtggaatgaattaaaattaattatccaccaggcacagtggctcacacctgtaatcccagcactttgggaggccaaggtgggtggatcacgaggtcaggagtttgagaccagcctggcctaacatagtgaaacccagtctctactaaaagtacaaaaattagccaggcatggtgatgtgcgcctgtagtccctgctacttgggaagctgaggcaggagaatcacttgaacccaggaggcggaggttgtggtgagctgagatcacaccactgcactccagcctgggcaacagagtgagattccatctcaaaaaataaaaaaataataaaaatttaattatccaaggtctcttgtgcttgccatactgctaagacacaatggtaggcactcattaaaagtctgttgaatgggccaggcgcggtggctcacgcttgtaatcccaacactttgggaggctgagacgggtggatcacttgaggtcaggagttcgagaccagcctgatcaatgtggtgaaaccccatctctactaaaaatacaaaaattaaccagttagccggccgttgtggcatgttcctgtaatcgcagctcctcaggagactgagatgggagaatcgcttgaacctgggaggtggaggttgtagtgagccaagattgcaccactgcactccagcctgggcgacagagcgagactctatctcaaaaaaaaaaaaaagtttgttaatgaagatgttgccagtgcccagcattatgtttgctggaagaatagatgtgagcacctccaggttttgtaaaaggcaggaagacccagcaagtgtttgtgaaatacctgctgaatgagtgcatccccactgtccagcagagggccaggcacatgcccatggaggggacctgagcagacccccatttcctttccaggtgtggcctctggaacctgactccgttaggacgaacatctgccccttcagggagggtgagccgaccggcctggggctggggttggggtgttgcgagcgatgggtacctggcctgcggtgactgtgccctttccttgcagacccccgcgcacaccagaacctctggcaagccgcccgactgcaactgctgaccctgcagagctggctgctggacgcaccgtgctcgctgcccgcagaagcggcactgtgctggcgggctccgggtggggacccctgccagccactggtcccaccgctttcctgggagaacgtcactgtggacgtaagtgaagcagagggcacctcccgtggtgaggggagagtggggaaccgggggtccccttttgtgatcccacccattcctctctttccacagaaggttctcgagttcccattgctgaaaggccaccctaacctctgtgttcaggtcagaaaggggtgcatagtgctgggctggaggctggacctgggcagaccccccagccaagggggtcttagttcttgggccgctaaagcatagtggttgccagcttcctctatgggagttccactgcctactttagtagtgcgcgggaccctgggcaactcacttcacctctctgaacgtcagtttcctcatctgtttaatgcagatgataatacagtaactacctcatggagtggttgtgacaatgaaataagagaagtgcttccccttaggaatcggtacagactaaatgctccataaatgtagccacttttattattgctatccttattctatttccatacctgtagaatgggttgctctacagtttcaaagggtgattataagaacattcactcatccggccaggcgcggtggctcacgcctgtaatcccagcactttgggaggccgaggcgggcagatcacgaggtcaggacatcaagaccatcctggctaacatggtgaaaccccatctctactaaaaatacaaaaaattagccggtcgtggtggtgggcacctgtagtcccagctactaggaaggctggggcaggagaatggcgtgaacctgggaggctgagcttgcagtgagctgagagggcgccactgcactccagcctgggtgacagagtgagactgggcgacagagtgaaactccgtctcaaaaaaaaaaaaaattcactcattcaagattttttgagcagcacaagtcactgttttaggcacttgtgatagaccctaacatctctaccctcatagaacttatattgtaatggagaaaggcaggcaacagacattgtaaataaatcatatagtatcttaaaattgcatacaaataccatgggaaagggataaggtgggactggggttgcaatttttagcagggtggtcatgtgagaaaggaatctctttgagaaggttagatgagaggggaaccatgctccgtaagacataaaaacagctttagggtcagaagacgctttatacagatgatctcacaaggctggggcagagaaagatgtagtgattcctaatcacccagccttgaatccacatctgcctcaggtcagattgagtgcagattcccaacccaacaggccttctgttgcctgccccattctggtctttctgcctttggcttttgcttttcttagtggccctaaccatggtctcttcccagcaggtgaacagctcggagaagctgcagctgcaggagtgcttgtgggctggtgagttgggcctgggggcagctggggcagggccacctcctaggggtgaaggtcagggcatgggaggcaggcaagtggccaatcccagcaaggatgggtcttggtcagagtggcctctcaccccttccag

SEQ ID NO: 9774 - DNA, 6000 bp, Homo sapiens
caatgaaataagagaagtgcttccccttaggaatcggtacagactaaatgctccataaatgtagccacttttattattgctatccttattctatttccatacctgtagaatgggttgctctacagtttcaaagggtgattataagaacattcactcatccggccaggcgcggtggctcacgcctgtaatcccagcactttgggaggccgaggcgggcagatcacgaggtcaggacatcaagaccatcctggctaacatggtgaaaccccatctctactaaaaatacaaaaaattagccggtcgtggtggtgggcacctgtagtcccagctactaggaaggctggggcaggagaatggcgtgaacctgggaggctgagcttgcagtgagctgagagggcgccactgcactccagcctgggtgacagagtgagactgggcgacagagtgaaactccgtctcaaaaaaaaaaaaaattcactcattcaagattttttgagcagcacaagtcactgttttaggcacttgtgatagaccctaacatctctaccctcatagaacttatattgtaatggagaaaggcaggcaacagacattgtaaataaatcatatagtatcttaaaattgcatacaaataccatgggaaagggataaggtgggactggggttgcaatttttagcagggtggtcatgtgagaaaggaatctctttgagaaggttagatgagaggggaaccatgctccgtaagacataaaaacagctttagggtcagaagacgctttatacagatgatctcacaaggctggggcagagaaagatgtagtgattcctaatcacccagccttgaatccacatctgcctcaggtcagattgagtgcagattcccaacccaacaggccttctgttgcctgccccattctggtctttctgcctttggcttttgcttttcttagtggccctaaccatggtctcttcccagcaggtgaacagctcggagaagctgcagctgcaggagtgcttgtgggctggtgagttgggcctgggggcagctggggcagggccacctcctaggggtgaaggtcagggcatgggaggcaggcaagtggccaatcccagcaaggatgggtcttggtcagagtggcctctcaccccttccagactccctggggcctctcaaagacgatgtgctactgttggagacacgaggcccccaggacaacagatccctctgtgccttggaacccagtggctgtacttcactacccagcaaagcctccacggttaggactgggcgaccctcctccacagatctctccaaatgcatctcacatctggcctcaaattttcactccatccaccctgtgccggtctctgggaacatggggggtgactcagaccagggccatattcagcggcatcaccaaagtctcccagtcccctctacctcattctacccagctgtagcctggtaggtgctgccctaagggtgctacctccaggtaacagtgcccccatcctttggcttggcagagggcagctcgccttggagagtacttactacaagacctgcagtcaggccagtgtctgcaggtgagctggtggaagaagggccccacctcaatgcctaggggcaacaggcctaaaactagcactcacctactgtctatttaggcttattttatgttcagccctgggaaagttaagagtagaagaagcacagttcctatccccaaggagcacactgttggctagacacccataaacagataaccacacctacaggtgctaagttttgggttccagggagagcttccgggaagaatttcttcctataagccagatttggtatggaagaagtcataccctagtcagtgggcacagcacaaaggcagagcagctgcaggaaccttagccgggagatatgcatagttgatgctgggaatttggagatcaggccaccagagcttggtgaatattggaacacctggctggtgccctggatttggttctgtttgtatcttacagctatgggacgatgacttgggagcgctatgggcctgccccatggacaaatgtgagtattgtaagaactgcctttcctttctgtaccaggagtggggatcttgacagggaccactcttgggcacagcacatgcaatggccttgtccttccctgagatcagataaacagagggtcattccttcattcactcaaaaaatgatgagagcttgcagggatcgcaggaacaccaaaaatataaatccttgcccccgccccacccctagaagactagcaagacatgagccagtcacttacatttaaagtgggagctactgaagcaccaccaagtgttcagtgctgtaaatgcatacaatgtggacctgacctgggtggggtgaggggtgaggggctcagggggaaggttccagcaaaactctgaagactgagctaggggaagggggtagagatacagggtcttggacaggcaggtttctgtcatgagataaagatgcaggagacatgtaggggatttggatcttatgttgagagcagcaggagctacgatcaaatttttatatatttcacacacacacacacacatatatatatatatatatatatatatatatatacttatttttttatttatttttgaggcagagtctcactctgttgcccaggctggagtgcaatggcgcgatctcggctaactgcaacctctgcctcccgggttcaagcaattctctacctcagcctcccgggtagctgggattaataggcgcctgccaccatgccctgctaatttttgtatttttagtagagatggggtttcaccatcttggccaggctggtcttgaactcctgacctcgtgatccgcccgcgtcggcctcccaaagtgctgggattatagtcgtgagtcaccgcacctggcccaaatttatatttttaaaagatctctgaggctgtcatgaatcaattcaaggcaaatcaattggaggtaaaaaaaaaaaaaaaaagacagggcagggacaccaggtagttgcagacacccaggacagcaagatcaagggcccagcaaccctagcttaggggagaaaaacagctgacattttagcacttaagatgctcggcattgtgttaagtatgtattaacacattgtgttaagctttatatgtattaatatatttagtcctcacaccaaccctatgacacaggtacaactttacagaggagaaaactgaggcagagggtgacattacttattcaaagacccctaaacagatggagctatattcatccactggctctgacactgtgctgtggactctgggcaaatcatttcttcgttttttgttttgttttgttttgttttgagaggagtctcaccctgtcgcccaggctggagtgcaatggcgcgatctcggctcactgcaacctctgcctcccgagttcaagcgattctcttgcctcagcctcccgagtagctgggattacaggcgtgtgccaccacgcccggctaattttttgtatttttagtagagacggggtttcaccgtgttagccaggatggtcttgatgtcctgacctcgtgatctgcccgcctcggcctcccgaagtgctgggattatataaaggcatgagccaccgcacccggcccaattcatttctgttaagtctcagtttttcttctctgtggagggtaagtttctaactcttcttctctgggtctcccagacatccacaagcgctgggccctcgtgtggctggcctgcctactctttgccgctgcgctttccctcatcctccttctcaaaaaggatcacgcgaaaggtgagcgcttcccggctccccattcccctgggggaggaccagagtggctgtgggagttctccgagggaaagcggcggccgagctcactggctgcctccgcccctctcccctaacagggtggctgaggctcttgaaacaggacgtccgctcggggggtgagtgggagcaagcgctgggcggagggccgcccccggggagccaggcctgtgccagctcacctcttccctccccatctgttttctccggcagcggccgccaggggccgcgcggctctgctcctctactcagccgatgactcgggtttcgagcgcctggtgggcgccctggcgtcggccctgtgccagctgccgctgcgcgtggccgtagacctgtggagccgtcgtgaactgagcgcgcaggggcccgtggcttggtttcacgcgcagcggcgccagaccctgcaggagggcggcgtggtggtcttgctcttctctcccggtgcggtggcgctgtgcagcgagtggctacaggatggggtgtccgggcccggggcgcacggcccgcacgacgccttccgcgcctcgctcagctgcgtgctgcccgacttcttgcagggccgggcgcccggcagctacgtgggggcctgcttcgacaggctgctccacccggacgccgtacccgcccttttccgcaccgtgcccgtcttcacactgccctcccaactgccagacttcctgggggccctgcagcagcctcgcgccccgcgttccgggcggctccaagagagagcggagcaagtgtcccgggcccttcagccagccctggatagctacttccatcccccggggactcccgcgccgggacgcggggtgggaccaggcgcgggacctggggcgggggacgggacttaaataaaggcagacgctgtttttctacccatgtggcccacacgcgtctccgtttcagtggcggggctggcaaacgtcattccctagccccgcggccctttaaagcccggacaggtgcagctcggtgccgcctctggttggctggcgtggggtgacgtaatggcacatggcccgtcgccattggctgggcggcaagctccgccccctggactgcggcgcgggtgggggttgtgcgttttacgcaggctgtggcagcgacgcggtgaggagacggcccacggcgcccgcgggctggggcggtcgcttcttccttctccgtggcctacgagggtctggatccttctctgccggctcgtgggccgtgcctttgcccttctgcgaggccctgaatctgatcccttcccttcatatccggatccgggctcctccctccaagcccggggttccggacacctcccccaagacaacccctctggcctcctctccttcagtacttggaatctgatctcttctccctaattctgcggatccggcccctaatattctttatcagaccctcagacaagaggctgacttctgcccccttgtcaaggagcgaggccactttcctctccaccccatgctagcgaggataacttatttctcttctggaattgcatcttatgcgcctttccccacccatccccacagcccctgcaatacccagtttggcctcttttgcttgtaataacgcagatcccagcgccacggcaccttagaacagacctttttctttctcgcgtggggcctgactccttcagtgaagcctctccacgccctctatctgcaggtccccagcctgggtaaagatggccccatggcccccgaagggcctagtcccagctatgctctggggcctcagcctcttcctcaacctcccaggacctatctggctccagccctctccacctccccagtcttctcccccgcctcagccccatccgtgtcatacctgccggggactggttgacagctttaacaaggtgggtgcaccggcagcctcgttagaggggaacacagcgatttagagtggggaactctgggatgcaaatctgcgtggatttaagtttcatcttggtctcttactagttgtatggccctaggcaggttgcctttctgtgcctcagtttcctagtcagtagaacagtgaagtgctagcatgtgccaggcactgtacttagctattactaattttctgtttccagggcctggagagaaccatccgggacaactttggaggtgg

SEQ ID NO: 9775 - DNA, 6000 bp, Homo sapiens
ttgagggatcaagatctcagggtgaagagaaatgaatggagcaggggcctgacattctatgtgctcttttccatgaatttgccaattcataaagagctaaacggagagactgagaagctgagaagaaaccaaatgctaagaagcagagaagctgagcagaactttcagcagtctcacaggaccgcaaagacaaacagaatttatgctgaacacatttctgagccattacatgttctcctacagcgtatatgaacgttcactaaagctcaaagactgtatccatacagagaattcctggaaagaactccagaaataatgaaaccaaacatctagcaatagaaacccagagacactgagtgacttgcctaggaccacagagccaattggtccagcctcctggtccagtctcctgatctagccttcactcactgcagtgctctgcagctgtggcttctgctcccagcattcacctccccattcctccccacacatccttgccagagagaaagatcaacttaatttcacttctcattgtgatcttttaataaatgaaagtgcctttctgaaaggaaatcaaacacaaatccttttataaaaattactggtcattttttctaattgccaaagtaatacaaatttgctaaagaaatgttagaaaatacagataagtaaaagcaagtggaaaccacagctctggagctgaaatagggccaagttgaaaatggtccattttgatcactctaaataacatgctggccccttggccactttggtcctgaaggatgcactttgactctcacaaagtaagcaggaaacaaatcaagagaagggccatcctgcccacttggggcggctgcatgagaaagagccatttggatttctcagcacccagagggtgcagtccccagaggagacggctgactccatgatgcgatgggtggggagctggaccgggctccctgcccggacatctccgtccacagcttgttgcacagcctgggagcccaacgtagtgacactcatttcttctggaccttaagggctttgtgattttcccatctcctctgtgcaaatgcaaagatgactcccttggttagtggaggatttaaagttatcagtgaagactttaactggaacttgtttcagagttgggggacatgggttctgtggctaattaactgggcaacttgggcaagtaacttcctctccccaggccttcctctccccgggccttcctcgatttccccatgtgaacaaggaagcagttgggctggatttggttagccacgattcctgtttcctagaggagggaagaaggaaggggatttggttaccgagcatctaccagagccaagcactgtgctgagcactttgcctgcatgagcttatctaatcctgacaacagcactgtgagggagaggacatctgtgttcttgcctctccaggacccctgttatcctgctaatagcacctcgattgtcttttaaggaaccatctctcacccactcctagttccagtggcctacagcgggctgactctactccttgacttcagatacaggcatgtgactcaggcttagccaaccaaaacaactgtaacggtttcaggactgggtatgtgatccaggccaagccaattggagtcaaccctgggatttttgctggaaatatttggaaagacgtgatctctttgccttgaggttgtttagccatttccacctccctatggaaagagccagcctgctaataaaagtggcacatatgtataaaataaagctgacagaaaagaaaacagagtcaagacagagggagacagatttatgacaattacctttgagcctctgaagcatctgaatccaggcctacttcctaaacgttttcattcaagaacactttatagccaaagccatttataattgggtttaagttacctgcaatcaaaagaaacatcatgaaaattccttttttgggggggcggtggtggtgggtacagggtcttggtctgtggtccaggctgaaatgaagtgttcaatcatagctcactgcagccttgatcccctgggttcaagcaatcctccctcctgagcctcctgagtagctgggactacaggcgcacactgccatgcccagctaatttatttattttttgtagagacaaggtctcctccccgtgtttcccaggctagtctcaaactcctgagctcaagtgatcctcccaccttggcctccccaatcctacctggggattacaggggcgagccaccatgcccggcccatcactaaaattctgggtgtgacataggcattactattcttattttacatacagatgaggaaactgaggctcagagaagcaaagtaaacacagagctagtaagtggcagagcaggtatttttaatctacttatttcttctcattgccttcagtctctactcaggcattgaggttgtcccttttttctgcttcttccacaaagcacagaagtaggagtggggctgtgggtccagactgctccaggctccagatctggctcagctgcttcccacctgtctgatcttgggaagacttactagctgtatactctgaacaaactccttcatctctttgttttctcatttgcaaaacgggatgacaacagtacctacctcatgggattgtgaggaatcggtgcattatttatgtaaagctcttaaatcaagcctgacacacagtatgcagtaagcatggggctgttacttttctgctgcagcctgtatgttgttagtaagttgattgtgcccttctgctccccaacccctcatacagcctggggtacctcctgatctgtcagttccaaatgccacagcaaaacaacccacaccctgcttaccaggggcttgaaatcatgtctaacatgttgtttctaagatgctgatttttctaaaagtgctgatcaccatgggtttagcaggcctaaaactagcccaggaagtgaaactttggggaggaattccaaataaccaagcctttgctgaaatgcagaatggagagaggagggatgaaagtgtggacgcagccatttcccaggcttcccccacccgccctgcccccatcccccctcccacctccatcccccccttacctcccttaagccccacagctatagagagaggaaatgtatttcctttagaatttataacagttgctatcctgagtgctaactcggttccaaagggtgcattagtctggtaaagtgtaaaatatggaggccctggagaatcaccagggagtgggagagggctttcgtggatccagggtgagtcttggctgtggggttgtgctaatgtgcagagggctggccagaaaaacaaatgggacatccctgacttctcgaatccataatgcccaggacagtgacatggcctgccattatctcaaggccaaagtctcatatcactgggcatcacaaagtcctttaatccccaccttgcagatgggatcagtgatctctgagctaccatttatggagcactaagccctttatagaaatggcatcatgaaactttccaacagccccacggagatgaagttataacagcaccttggaccttggggccaggctgagtagggtggatgctcagttctcctacatgtgaccttgtgcaagttactcaatctctctgtgccttcattttctcacctgtaaaatagggataataatagttcctacctactaggacctattattgttgtgaggattaaatgagtaagcatctgtagcacttagaaaagcatctgacacaatggcccctgtctttatgaacccttgtgttaccgacatgggccctgaggccaagaaaaaggaccatggacctaccatacacagcttgtgaagctgagcctcagacccagctctgtgtggtccacaaccagggctggtgggactgctgctactgggaggaggctaaaatacccctctgacccccacccccacaccccaacccaccatgtcccacctcctcaaacaccctcctctccctgtgagcttaggtggtcccttcgaaactgctggggtaaaatctgaaaccataactgttcaaaggttcaaatggagttttcccggcgctgagaaggcagaaaaacctcgacctctctctcccagctctggaaatgaaggcagccaggaagaatcctcaagctcccattgccagggacagaggttcccggggacctgcagaggggcctcacccccaccccactcctccccttgctgctcggggtggcacaggttgctaattaaaacacatcctattttgaaatgtgggctcattcatcaggacgggctagggagaaacagaagagaggtgtgaggttgtagaccctggggtctctttagttccccgaaacctctaggggtagggttcctactgtcaatcttgttccacctctgtctgactttgcctttttcgattttggcgcccctagcaggaatgaggggcgcaggtatcactatttgtctttttcaatctatctgtgattgactctgccaaacatcgtttcatctctatttccatctgtgcctctttgtcttgatttatctctgtctgtcgttttgtgtgcccgcaggtgcgtgggtgggggtggagttgtctcaccaaggttctgacccttctgccacccctccttccaaacccaaggagcagtccgcctcgcagagcccgagcccgggtacccagcgggagcagctccaaacctggggcgcgagctgggagagggtgtccgagcgagaggcgcgcccctcgcgccccctctctccgcgggggcggccctgggcgcgtggaaccgggtgcgggggcgctgcaggcccgcggggcccgggtccccgccttccccgctgctcgcgggtgggcccctcggagcggctcctcctccggcgccccgctccccgagagctccccggcgcccccgccgccgcccccgcgacacccagcagcctggccgccgcggccaacgcgccaccaaactttccccggagccggcgccggtgagtcgcagcggggcgcgggcttgggcgggagcggggccgccgcggctgggcgaggctgcgcgctggccaggctgggttccgggcatcccggcagggcggccgggaaccccggagccgcccgcttgagaagagcgcgcttgggtaccctcgcgacgcgggtggcctggggagggtggcggagggcggctcgctcggtggcaccgctcccctctccacactgtggcctcagcactcgacgcgcagacacctttagcttccccgggcttgggcagggtgcgcgccctgagcgtccgtctttgagctcgggcgagcagagggggagcctcgttttctttgagcctccccagggtctgagttcgctgctaaccgtagtgccagcccattggttgagtgcgttcactgtgccaggctttgggcatccattatctgttgcaatattgttatactcattttacagaggaggaaactgaggctcggggagggaagttgtgcccaggagcatcagctggttaaggggagagagtcagggttttgctcggagtcatcctgatccaaatcacttgaatacactgaggtaagccccaggctcagcgtcacctggagtcgggggtgggaactgtccggaccaccacccgcccttcccctgcagttcggctgcagctgggggtgtggagcaagaggcggatcacctcctcctcgttgtaccgagagaggaggatgctttgggaaaatgagtggatattatggccagggagtggattctggtgacagaaaagcatcggggctgctctttcagagatcagattctagaagttgctctcagtttttctcgaaggagcccaggaagccaggagcaggagctggagtacagcagctcctcaaggaagtcacgtctcctgctctgttaccccacccccagcccccagtcctccatgaagatcccacctcttccctcctgattccctgatccctc

SEQ ID NO: 9776 - DNA, 6000 bp, Homo sapiens
cccaggttggtctcaaactcccggagtcaagatatcctccttcagcctcctaaagtgctgggattacacacatgagccacagcacctggcctgtagacaactttttttctaaacactactctccatgatgtttttctgtagcaaaataggcataatataaaatgtaccatcttaaccatttttaagtgtacagtttactggcattaagtaccttcgcagtgctctacaaccatcaccattattcatttttctgtactgaaatttgctcaactgaaattctttaccccttaaaggataacttttcgtaccctttcctcccaggttgccccctggacaaccaccattatactgtctctgaatatacctgtacaaggtacttcatacaagtggaatgatacaatatttgtccttttgtgtctggcttatttcacttagcataatgtcttcaagattcatccatgttgtagcatgtgccagagtttcattcctttttatgcctcaatacctacatgaaatttaataccacattttaaatctctttgtatactctgggcctttggaggctcacaaaccattgtaatacataagatttttccacttcccaagaaccagtttcacccttttgctgcaatatccccctgtagaaaatgcctgtgttaaaacctaagctccgtgaccctctctatcttgttgtccactgtgtcccccagcgtaacacctagcacattttaagtactcaacaatcatttattgaatacttctctagcccttccccaaccactccttccttcttatcttagccattattattaaaatttgctcttagagtaattacgtatgtatttgttacttagtgcttcatgctccccagccaggcatctcaccatgctcatttcctttggctgcacatgccattctcagtgaccctgtgtttgctggctttcttcacagaagtaaaagattatgagcctccatttggttccaaggtgcgggagcacccctgtgtcgaaagcatgaaggacaacgtgttgagagatcgagggcgaccagaaattcccagcttctggctcaaccaccaggtaaggagtgagtgtttacaaaggtcagtaagattcaaccaagttgcctcttaggtggcagagaattctggaatattgagcttaaatctgagggaaggtcccattgtgttctatggccctgttaaattttgtttataaagcaaatttcaatacagtggataacccaattattataggctccaaccagctgatatgtactctgagagttcacaaatagccattcggaggacatttgccacattttccaagcccccttggtcctgggttaaaacattttgtttgcagcctctgctacttactcctgggccttcacgtcaggagtttatatttgattccctctggattccaaatgttttcttctgggaatcttcagctccataaggaaatacttagcagatgcaaaacaagcagggtttgtcaggcagctgtagtgagaagtgactgtggcatgcagaaggctgtgtacaggtgtttgcaggctgtgctcacagacttgggagaggcctgagtgagcacgcgtgggaaagaggagaccgactcctcactctggaattaaggaaagcaaagaagaggagaatgccctggaaggaacgagaaatctgtctgttgggaacatcctaatggcctcttatttttccttgttaagaaatgctagctaaggctgtccatagcagggcagtcattctggactcataaagaggctgatccaaattgtttgtttgggggcactttgatgagggcaatggtcagagaaaaaagaaaacgataggttgtgagtgagtcagaaccagctatatgtctgacacacccaggaaggagcccttagtgaagaatgagagagaacagtgtggccctatctcactgagaagactgttctttctactgactaaaaccttttattgcctcttttggatgaattccctcaaccatgaaggccgaggctaagttgttggtttccctaagggcaaggcaaattcagataagaaacagaaacaacaaatcaggcacaatcgggaagacaaatggagcaggaagtctggtctgtgccagtcctggcccagagccacttcagcagacagaccttaataaagtccgaggaggttggcgagggggaaccaggctgtggtgggtcacaggcttctctggagttttgagcaaatcctctttgacactaaaactgtaagaatattttgcataaattctgaaatcagaatgtgctggagtgttatgtttctttcaaactctgttgcctcctctgctgtatagttctcgtaatgatgccattattcatgatgataaaattctgaaaagaatttgcataatacattttttctcataatgagatttgttgccctattgatttcaagttaatgcttaatatttaatttaatttactgcctgtaattacagtgccagaataaaataaatgttacttgtgtaccaacaatagcactctactcttaacagggccatctgtcaatactgtcaattaggtgaattatgcaattaatttaacatcatgaactcatcgggtggggagggagagataggctcctaggtgtgtttggaaagttgttggtattagaaaacaagtagaaaaagtgccagctctcccaggtagttttgagatttatccatcccactcccagccacctgtgtgagggatcccattagcaatgttgatcttacaattgggaggagcacactctatttccacctatcagaccatttacttaactcctgcctgctttatttccaaaaaggatttgaaatgataacaaaaatatttgcaatgcaaaataaaaattaagccagtgagagaaaactcttgccaccttcctgggcaggatctcctggatggtctccttggatgggagcttgattcggttagggtgaaccctaggaaatggcatagagttaagcatgcctgacccacataggcagctgtttcacagggttcaacccaatgttgttggagaggaatggagcatcccagaggtcatccttggcagctcgtagaagctgctactgaatcactctacaaaatgtgtggcctatagaaaatgaaaccatgctaatgcctgcatacaattctgacgggggtaatcagccctgttaaaatagaacagtgtatatgacccaactatatgacactctggaaaaggcaaaaactacagagacagtacaaaatcagtggctgccagaaatttaggggaatggagggagggatgaataagtggaatgcagggaatttgaggggcagagaaactattccgcatgatactataatggtagatacatgtcattatacatttgtcaaaacccctggaatatacaacaccaagagtgaaccctaatgtaaactatgaatttgattgataatgatacgtcagtgttagttcatcagttataacaaatgtacctcatagatgcatgcatgatgtcaaggtggagaaggctgtgcctttatggggaaggggttttgtgaaaactctctgtactttccactcaattttgctgtgaagcgagaacttctctaaatagaaaggtgttgaaatgatattaagggccactacatggggaattttcaggtgttgggagtgttagtgtaccccagaagcccagcagaggatcattgtgctgtcaggacctattgtgatcagatagcaccagagccaaaaagtatggtaggttttgagcacagctgccaccagcacaaaccccccaccaccctttccacatggaactggctggcctgcagcagcaggcactcagtcagcacatgttaaatgcacaggcacttttggaccctgcttgcactcactatagcaacaaggtcagcaggccaccttgccttccgcggagcccaccaactcatggtgccctttggatctctttcccgctacagggcatccagatggtgtgtgagacgttgactgagtgctgggaccacgacccagaggcccgtctcacagcccagtgtgtggcagaacgcttcagtgagctggagcatctggacaggctctcggggaggagctgctcggaggagaagattcctgaagacggctccctaaacactaccaaatagctcttctggggcaggctgggccatgtccaaagaggctgcccctctcaccaaagaacagaggcagcaggaagctgcccctgaactgatgcttcctggaaaaccaagggggtcactcccctccctgtaagctgtggggataagcagaaacaacagcagcagggagtgggtgacatagagcattctatgcctttgacattgtcataggataagctgtgttagcacttcctcaggaaatgagattgatttttacaatagccaataacatttgcactttattaatgcctgtatataaatatgaatagctatgttttatatatatatatatatatctatatatgtctatagctctatatatatagccataccttgaaaagagacaaggaaaaacatcaaatattcccaggaaattggttttattggagaactccagaaccaagcagagaaggaagggacccatgacagcattagcatttgacaatcacacatgcagtggttctctgactgtaaaacagtgaactttgcatgaggaaagaggctccatgtctcacagccagctatgaccacattgcacttgcttttgcaaaataatcattccctgcctagcacttctcttctggccatggaactaagtacagtggcactgtttgaggaccagtgttcccggggttcctgtgtgcccttatttctcctggacttttcatttaagctccaagccccaaatctggggggctagtttagaaactctccctcaacctagtttagaaactctaccccatctttaataccttgaatgttttgaaccccactttttaccttcatgggttgcagaaaaatcagaacagatgtccccatccatgcgattgccccaccatctactaatgaaaaattgttctttttttcatctttcccctgcacttatgttactattctctgctcccagccttcatccttttctaaaaaggagcaaattctcactctaggctttatcgtgtttactttttcattacacttgacttgattttctagttttctatacaaacaccaatgggttccatctttctgggctcctgattgctcaagcacagtttggcctgatgaagaggatttcaactacacaatactatcattgtcaggactatgacctcaggcactctaaacatatgttttgtttggtcagcacagcgtttcaaaaagtgaagccactttataaatatttggagattttgcaggaaaatctggatccccaggtaaggatagcagatggttttcagttatctccagtccacgttcacaaaatgtgaaggtgtggagacacttacaaagctgcctcacttctcactgtaaacattagctctttccactgcctacctggaccccagtctaggaattaaatctgcacctaaccaaggtcccttgtaagaaatgtccattcaagcagtcattctctgggtatataatatgattttgactaccttatctggtgttaagatttgaagttggccttttattggactaaaggggaactcctttaagggtctcagttagcccaagtttcttttgcttatatgttaatagttttaccctctgcattggagagaggagtgctttactccaagaagctttcctcatggttaccgttctctccatcatgccagccttctcaacctttgcagaaattactagagaggatttgaatgtgggacacaaaggtcccatttgcagttagaaaatttgtgtccacaaggacaagaacaaagtatgagctttaaaactccataggaaacttgttaatcaacaaagaagtgttaatgctgcaagtaatctcttttttaa

SEQ ID NO: 9777 - DNA, 6000 bp, Homo sapiens
gcctgtggatcactaacgaatttgaaggataacccaagttgtagaatgttattctgattaggttaaattactaggttaacttgtgcagttatattataaagtaataatataactgtaaaataaattatacagttatatataactgtaaagtaaaattgtaatattataatataacttgtgcagttatattataaagtagtcaattaattgactactttagaatctcagggtgtttcagtaataattttttcagtcctttccatttccttcacctgtctccatgccagcttcatgtcaagcaaggcattattgtgtaaggtgtaattattgggtaaagtatttctgctacaggttgagtattcaaaatctgaaacgctctaaaatcatgaacttgttgagcaccaacatgatgctaaaaggaaatgcttattgaagcatttcagaatttcagattagagatgctgaactggtaagtataatgcaaatattctaaaatctgaaacactgctggttctaagcatttcagataaaggatattcagtctgtagtaataattccaaaaggtaatgagactcgttgatgcaaacatgaaaaatgctgacttaaactacagaacaaattgccagttgaacagagatttctgtattggaattcagagccaacattctcatgtctggatctagataattctctgaattttacagagggcatattagttttagttttaccagtgtagaccaaacagaaactatccagtataactggttaccttggaaggtatatttaaataagaaggggtagggagtaggtaccatttctacaaccaaacaagatttcttcatctaaaaggaactcctgttttatcacttaattgtaaacaatattaacttttttaataccaggtatgcaaaaatacacattccaattattgcatcagtgtctgagcatcaacctacgacttgggtgtctttcttctttgatctacatattcttgtatgtaccttcccagcaggcctttggttctgcatcaaaaatatcaacgatgaaagagtatttggtaagagaggtttttaatgaatactttgatatggaatagttatttttctttttgagattatttactttaaatttttgtttttctatgtttgactctatatattcaagataaattttctcctttattttgcataggtgcttaaccaagaaaaattcactgagaggctgggcatggtggcacacgcctgtaatcccagcactttgggaggccgaggcgggcggatcacctgaggtcaggagttcgagaccagcctggccaacatggtgaaaccttgtctctactaaaaatacaaaaattagccgaacatggtggtgcatgcctgtaatcccagctactcaggaggctgaggcaggataattgcttgaacctgggaggcggaggttgcagtgagtcaagatcaagccactgcactccaccctgggaatcagagcgggactctgtctcaaaaaaaaaaaaaaaaagaaaaaaattcattgaatttgtattaagtattttgattgttttaatttaggactagtatattatggtttctgagaggttaatgttgtagtttgtgtttgagaattgaaaattttaactttgttgacaatagccttgactttgttttctgagtaaaattttatttaagtaggaagaagtttttagggacattcatcttccagatttcagagcaaagaccattttatagcggaataaggatcacctttcactaaacatcctcttcattgacagatttgtatatttccaactaataagacttgaaatacaaaatatttaaatgccaagtatttagggttctatatttctaatataagtggacaaaataagcagatatcaaaggcttctacatgatttaatcacacatgaaatatgctgtggttgttttgtatgagataaaaactgaaactgagaaaaactttatcacgtgcacaggatcacaccagttggtaagtaatttgtagtgctagaaacttgtacaattataggatctggaccatgagtgacacatgaatcaggaaagaaagaacagcacctgtaggggttcagtttaaaggattgcacactcattgttctctaggttaatggatcctggatgaggccctgttaatactgcatcattcaagaagatttaacttaaacctcatgactcagtaatcccattcctatgtatatatctaagagaagtgagtgcatatgtctaccagaagacatgtttaagaatgcattagtaattttatctacagtaacccctaatagtaaatattccaaagtcatcagcagtagcatgaataaatttttgtatatctgtagtggaatacaacacaacaatcattaaagaacaggatggggaaataagagaagccaatacaaaagagaacatttttatgtggttacattcctgtaaagttcaacaataaggaatactaattctttagaagtctaaatagtggttaccttttttgataggggagggggttgttactgactgagaagaggcatgaggacatataaaaatgttctatatcattatgggttgtagttacacaggtgtgtatatatacaaattcattgagatacacacttaagaatatgatgcgatgtattttttagtcaggaagaaaaatttaattagcatcagataaggtaggagctcacatgactcactgaatttgtaaagttatacatagccttcagccagaaatagttagagtcttttcctgtggttagcacattatccagaaagctctggctattggaaatttgtttcaaaaattttttttaagtttcttggcagtaactttgcaggttcctcctttgattaataacttacgttcttctcatcccgtttttgttttaaagcaggttttatgccagatattggcactggctttttatagattttaaatctataaatttattttgcctggagatgtcatgcacaaatatgtttttatctgccagctatgggttttttatgatgttattgacaaatagtgaattaagtctaattcttcataactaattaaatttgaatcatatacatttttctaaactgtggatgtgtaggttttatttagtgaacactagttataatttctaaatgtggctaattaatcagttgttcagtagtatcaatttagaaacaattagatcgtttgtgagacatttatataattccaggttggttttatagttttaagtatctagttcagtttcctgggaactttttccctccaacatattgtaagagaatttgtctttgcagttgctctatatgcaatcagtgctgtctactttgctggagtgatggtgcgactgatgttgactttgactccagtcgtgtgtatgctgtctgcaattgccttttcaaatgtttttgagcactatttgggggatgacatgaaaagggaaaatccacctgtggaggacagcagtgatgaggatgacaaaagaaaccaaggaaatttgtatgataaggtggggaatctaaagtaaggcctttaaattgtctatgtcctttcttaatttttccaccacagtaagaactatacatatcaagaaatgttattaaatgatgatttggacaaactgtgacttttctagttggtctccactgtttgcctcaaaatatgaatcctggtcagtcctttagctcagagttagaaaatagaatgtaatcagagaaggaattcctctttttggtaatttgttatctaaatacttaagatatatacccttgttaatatacccttccatttttgagagcaaaaactttatgctgtactaaattacataacatttggcactgtaaacccctctgaaaccatgtggacagacaggtgcttatccttgaggtccatactcagtgcatactttcaaaatattttggaagtgacatttgattggttgaacagtaaaatgaagggagcaaaatgccttttttaaaaccctccagttcgttagcaataggtaactggccaatacaggtaatttatttttaatctatagtttctcagttggtgcaagtgtgaaaaggacttgtaagaattagagcacttgtcttggatgacatattaaactttgctatttgaatattgcctggattttaaaatactaataaattaaacttcccagtatcagtaataactttgaaattctttccttctataagatgaatgtaattcataaagatgtgtgttaataaacccacattcctgatttttgtgtttgttgttattgttggggtttttttgttgctttgtggtttcttaaccagccttgaaatttagaagttgtgactttttctattctctcttcccttttctgttggggaaggtgattttttaaggtaatcgtagttttaacaagtctgttggttttagggtttcgaaatcggaagactgattctgttaatgcagttttttcctatactaaagtggtacatggtcaaaattatagctgagcattgccattttcaggatgtggaattcagattttataagaatttacatattaagatttcaccagaatggggtcatttggttaatctcctttgtatttaattaaagtataaggacaactgggtttgaaagcagcttcttactggagataattattttgctctgtgaccagtttctggattggtatattcccaggaaaccttattcacgtttgacttagaaaacactccatcacccacataagaatatctgatggttatacattttctgagtcatagaattaaattgatagataaacagtctctcaactttttccattgagtatcttaatgaagcaagtcaaataatgaatttgtctaaccaatttttttaatatctttaggcaggtaaagtgaggaaacatgcaactgaacaggaaaaaactgaagagggattaggccctaatataaaaagcattgtcaccatgttgatgctgatgctattgatgatgtttgctgtccactgtacctgggtcacaagcaatgcctactctagtccaagtgtagtcctggcctcatacaatcatgatgggtaagaaaataactcggatacaaaaacattttatacttacacttctttttcgttgtctcaaaggatataattaaaaaatagaatgttgtttgtgagattctgcatttgcttgtttttaattttttattttaattttggtaggtacacagtaaatacataattttatggggtacattctatttatgtcttttgatacaggcatgtgtaataatcacgtgtaaaatggggtttccatcccctcaactatttatcctttcagttacaaacgatcaagttacactcttagttatttttaaatgtataattaaattatttttgactgtaatcacactgtggtgttcgtacccgttaaccatccccgtgcactctcccccgcccctgccagcctctgccttgtgctcctgtgaagctctgtatttgaatctacctttctttgtcctctcctccaccttggtgccatgggtagtaatcattgtatttcatgctcttttccagaatatttctgcatgcataatcatatacattagtttttctcaaatgtgtggtctttgtacacacagcatcatcattaccatgaaacttgttagaaatgcaaattcttgacctcaccctaatgttacagaattagaaacctggggctggggcctagcagtctgtggtttaatagacctaggtgattcagatgcagctaaaatgtaagaacagctgatttatgtattgccatggctttcaactactctttcacttgggagcttattaggcttgtacactattaggccctaccccagaactactgaatcagaatcggctttttttttttttttttaaatacaagatatgcaggtggtttgtgcacacacacattagtttgaataacaccagtctagctcttcattgtttcacttttttttt

SEQ ID NO: 9778 - DNA, 6000 bp, Homo sapiens
tcacgcctgtaatcccagcattttgggaggccaaggtgggcggatcacctaaggtcaggagttcaagaccaccctggccaatatggtaaaactctatatctaccaaaaatacaaaaattagccggatgtggtggtgtgcacctgttgtcccagctactcgggagcctgaggtaggagcatcacttgaacctgggaggcggaagttgaagtgagccaagatcacaccactgcactccagtctgggggacacagtgagacttcatctcaaaaaaaaatgttattatacacactgctacaatttattgcaacaaaagggtacaatgcaaggtcaataaagggaaaaggcacattgggtggagtctagaggatactgggtaccatctttccatcttctcccaatgaaagtacatgggaagcccttactcccccaacaatgaactgcagcaacatgtgtgaagtctttctgccagggaatctccctgagcctaagagcccagcattgttattgggggttgaacatgaagccacacagtgctttcatgatttaactgtaattactgaaactgcattgcccaatgtcagaccccaagaaggaaagatgttcagcataaggcataagctatctagacaagctggtacaatgcggttcaaggttccaagcatgccaaacactcttcttaaatatttttttagagataaggtcttgcccactgcagccttaaactcctgggctcaagctatcaggaatggctcaaccacccagggcgctaggactacaagtgtattccaccatgcctggctaatttttttgtttgtttttttagagatgggggttgggtctcgctatattacctaggctggtcttgaactcctggcctcaggcatttctcccccctcagcctccccaaatgctgggattacaggcatgagccactgcacctggcctcaaacactcttaatggtagcacagggaacactccaaaagttcaattccagaagccagccaaagactaatcactcaagcagtcctttctgaacatgtgcaagacataaacaaatcagggtgtctgggttaactcgttctttcatatcaggtattgccaaattgtccttcagaaaggttgtgccagtttgcatgcccatcagcaatgtatgaaagagcttgtttccccacagcctcatcaacaaaatgtgccaatgtgataggtgagaaatgtcacagtattgctgtaattagcatttcagcaaattttgagtgagtttgaagatttttttcattgaatggcatacttttacaagttatattttctaattgttttgggtttacagaaatgcaattgacttttatgtattcacattatacgcagctaccttgctaagctctcctattgtttctgattctctgtggattctttggggttttcttttcttttcaatctttatgtctttaatttctctttcttatctcattgcactggctagggccaccagtataatgtcaaataagtaattgtgggcatctttgtcttccctctgattttaaaagggatacttttaatgtttcctttttaggatttttttttttgtggaggggatagttttttcgttattaaattttttcatttttcttaggatttttctttaaaaatcacaaattgttgaattttatcaaatgcgttttctgcatctataaacatgatcatatggttttctccattgatctattaagtattgatctattacttatataaatataagtatttatatattatctaggccaggcacagtggctcaggagcctgtaatcccagcaccttgggaggccagggcaggcggatcacccaaggtcaggagttcaagaccagcctggccaacatggtgaaaccccgtctctactaaaaaatacaaaaattagccaggcgtggtggtgcatgcctgtaatcccagctactcaggaggctgaggcaggagaattgcttaaatccaggaggcggaggttgcagtgagctgagatggcatcactgcactccaggctgggtgacaagagtgagactctgtctcaaaaaaaaaaagtatatatatatacatatatatatttatatatacacatatatatttatatatacacatatatatttatatatatacatatatatttatatatatatttatattttctaatagtaaaaccatctttgcatttctggttaaaactgtttttaactggctgtgcatggtggcagattgccaaggcaagcagattgcttgagctcaggagttccagaccaacctgggcaacacaacaagacctcgtctctacaaaaaatataaaaattagccaggtgtggtgggtgcacctgtagtctcagctactcaaggaggctgaggtgggaagattgcttgagcctgggaggtcaaggctgctgtaagccgagactgtgccactgcaccctagcctaggtgaccaagtgagacactgtctcaaagataaaactgtctttactatgatatatttttctctcaatgtactattaaatttgatttactaacattgtatttagagttttttgcatccatttttgtgaatgaaatgtatctgtgatttcctttttgtactgtaattttctagttgtgctatcaaagttaaaattctttgggagtatatatgtttgcctattccctgaaaaaaaattatataaattggacttcctttgtgggaagatttttttacttctactttaatttagtcattatagaacttttaagactttctatttattcttaaatctgttttgagtaattttgttttagaaatttaattcacctaagtttttaaattcattggcataaagttgatgttagtatccagttaatattttcagtcttgctatatctgtatattcctttttgcatatataaaagacttatttgtatcttcttttttattttattttttacataatttcactaaagatttgtctatcttattaatctattcaaggaactaattttgaactttgttgattccctttcttatacttttgtttctagttccttaatttttgtcttaactttactacgttcttcctttactttctttagatttattcttttgtgttttttcccacttcttatgatggttgtttagttgattaattttcagtctttctgattttctgttataaagcacttaaagctataaacttgccacaagtaccactttttataccacccatatgttttgatatgttatggttcttactgtcacttatttgtaaatatttttaaactcccaccatgatttcttctttaacttgtattcacaagttttttttttaacttaaaaacatatggagttatctctatctctatcatctctatctctatcttcattctatcctcgtgggttagaagactcaatattgttgttaagatataaattcttctccactatagattcaatacaatctcaatgattgtatttatttaatacaatcaatatttgaatttgcttacatttttcccatttttaccactcattattacatctccagctgtcctccagagatcattttccttcttatctttcatttatttatttaaatatggaacactttacaaatttgtgtgtcatccttgtgcagaggtcatgctaatcttctctatatcgttccaattttagtatatgtgctaccgaagccagcacccttcttatcttttaaaagttcaatcaggccgggcgcggtggctcacgcctgtaatcctagcactttgggaggctgaggtgggcggatcatgaggtcaggagatcaagaccatcctggccaacacggtgaaaccccatctctactaaaaaaaatacaaaaaattagccgggcgtggtggcgggcacctgtagtcccacctacttgggaggctgaggcaggagaatggcgtgaacctgggaggcagagcttgcagtgagccgagatcacactactgcactccagcctggatgacagagcgagactctgtctcaaaaaaaaaaaaaaagttcaatcaaatcaggtctcttactgtgtgttctctcaatttcttgttatctctataattacctttattttaccctagttcttgacagacaattttgctgggtatacaattctatgtggtctataattttccatccacattttgaaaatattcttcgctctcctggtttccgtgttgcttaactttcatcttctttttttgagacagggtcttgctctgttacccaggctggagtgcggtggcgtgatcatggctcactgcagcctcgacctccctggctcaggtgatcctcccacctcagcctcccgagtagctgagactacaggcacatgccaccaagcctggctaaatttttttgaattttcttgtaaagacagggtttcactatgttgcctaggctggtcttgaacccctgggctcaagtgatctacctgcctgcacctgcttctaacaggagactgctgaggctcttcattagtcagtggcctgccttctctccagctgattttcaagatcttttctttgtcattggtgtcctgcagcttcattgcaatgtgtctagccatggttttcttttttatttatcgtgcctaagttacatttcctggatctaagaatttgttttaaaagttttagaaaacgtattgtttttatttcgtctccatttctccttgtgggcttccaatttgatacatgttaaatcttctatctaccaagtctctttacctctctctcacatttcagcaatttattccagttcactgattctttgtgtcaaatttgtttaactttcctcttagtgtttttatctcaacaacaacaacttgccgttcaacaagctttcatttttaaaagttcataatcttccttccaaaagtgtctgctttttcctgattgttgttttaagttcattttcgtaattacaacctttaaatccttaaaaagttcatacaatagctgttctaaattttgtatctgacagtttcaacatctgcagtctaaaagtctgtggtttctggattctgtcgacttgtagagtggcttgccttctcaagctataatctctttgcttgatgtacctctgtgagagtcttgcagaatcaacttgaagaaattttcctttagagaaggctcgcttctgcctctgctctgagccaaggggtgccccgcaccaggaactgttaccccttctgagagttttggctcaaaacagagttttaagcttagtttcccctccttgctgctgttgcaaggtaatatgctgacagtcagtactgctcaccttcctccttccccactcctgcctttccagtttggctccatgctgcactgcctcaccactgcaccagccttggtgccccatctctgtggcccaggcttccagcctcccaccttgggcccacctcctggctacagccgacgatgcagatctttgtttgtttttgaagaaaaggtccctagagacctctcctaccttttgcaagaccactggtgtctcagtgtgtgtgtaaacaaaaagcttgagttgtggggaagttgtaggagagttcctaagaacttagtccttcatgacaacagaagcacagcattttctaaaacattaaaaatctcaattacactaaaactccaggatggttgggccaggggggaataaatcatgttaactaagaaagcaagggagggaactactgagaacgtcaaggttggaatccatattgcttcaagccagaggccagttcctagtcggtggctcccatgctggtctctgatgtttaggaagtggtgtcagcagagactgagctgcaccctttctttggacagatggcaggagaggagaacttcaaggaagagctcagatcccaggatgcttccaggaacttgaaccagcatgaggtagcaggacatccacattcctggtctctggagatgctgttacgcagattgagggctgtccacaccaagcaggat

SEQ ID NO: 9779 - DNA, 6000 bp, Homo sapiens; identical to SEQ ID NO: 3726

SEQ ID NO: 9780 - DNA, 6000 bp, Homo sapiens
ggtgaggggcacagcaaaaggggacaagagaggagctgagcccgagaaggggccttgttcagctgggatggaagaggcagcagtggagggtttctctgaggccctcataggcctgggtgcccaagatgcccagagctaaggtggcagcaagagtgcatacctgtggtacccccactgtgtgccagacctgcctggccactgtctgcagctgcagggaaaatgagaggtgcagactccagctagggccacggggtcggctaagcggcagggtagggattcagccccacctcctgctggactaacaagggggttgatccttggggctggctccagactcctcagccctcccccagagcattcagagccccatacccagtactcctgggaggctctcccctagccagttaggagaatgtagtatttatgtaaatgtctgttcatgagtgcagtgtgccctcagagtccactttccagcattcctggcatagccccctccaccctgccgggctccagaggagggagggagagggaggccccgcccccagccccctctcctcccactcctccctgctgggcaatgaggaaaacaggagtgagggaagagctgtgatgtggctggttgggggggctcccgcatcccagaagggctgacctcagcctgggaggaatgtgcaggaggggagggcaggggtggggcaggcgggggtagggccacagccaaaggcccagggttcttggtagcccctccctcagcacctccatctcagttctgacagggccctcagaagggaaggggaacaggcaaggaggggaggagctaatctttcaaaaaaggtgggccagggttccctgggaatgtggagaccaggctggggtgaggacatgcctgcagacgcttccccaggagatgcccctggggcagggccttagagtgtctgggaagttaggcctcaggtgatgatcctatggccgcccacgcctgcccccactgtgcctaagtcctctgggcagcatgacctggtacctacgtggccagaacaaggaagagttgtgacgttggagccacaagccctgatgactaaagcaggtgtgagtggggcgcccaagatcccatccagtccaggctgcactgggagggttgccacaaccttcctcagatgggtgtcccaccccaaccacaccacccggagtccaggcaggggcaaaggggcaggcccagctggtggccaggggtggggaggcaggtgctgagatttggcacaacaatccaggtttttccagaaggaaaagccaaggccgtggtaggccatgccactgacaggcagccccagagcaaggacccaggcaggtctctgcccatggaagctccctcaaaagagagaggtccagggtaggagtacaggcaggaaaagggaccccagctgccttgcctggtttgccccattctgttgagactcaggctcaggctgcctgattccagaatcctcgaggagttccagcccccagtgtgacccacaggcagtgaccttgctcctggagtgctgacctccatgggggcccctacccatggcctggcacactggacctggggctgaggaacagaaaggggaccatgtggaatcagggacaacttgacctcccatccctggagacctccattcctactcaagggagggtacacatctagaggacagaggacagggcacagcactcaatggggacagagacagtctagtccttttggctgggggttgactcccaggctattggaaagataatggcggtggcgggggggtttctgataccgtttcccagagtgaacacaggtggaggaaggtgcggggtgatgaaacagagacagggcccctgggcctggaaaaacataaggcagtgagggcctatgggggcacagtgggagtggatgggagcctctgaggcacttgctgatcctggctgcttgggtggaaagctgtaaacagccaaagaatgttgtctgcttgcatggagccaggagagcctgcccaggtcctctaaggctagaggcagctactcctggagtaggaaaaggccacatccaggaagcccacgagcccaggcagggatctgtccttccacttgccctcctgaagggccctgcggctcccactggcccctgttatttacctgccagctggccaggccaggccaggtataccaggtcctcaggctcaggaaggaggggcatagccccacttccacttccaggggacttggagatgtgccccccacctctgtccttgcttggctggaggcatccagggctgggcaacagaactgcaacacttgaaatgcccacactgccccatcagccttgggaggtggtaggaaaatgccttttgcggggatggaaggatcaaagcccattctcaagccctggtatattcactcaggtggacttcagggctccactctgccactgtcaacatacagtccctccagagaagtacccctcatgttacaaatggggcacgttcaccagactcagcttcaggacaagaccccaggtcattcccaactgaggctccgaggtgcaggagctccgtcctgtctgtaaaactccctcagttttcggctctgggtttggtgggggttgttcctcccacctccaacctagaaagagaagccagaggaagggaggtcacatggtctgccccccaacctctcagcagagatgcaaagctacctgtccaggatggcggactccagatgggccccgccctgtggtgcagaagtgagatttgctgctcctcctgcgtctgcccctctcctgccctcctctccctcccctatctggctgtcatggtagaagccactgctggccaggccactgaagtactaagtggcccaagtgttgaggaaggatggggactgggtcctgagggcccatccgacctccagttgagagcccctcccctgacctccagctgcccggccaccccagccggtccctgggaactgaggtggcagctgagctccccattatctttccccacagctccccacctgtggagggagaggttgagatattggagtccacgggtggtgcccccactcagtgattccctttgcctgctgagcccctggagctggggtttcttcctcccttgccttggctggccacctggcttctgggaccgccacctggggcacccttctgctttaaggcccaatatgggaggggtcgtccctaccagcccctcccttgtgcccattccactcccgcctggctgccgtctccagctggtcccggctgcctgcccggtcacccgatccgccctctaaactttacggcacggcgggcggtgcgtggggcggtggctggcctggtgggggcgggggctgcttcttaaaggagccgtcagagggtccccagcggccccagggtgggaaggggccagagtggagagatgctgctgcggaagtcctcggtggagtgtgagaaggcagccagtgttggcctggaagacctctagaacctgagaagaggcagcggcaagtgtcagcggagggaaggagggaggtgggggtcctggcctgggatggggccaggagctgggcaggagtgtgggtggaggggcctggaacctgcctcagcagctgctccacttgcttaatcccacctggaaccttgtcccactccctgggctcctgtgtccagcacctgcccagctgacccctgggaaggagggtgggcatagcagccaggtctttgccccagctgagggccagggggaggtgtctggctcctagagtgaaggggctcaaagatggggaagaactcaaggggtgagagaagtgaagggagaggctcagagaggctgtggaggcgttgagagggaaggccagctcagcgaggccaggaggctggggtgcaaatgaagggctgcctcaccttgcccctctttgattcctcaggggtgtggagagagagccctcaagctcaaatgcagaggctgcttcagctgggttgggagcagtccccaagtcagaggctgaggcttctgcccaggtcttgggtctcctgggtagcacttctccctctgaggaatggagtgattgatgctgcagttggatttgctcacttgcatgcccagagacatgtctattcttatgggtgcacacgtttgcacatgcacaaatgtgcaacacatctgtgtgcaaaatatgcacatatcacacatatgtactgcatggattgcacagtgccacatgtgtgtgcacaccaacccatatccacacatgtgcaatatgacacactatatatttgcacatagatgtgcacacacatgcacatacacactacacacatgcgcacatcacaaggggacactcggaaacacattcacaggcacccacacccttggctccagcctcaaaagtgtctctgtgtttttctgcgggactgtggggacactgccacctccagaggcctgaccccctcctgtcactctcactcttttgactggcttgttttgctcattgcacttggcaccctctgcatccatctgattccttgttggcactctgtcccctttcacatggggaccttgtctatgtctcccagtatccctcctcccaggtctaggctggcatgaagtgggtggcacattgtgaattaatgtctgtgagtgtgtatacaagagaggagattactgggaagggtgacgtggtgaggcgggcttgccagtgcagggtgaccctgagggtgtgcccagtggcgtgggtgtgtctgtgattgtggccaggcggggcaccctcggaggggagggttcggaagtggaatgcgaccccccagcctctttcccctaggggctgtaatctgatccctggggactccccccctagcctcccgccctcgccctcactgctgactcctcttccagatcctggggcagagtccagggcagctcaaggctcctccacacacacacccgctgaaccctgagcaccctgagctgctgagatggggcgggccggggctgccgccgtgatcccgggcctggccctgctctgggcagtggggctggggagtgccgcccccagcccccacgccttcggctctccttccaaggtaggtgcacctggcaggcgggagggcccagcttgaggtgggcaggaaagggtccccgtatggccagggggctctgtgttggctgttgccccatgtgcgtgcctgtcaccagactctggtaggattagtgggcactctcaggccacctccagttaaccctgtccgggcctcagcccccagcctctgcccacattctcttcgtgctttctcaggaagacccctcctgtccccacagcaacagaccttgtctctgttccgttcagtacccccaacaaggcgatactccttcagcagagcaacagggaagtcagagcccccttctcatgcctcctgtataggagggtggcccctgggcagtggcagtgaataggcagttctgctgagctcaggctggtggtggagtggcaggaaaggaactctcagcctgacttttgggagttggggttctggccatccctgcatgccagtctcccccaggactctggtgtccataagccttgcctcccagtgcgcccgcctggagacaccacctgtctgagcatgcccaagttcaacctgccttcctcttcctggggggatgtaccacctaccctggcagctccacacgtgcacctgggtgggcttgggtttgcgtgtgtaaactcacacacatgtaaactcacatgtgtacaggccaggtcctaatggcaaccttggccgatagagtcaccaccaggcaggacctgggggaggcttccagcatggctggcgagtcatcagcagtgtcctgccctgcagagctccaggcctggcatggtctccagactttcagcctggagcgaacctgctgctaccaggccttgctggtggatgaggagcgtggacgcctgtttgtgggtgccgagaaccat

SEQ ID NO: 9781 - DNA, 6000 bp, Homo sapiens
acttctgacaggttgtgttctgtgtcttttttttttttttgtatatggagttacttttaaaaaactgtacatataggctgggcacggtggctcacgcctgtaatcccagcactttgggaggctgaggcgggcagatcacctgaggtcgggagtttgagaccagcctgaccaacatggataaacctcatctctactaaaaatacaaaattagccaggtgtggtggcacatgcctgtaatcccatctactcgggatgctgaggcaggagaatcgcttgaacccgggaggcggaggttgcggtgagccaagatcatgccattgcactacagcctgggcaacaagagcgaaactttgtctcaaaacaaaacaaaaagctgtccatataattaaaataattctatgacaaagtgcttttataaaacacaggatcccttcctttcagccactgatttcagtgtgtgctgatgtgtgcatggcctacaggttaaaaagggtgctgatgctttttttctggggtctgggttcccactggttgccacatctgggtaaggttgccagttttagcaaatcaaaataaggatgctcagtcaaatttgaattccagataaacaatgagtaatcttcgagtataatcatgtccccctgcccccttttttttttttttttttttttgagacagggtctagctttgtccaaggctggagtgcagtggcacaatcatagctcactgccacctctaactcctgggctgaagggatcctccagcctcagcctcctgattagctgcgactacaggcacacactactgtgcccagctaatttttaaaatttttttattttgtagagacatgggcaggggcggggtggccatcctacccaggctgatctcgaactcgtgagctcaagcgatcctcctgcatcagcctcccaaagtgttgggattacaggcgttagccactgtgcccagcccccagtttttcagtataggtatgtcccacacaatagttgaaacacttccatactaaaaactcgttcatgatctgaaattcaaaatagggtgttctgtattttatcttacaaccctatccaagattgcacggtctcttgcaggccatgggagctgtcttgggggttgtggattaggcattgctctgcagccgaaccctgcagaggagacagaaaaagtctccatcttggctgaggcctcgaagccccttcatctatttagcatccaagctccccaacccttggtggccacctcttctctaaaatctttgctggtttttagccttctcacctggggggaaaggctttctcctcttagtttgctcatctgtggtatggggatacactagtacccaccccagagactgtggcgaggactcagccaggtcagtgcgcagagagcagagtgttgggaggagagagaggactgtggtgggaaggcagggacacctgtgctctggtggttacaggttataattctctccacatgagaagatcgcaaaggtcacaccttctagggtgaaaatgaactagggcctaagcttgagaggattcacaaaaatgaagtttggcctatggctccagtttaagcagctgcggcctcaagctcctgtgggccaggagggagccgttgctgcacttgtggtcagggcttcctgggccgtagggacactggccaggtgctcactcatagctcccggcagaggccctgtcaggccctggtggtctgaccagactgccagatccacctccccactaaaccagcatctctgatctgtcttcttccctccagggtcctggctttcaggctctgggagggtgtttgttttgcttgtattttttttttttctgagacaagagtctcgctcggtcatccaggctggggtgcggtggcgcaatcttggctcactgcaacctccgtctcctggggtcaagcaattatcctgcctcagcctcctaagtagctgggattacaggcgcatgccaccatgcctggctaatttttttgtatttttagtagagacggggtttcaccatgttggccaggctggtctcaaactcctgacctcaagtgatctgcccgcctcggcctcccaaaatgctagattacaggcatgagccaccgcacccagcctgtcttgcttgtttttaaaagacagctttttgagatgttatgagacaatgtatgtcaagggcctggcacctattataactggtggaagcaagtgccatgccctgtggttgacagggacctgggctaccatggtcttcaccccctgcagagcactaagtgggactctgaggtcttggccaactgtcttcatagctacccagtcctcacccccaagctgatacagtggatgggaaccatttgaagtgaaaatatgaacattatttaataactgatcttctgtaataaaccatttgaaaatattttacaaggaatcacacacacgatattttacaaagtttcttgacttttttgtcgctgttgtttttccaacttgtctgtacaaaatagaacaacaaaaaaagggcagagaaaaggaaatggccccccagtcccccagcccaaggtgaggggcagccaggtcgggtgggtaatgagaaggattagacccagctgggggttagacagctacctgatggggattgttttgtctgtttttctgttttttaaacttaaaatatatatttttctgtatatgtttatattctccattgagcacctgactacactacagttacacgcacgcccccgaaggacacagctggcatccaggccgggtgcacatggacacccaccctggcaccagcagtgggcatggaccacacacacacactgagaaagcgacaagcaacatgacattaattaacgaagccattaattaatgcatcaccctccccctcctcccagtccatctgagccccatcactatatccccttgccctcagttccccactggcccccaggctgggatgcctttgggggaaatgaccagaatgaatggtgtgaagagctgtgcccagtccccacctgtgtgtgtgtgtgtgtgtgtgtgttcagcaagggagggacagtttggcctcctgcaagcagggagtgtgtgtgtaggggtgggaaggagatagggagtgggcacaggcctgagtgtgtaagggccagattggcggaaggatggcccagccaggagagacaaagtcacccctgctaaggcaaagggtgatgtctggtgggggttcctctgccgaaaggtgcaggcagtggcatgtggtcccactgggggcctgacactagtgagaaatggttacaatgagcacctggagaggtgagggggcacttggaggacactggtggctaggggtgggacagagggttcttcaccccctgccccagcatttggcactgtttgacattcagctttagaaatgggaggaccagccaggctgcagctcagattagaggcaggtggtgagcaggagatggagtgtgcaggtgccaaccctcccaccaacccctcgccctgtgtaaggctttgtaagcccctacacccaccccaccccatagtgtgtgtgtttgtgcgtgtgcccagtggggtatgtcgaatgtgagtccagtttccatcctcaatgttccaggtgtatatggggtagtgtctgaactggtatcactgtgactatcctgacacctggtgggcttggggatgtggctgtaggcctgaaaggggcaggagcccatgggggctgccccagagcctctctcctgctaggatttaagctgggaggcacaggcttcaaactggccatctcaccttcctccactattctcacagaaaccaagtttgggcttgggtggggcagagaggccgggtcagctgaggcagggtcccccccaacataggcagcctccaggaagggcggcagcagaggcctggttttggcaccagtgcgtgtggcctccctgtcccatcccactggggggagcccagcaggcaagaagggtctggggacacttgaacagttcggaggtgagatgtgatttgggtgccaaacacctgcggcgtcccgctttgggactccccatcccaaggcgcagaccagactctcagggcctggccagctcaggtccttcagtgagggagggacgaggctctaaggcggggagtgtggggcaggagggtgggaaaggcgaagaggccgggtgaggtgggagtggaggtggggtggggcagggtgctcagaggcggcgagaggcgtggacgaggacttgaggctgcggccggggcggcaggcccaggaggagcagcagttgcagggagaccaggacgcccagcgacggcgggaaggaggccccgcggccacagtctgaggtatcttcctgcggggagagacaaggagctggtcggcctgggcgggcgcaaggccgcgggatttcgggtccaccgccccctctcctcactgtcgcgttgtagtcgaagcagatgtgcgggcctctccggtatcgcggtctctgcactagctcacactgctccgggccgtccgctgggcatgggtggggagtcaaggaggcggacggcggcggcggcacggagggggcgcgcggggcagagggggagcgggcggcggggagggcgggggcaggatacagtgcgtctccttctgcagcagccggccagcctcgcactggctgcacagcggcttctcggccaccacaaagagaagattggtgttggtcagtctctgcgcgtggaacagcctgcgggcagcccggaaaggcggggcgttgagtttgccccgccctgacccacccccatcctgcggccccgcccccggccgctcggaggccccgccccttccatcctcccgagcgtctcgccccgctcacaggttccgcccttggcctctggtcccgccccactgccagcacctggagcagtttccgcagtcgatgatggcgttgtaggaggcgtttaccgagccgaagtagtactgggtctgtttcatgacgcagctgctctcgcgcgtctcggggctcccctcggcctccgcggggtctgcgagggcccagagcgcctcagctccgcccacagaccctggcaaggtctccggcctccctcagtcgtagaccccaccctccccatggagtcgtcttagctcagattggggacccggacttgaggaggcgcctccaaagccctacctacctgcttggaaccagctgtggtagatgaggccgtagagaagctgctggaacagggacctgcagcgcacggggagccgagtgcaggtggtcagcagaggacgatgccatgccctacttctcttctgagccctcccggccagggagcaccttctctacccacctcccgctcaggactcaccaggcggcagcagaggtccaccaggccaggttaaggaaatctgcaacggtgggctgcagtggagagaggggcgtggactgccactgctgcccctcgccctaggtcacccccagctttatcaaatgtcagaggtagggggtcatctgtgggcaggtctcccagtcccccccatctccagtccaggcatctctggggactcaccacaaagacaccccggggtgcagcacccaggttgccagggggctgaggggcacaggctgcctgatagtcataggactccttgcgggtgtagaaggagttattgtagagtgccagcatcaggttggcatccacctcactgaagaacctgcccacctgaggatgtcaggagaaagccatggtcacagggctggcagtgctacacccctagaaggctcaaatccctactctcttctttcactctcttcctgatcctcacctggtcccactgatggttctggtttgacagcaccaggaatcctccatcatcaatgaggacacagagtaagtcctaggaggaagggaatggggaggaaaatggagaggggctgggccccggaccttccaccgcaggcagtccagtggttcagagttgg

SEQ ID NO: 9782 - DNA, 6000 bp, Homo sapiens
gccaagaagcaatcacacaagacacaagaatgtatgtcatcaaaggggaagccaggtgctgcaggcctttagggaaggggaggtgggggtgggggcacacgagtgtccatagcagcagtagcaatcagagaagtcttctggaggaggcagagacttgaccgaggctttttcaatggagaggggttagtgagaggtcagcaagtcaacaaggtagggattcctggtcagcgaataaacaggagccaaagcagagagtcagaaatgagcacagcatgttcacagtctaatgagactgctgaccacagtttaaagtgaatggtgcgagatgataaggttgaacgctagtcagaggagtttaggttgaatgtggaaggaaggaggaagaaaacattttttggtcagggaagtgacatggtgtgttttgaacaagatggattatttgtgggaggaaaaatggagaatgggcatcttgtgcatgacctggggtgtgagatggtgaggttctggactgggccatcagcaaggttttttgaaatgcagtgcacgcaggtaatcatgtctggcatgccagctcagtgcgttcaagtgggagtgctttataaataaggtcatggagattaagaccccacaatagtgtgttagcaacataattgggttgtagcacatgtagctgatttagagctgaaatcttttgttttagcctttcctcatgtcttgttggctcagctactaagtaattgtgtgtggttttgggcgagctacttaactcctcagtgtcttggttttgttgtctgtaaaatgagttttgtttttttttttttttagagttttgctccgttgcccaagctggagtgcagtggcacaatctctgctcactgcaacctccacctcccaggttgaagtgattcttctgcctcagccacccacgtagctgggacttaaggcgcacgccaccatccccagctaatttttgtaattttagtagagatggggtttcaccatgttggccaggctggtctcaaattcatggactcaagcccgccttggccttccaaagtgctgggattataggcatgagccactgagcctggccaaaatgagggttttatagtacctcgtaggcttgttacgagaattaaatgagttagtacatataaagtgcctaccctagaacctggcacacaggaagcctttaaaagatcttattatttatttattcagtagtttgcattatcatgggaatataaatatttaaattacccaatgggccaacgcatctagagctgtgctgaatcaaggccctcaaaaaaaaaaaatgcttgctggagacatcgccaagatgagactcattcagaaactgggatggaatgtcaaaaactccaattcaaggctgagcagtggctcatgcccgtaatcccagcacgctgggaggctgaggcagaactgcttgaagccagggcttgcagcttacagtgaactatgatcacaccactgcactccaatctgggcaacatagtgagaccctgtttctaaaaataattatttaaaaaaaaaaccccaaaccctcctgcaataccataaacttgttaagatctaacgcacaaaacctggagaccgaaaccacaatttaatcatgtcacttttgagctaaaacaacttcactggctctcactgccaagaaattgaatctggtcttcttagccagccagccttcctccacagatttgggttggcctttccagcctcctcctcctctagcccagggggtctttgcctcagccacactgtgctcctgctcatttttaaacacacccaccttgcacttcagtctcccctgtgcctttgctcttacccccaaagctcattcctcatacatcatttatgccctgtaaaagtagtcacctgtttttaatagactttattttttttaagagcagttttaggtttacagaaaaattttgcagcaaggacagaattcccatatattctctcccccaacagtttctcctattaacatcttgcattagtgagctacactatatacacagttataacactggtacaccccagtgttataattgatgaaccaatattgtggtactactattaacaaaagtctatagtttgcattagggtttatgctttgtggtgtacagtccaacgggtttttgacaaacgcataatgtcctacgtccatcatggcagtatcataaagaatagcttcactgccctagaattccctgtatgccacctattcatccctctttctcccggtcagtttttaagaatcagttcaaatgccctctcttctgtgaaaacatctcagttccctcagttacaattaatctgtctgatgcttgtatagcgctttttcatacttgttatagctgctatgtttgcatggtatgaaagaagtatacacggccgggcgcgcggtggctcacggctgtaatcccagcactttgggaggccgaggcaggtgtatcacctgaggtcaggagtttgagaccagcctggccaacacggtgaaaccccgtctctactaaaaatacaaaaattacctgagggtggtggcgcgcgcctgtagtcccacctattcaggaggctgaggcaggagaatctctcttgaactcaacaggcagaggttacagtgagctgaaactgcatcactgcattccagcctggacaacagagtgagcaagactccgtctcaaaaaaaaaaaaagtatacaaacttttcttctgtcattaggttgtccttgaggaaggaactgtgccatagatttgtcctgacatctagaccagacccttattcttaaccggtgccttatgaatgctggctgcactgaactgaacaatgagcaaatatggttcggctcagtcatccactagatacagtatttttccctctagacaggagctgctgtttgcaaatctcccccattccaaatctgagccagcaaaggtatcataaaacaaacttgctcagggaattttgtagaaaaggcctcaagaggcaaggctttagaccaggagttctgaaagtgacatgtgtacttgtgaatttcatacatgctccttggatgggctagtttctttggagggaaccgtcttctattcccttcagattttggatcagaagcagccataggagaggtggcccaggccagctttatattgttactagaccgtagggcgatttctcgcctctccagtctccaaaaacaaagcacaaaaaaggacaagagcctggttgttttcatcctcacggaccagacaccccctcaggaaggcctctggagagtcttctgtctggtccccagtctctctgcccaggtgccccccaacaattgaggatgactagtgtgttctctttgggtaaggagcaccttcccataaacacttatttttcttaattcacgctgagcttttactttattttcgctttaaagtcactgttctgaaacgttctaaaacgccgtaggaacatgcagataggaacaaaagcaaataaatcgaatcctgtgaagtaacaaagcagacgcccttctcctaacaggcagcacaaagctaaatgaaaaatatcagtcatccactagataaagtattttcccctttagacaggagctgccgtttgcaaatctcccccaccctaaatccaagccagcgaaggtatcaaaaaataaactactcccttcagctcccagactggaggcaacagtttcagcagcaccgtctatttccttgaacaacacgagcggtttgaaagaccttggctttgacttccctgtacctgcctccaaacacacgtgggggcggggtggggtggggggagatattgccccccatccccgttgccttccgcgacgccaggccaggcgcagggcaggggagaagatggggggcgccctggattcgcggttccagctgcaggcagttacctggggtagtgagtgctctctacagacccgggctaccccaacccccccgattccagaaagggccggagaaaagcagggggcgcctgccccgctccggagcagccagggagcccggccgagccttgacgaggatgagctcggagaccgcagcagctaccgcccgctagcacctgagctcccagggggcggggcctcctccaggtgtgcgcagaggaggccggcgcggagtcggggccggcgcgggagcccgagctgtcccccagcccagaaatgcgcggggaggagcggttcatccgcaccccagcgccgcgggagacactggcgccgcctgcctcctccgggtcccggggggagagcgcaccgtgcggcgcggagggggttaaccgggcagcccgccgctggagcgcgcttaaccctttggagcccgcaggtcagccgggccaggctggggtggcggcaccccgagtcccacgcgacggccaccccgagcgcgcaagtggtgccgggcagaaccgcgcgccgggctgcagacccgccggggcgcggcgcggcgcgggccgtgggcggctcggggcgggcggagggcgggggacggcggcgggcgcgcagcgtcgccagggcgaagccggcgtgcggcgcggcgcggcgggcgcggagcgagcgggcgggcgagcgcctccgtccccggatgtgagctccggctgcccgcggtcccgagccagcggcggcgcgggcggcggcggcgggcaccgggcaccgcggcgggcgggcagacgggcgggcatggggggagcgccgagcggccccggcggccgggccggcatcaccgcggcgtctctccgctagaggaggggacaagccagttctcctttgcagcaaaaaattacatgtatatattattaagataatatatacattggattttatttttttaaaaagtttattttgctccatttttgaaaaagagagagcttgggtggcgagcggttttttttttaaatcaattatccttattttctgttatttgtccccgtccctccccacccccctgctgaagcgagaataagggcagggaccgcggctcctacctcttggtgatccccttccccattccgcccccgcctcaacgcccagcacagtgccctgcacacagtagtcgctcaataaatgttcgtggatgatgatgatgatgatgatgaaaaaaatgcagcatcaacggcagcagcaagcggaccacgcgaacggtgagcagccagagcccgggcacccgctgccaaatccgatcctgtcatggtcctccagccccctcccccttccccgcggcgctggatgggttgagggggttggagagggtgctgccagctcggtgtcgtctacacagagaggggacatgcgtgacagccactccgcgctcccctccaggccctgaatgtcagagttaattctgcatttgtggggtgggggcggccgtggagtgtgtggagcgcggtgcagccggaggggcggcgagtcggggtgattcgggttcagtgtcctcgggctcaactttccttcaacgcccccgagcgatggcaggagggccgcaagtcttcagccggagcccccttgccagcctcttctcgccttccactcctcccccgccccctcgttgactaggaagaaggtccctggtggcatccggaaaattctaggattgcccggtttcgccctccgcgccggtgggtgaagcacacccatcccctcgcgggggaggcccggcctcggtatcggggaaaggggttcgggtggagcgtgcgttcccgctcccgtcgccggctgtgcacacgtcggtaacctagcaatgcccggggagccgctgccgctgtggggctcccctccccagctctggcccgggcaccacgtgcagcttccacgccggccggggctgggtcgagggaggatggagcagctcctggccagccctcccctttggagaccgccagtgccccccaacccctgtcggctggaagcctttccgggtgagcgctcccctagggagaagcttgacatgactcgactc

SEQ ID NO: 9783 - DNA, 6000 bp, Homo sapiens
aattagaaagggctgcttattagtagagtttacagagttgtctcctacacatcagaaatgctaataattgcccatctttgatggtactaggatgataattttacaagtctgtctttgcttttataagattgaaaagtggcttggatcatagcagtggcaatactcatcagactataaaaaggcagaaacttaaaaagggagagaactacaaaatcaggaaacattgccattcccaatttctcaaaatatgacatgttttttatttaataaaaattttgtgtggatacagaatcacagagaggaacacccacatgacttagaattcaaagtatctcatgtatgagatttcttaatttaagccttttctgtgcctgctgaataccagtgggtgaagaatgccttcaatgccattttggcatttctagcaccctgtgtagcttgataggattctttatcctgacatgttatagtagtcccagcttttcttgtagaagaaagtccactctgcttaacattaattttaagagatattatagtagaactgaatataaacagactttttttgtttccatatgtatgattaagtttctctatatacaaactagagataaaacaacttgctccttactatatgtggaaggctgggggaattctttctatgagcaataatgataaatattaacattctgtgagtgtctactatttcccagccaccatggttggcattttgtattccattgttttatttaatcctaagaagactctgtaaggtattatctacctttttccttcccccttcccaaccccttttttttttttttaaaaaaaagactagtcaagtgcagtagatatatgcttttttttttttcagataaggaagctgaaatttagggaagctaaataatttaccatttatggtgctggtaaaagtatgccatgtctgattccagcaccttgactttcattacttctctttgatcttctaggaggaagatggaaatgttctgaagtctggtgcattgcctagaagtccttcagcaactgaaacctcacttctgtcactctttctcctcgttttcccttatctcttatgctctggtgatacgaacctacttgcaattcccttaaagtcctgttctctcaagtctctggacttttgttgggattgcttcttagcttaaaatttctttatcccaatagcatcagactagctgttctaatcctttcaagtttcagtttaaactactctgccatgtttccactactcttgacatactccattacagcaaggatctttctgtgtcatcacctaaatcgagcaacttgagggagtctttttgtttcttcattattgtatttccaggacctttcaaaatatctatttcacagtatcaattaaatgtttatagaatgaatgtatgaaagaatgcataaatgacttgctattcgtgcaaaaaaaactcattagggatctgtggagggtcctatcttattttattccttaacagcctaaaagttatcagaagtgaaaacttttcatcctctcataagaaagctttccaacatatcctcattttgaatagcatacctggaacacagtggtagcttgacacatatttgttgaattgatgaagagcttgaaaaacgaatataacgtctttattatataatgcctattctttccagactcactttgtgtcccgcctactttatcctctaataatgagtaacagtatgtaattttcattcatgcatcaaatacttatttatccactattatgtgccggcacattggtgcactgtttcaagtaggctccttcttttccttgctatccgtgtttgtggaaattcatgaaaccattcagcgaataccatatttattgtggttttcctatcttccttcattcagttcagttacttctcccagaccatccctgaccccttgggcagctagtgcctgcctctatcttagccctgattacatcaatttcatgtttgtcactccctaccctcatttctaacccacaataccgttatgatctcagaaggcaggaattgaagtttggttcagttatgtgtccccagggcccagcaaaaacctaggacacggccaaactgtctatataagtattgagatgaataactgctactttttctttctttctttctttttttttttttttttggagagacagtttcactcttgttgcccaggctggactgcaatggcgcgatcttggctcaccgcaacctccgcctcccgggttcaagtgattctcctgcctcagcctcccaagtagctgggattacaggcatgcgccaccacgcccggctaattatgtatttttagtagagacggggtttctccatgttggtcaggctggtctcaaactcccgacctcaggtgatccgcctgcctcggcccccccaaagtgctgggattacaggcgtgagccaccgcgcccggcctaattgctactctttattgaacaacatggattaacattttgaagtctcaccacatcaagtgaattaactattattaacatgtcatccatgagaaaaaagaggcttgaaaaagtttagaaacttgcttaaggtcacacagtggtggagcctgttattgcaggaatctgaagaatgaagtcacctttgattctaaatgagtaagtctccttctcactattttttcttaaagttttcatttagcccttgcaaagtcttccttctttagaccaatgactcctcatcttgatattgtaagtgggggaaataccctcttttttcactttggaaattattcaatctctctttggaagaaacatgattttaaactttctggacgctccttctgtggaagaatccgcgcaggagccctgggggcacataataggttcagtgagaaagactgtcattcgaaatggaatgcgggaactaagattttttttttccgggaagaaaacataacgaatttagcagaggggagaatggtccttctgttaggtgcacaaatcctaagacttcagggagtttggcggctcacacttaaggtagctgcgggtgactgtgttgcccacagctaagatggctgctaatgaccatctcctttggctgggtctgttcttttgctcgctagtattttcatcgagaattaaacagaataaaatttagtaaaagttggcacccccttgctaagtagataaaataagaaggtggcactgtttgtttgaaaaaccttctacggcgcaaattgttcttgcccttaaccaaaatggtcgttaaggttgtcccgaggtttgaagcttccagcccttaactaagatggcgcctggaggcccgttaaaaattaccttgcccttttttctgccctctaccaacacggcttccgtggcgtcgttcacgtgacattcctggactacggcgcgggagagggggtaggagggcccttgaagggtgcgcgttcccgtggcggtgcaccgggtaggtttcagtcagagtcactatggcggccggcgctggcaaggtaagctgaggcggtggtggcggctagggaggtaggacccgtcgtggcgtcctggctccaaatcctcgtagcctgcttgcggagaggtcggcggaggtcgtgcctagcggtgtgggctggcgggggtctggctggagggggcgacggctgaggcgggcgggctgaggcgcctgacggccgtttgttttgatgttttccccaccaggtcggaaagtttcctgcctcgtcgggcgcagcttgagcttgccccatcggccgcgatcggtggaggctgcggcggatccagcccggggcctcaaggcctctccccaacctccgggccagtctccctcccccaccttctcgtccgccgggagctgcggctgccgtccctgagatgcgaccctcgcgggggcgaccctgaggggaggcggcccatgtgctgagcggcggcccagaagcctaggcgtccggggaccaacttcctgccgcctgggaactcgagcctcccggtgtcgcgcctcgctcggtccgcaccggcctgcggagccgggtccccgccctggtcgcggggacgctcgccaggtgcccaggagtcccgacttggccactgcccgcgccccgccggcctccacgcctcgcgcggagaacctcagccaccgccgtctcggatcgtgccaggccggggaccgcgtcccccttcccggggcggcctccgctcagcaggggcgatgcagactgtcccgccggccgtctagagcccctccgtctccgtcacctctcgccccttcactccgggcgaggactggcggtggctgcccagaggtgcccagccacaccttccttcggcccaaaaggactttcctggccgcgccgaaccgacccttcattcatgctgcagtgctgcaacgtttccgccaccaagggggaaaagcggccgcgatctcaaaccaaacacaagaattggcgtgtgactcatctgcttggatacctccagtccccaaactgtgttccaggagttttcttggccgaagctgcccgatgtttgagccttttcttcccagagaagaagatggactgaaagctgccagttggggactttttgtgatcacggcgttgcagcgttttaaaggaggtgatggggcttgcgctggcttgtcttcccacccaagtgaagagttgatgttcactggttatgcttagacaatgtgcagtttgtgttaatttaaaattttgggtgggataggggcataggcttgtgaagggcagtccggatccggaggaactcctctttgtccctggtaggagagacacccccagtctatcctcgatgccgtcagccttggccatcttcacttgccgcccgaactcgcacccgtttcaggagcgtcatgtctacctggacgagcccatcaaaatcggccgctcagtggcccgctgtcgaccagcgcagaataatgccacttttgattgcaaagtgctatcaaggaaccacgctctcgtctggtttgatcacaagacgggcaaggtaatgtcaccacattgtccagcggcattgtttaacaaactttttttccccttttgccctccctgagaggactaatgtatgcaggatcccagggtttgcatccagaggaggctttgcgcaaagccacgaatcaactgtttgtgtgcctggttctagtggaaatttgattgaggtggttgaatggaaaacagagaaggtattgtaattaaaagcctcaggagggctatggcatcttgataacgtggtcattcccagtgaaatcccaaactagatagtgaaacttggcgtcttgcttttagtctgtttagaaaggtgaattcacagttcagcgctttattaagcaagcagcagttctcgaagcaattcggggaatccgtggccattattatcccggggctcaagtgtcttagtggtgaaatgtagttaacacatagctttaggtgagttcagatcaggacctttctagtaaggataattgctgatataaacctaagatttttgaaaggtttgatacatacttgcccttggaggagtaatttgcaataatcaaagctaatttaattaagcatgaacaactgtaactttatatattttcagagttttttttacaagttggagaacatacacatattgcgtttgaaaatcactttttgatgttccctgcagcacttattaagtacttaatgcatacttacagaggtgctattcaaaagttagtgttaggaaataaacttactttctgaaattataccctattctgtcaattatagcattacttaaatgtgatacgatgaattcagtgcttttcattttaagcgtaaccaatttagtatttttatgttagtatcgtaagttactatacatgtatgtgcttttattttaagaagtgaagaaagaaattaagatcctttccatttttaaaaactgtttatttatgtttgtggagagtatactaaagagctcatctttg

SEQ ID NO: 9784 - DNA, 6000 bp, Homo sapiens
ccttattataattactgttgctattattattctctggggtcaatggatccaatcctttggtgttagttttggtcctctgatttgcatgtattcaagcctaacataacttacaaaaatctatttcatttgaaacaaatatggaaacagaaatagtaaaagcattttataatttaagttcacattggccatccatatatgaatttttatatcagttgtatttgttaattaagaatgatcctatttgaatgctaagattttcataagaagcctatgaaatcttatgatgtgatgaacttttaaactaaacaaacatgtatacatattcttgcatgtttttttgcatccaattaagacacaggaacataagaaagtaaaaatgctttatttcatctttggattgagagataatgctatacttattctaacattagagtttttgaaaatatttccacacaatctcctgtcctgtgtaccagtggccctatgcaagatcaaacacacaaacaaataaacgcacaggcatgctattggcctttgctttcatattcacttacctaaggaaagatttggaaatttcaggttagcagcatgagcagagagttaaatatacaacattttgacagacttccactcatttccattattttagatttcataacatacgggtagtgtttcctcctgtattaagttgctgcagataaagttttaaattagttttttgtctttgtcacaaaagacatgggaatatgaaacccaggtatattttcctatgagaacaagatttaattagcctgaataatgcaagttcttctattgcagcttggtagtttggtttgtatagtttgactcaagattaaccctctttgagattcaaaatgcttggttttgttacttgattttcatttgcgaacaaggtatattttcctatgagaacaagatttaatttgcctgaataatgcaagttcttctattgcagattggtactttggtttgtatagtttgactcaagattaaccctctttgagattcaaaatggttggtttgtaacttgattctcatttgctgatttagcaaatgttgagctttactaaattgggctgaatgtatttcttactacagtgtaagctttgggaagacaggaaacttggcaagctgtttacagtatctagaacagtaccagggcacaataggcactcagcccttacttgctgaagtttctctaccttggcaccattgacattttccagataattctttgttttgagtaactgtcctctgaattgtaggatattgagcagcatctcttgcttctgccctctggaagccagtagtgtcatctccatcccctgcccccacctcgttgtgacaatcaaaatgtctccaaacattgttacatgttttccagtggcgggaagggcccaaatcaccctctattgagaaccagaggactgcagtaaataaatggattgccttggcatatcaaaggaagtattcatagctatgggtccctggctcaaaacaaaagagaatttggaaattatttgatttacataatcaacactggccactaaaatggatcatttatgccccaccaaagttaactttatccttcatctatcatgatagattcatcatagtaagagggaaattatctttcatcatcttggggcaaaagataatgggtcacccttaaccactgatagtaatattgtggcagtgtttatatcatctgtcctatctcccctaatctagttctttagggaacccaatgttatttccaggtctgaatacagaggttctaacccaaagtctacaaaatatttaacattgcaaatgtgatatgaaactctgggttattttggtgatgcagctgttggaagctcatacatttctggaataggaaaagcatcctctgacaatgtgcaattgttgtctaagctattacactgccatttgccacaattctgacttccttcacatggtgtttggagaactggaaaaaaatatgccaccatattagtcagaaggaacactgggtgtgaagagagccctgagggaataggctcagtaatcacacttcctctgtgccaagttttcaattcaaataatctgcaagtaggcaatattttaaataagtctctttccctgtataaagagatataaatatgtagatgaccttaggcatgttacatagccattctaaggctggatatactatctagaaaaggggaaattattatgatacttaaatgatgtatataaagcacttagcacaatgcctggcaggtagcaggaactaaactggtaataggtattacaataataattatcgttattaagcatatggaggagatgtcataccctgtaagctggttgactaccatgcaaagaggatgaacacaaggaccatgagatcatacgaacctagggtgaaattttggttcggctactttactagctgtgttatcagtcggcttaggttatgttgtgctgcagtaacaaaagacctaaatttttcagttgcttacaccccaaaatgcattttttgtttgctcagcttcatgtccatcaaggtctggttgcagatctgcctatgtcatccttacactgggacccaagctgtcagagtaacctctatatagaaattatattcatcgtggtagaaggaaataagttggcaaatcacttggtggttcttaaaacttctgcccagaaatgcacacattaccaataaaatgcccacattttactggtcaaaacaagacacatggctactgctgggtccaaaagggcaaggatatatagatgttgaggtgcactgttgagggcagcaggacattgctacaatctaccctgcctctgatatggacctctgagtcttcccctttgcttctatagaagtgatatgtaactaatacatgctgagggcttatgaaatgcagactgccctagatgggctatctgcaaaatctcattgggttctcacaaaaaacagttaagataggtattttggctccattttacagattaaaacaaagaaacaaactgaggtcttgaagaggttaagtaacttcccccataagatcatatacatacatggtagggtacacactaagtaattgatagtgttagttccccccacccctcccccatagttgcataatggcttatttttgaaacaactgtttctaattgttttaggctctatctgcatgtaggaagagcagtaggaacaaaactggctgactgcagatggtgcaaccagtccactggagttcctactctctaaatttctagtttttctgcagcaaaattcatgagcagggggcatttacactagaagctgcctccccctcccagacagcaaattactgatttccgtatttctcatctacttctacatatcaaatacccaccccccccaccaacacacacatacacacccatgaactccaaacctttttggcaaatctttatagtaaacagatggactatctgtgttgctgggagaccactcataaatggaatccagtccaaagggagtgagaaggaagaggacatatcactacttgatgtagtagctaagagctctcctctccttcttcttcttcctcctcttccttttttccccttcttcttcttttgtttttctgattttaaaaaaatcaattctgacttcactacctgctagctgggcaaccttgggcaggccactatccttccatgggcctcaatttcctcatctctaaaatgggaataatattattattaacttatgggggtttgtgaatattgaatgaagtaatgtttgtaaagcccttagcacagttttcagctcatagaaagaactcacttgtttggttgttgttgtttttattatattcagcaagattagcccactaagagtaaacaacgtgaaccacctttcactaagtttcaagaaaacagtctaactttggaggagggacccagtgttatatttatgagtttgacaagggagttcatttgggggtcagatatcaggcaaaagatctcagtagaaataaaatgagtttgaaaggtacctaaatttcattccctgtttagcctttcatgagatgttttaccttggccatttcatccttgctaaatctgttttccactggcgcatggtcccacattcaagattaatttgtttccacctcttctctccaggcagtttcctctgtcctggtcctctctctggcatccacaggccaagatggatcccctgccctgtgcccatggcccctgtgctctgctctgcgccactgtccagaccacattgcaagttatttttccccttttgcttcccctgggggaagtgacaatgcttatcctgtttttttgatgtaccccagcacctaagcactgcctgcccacaggaaggatgctccataaaggcttgaaggaatgaatgaaagagccaacaaatagttatttttttatttttatgtatttatcattattattattttgctgtttggaagtcatcagaactcacacagatgtctcaggtaaagtgtgggtgtcttcctcctacctggaaaccccttcttcaggtggacagccgtcttgctgatggtgccaagcccgctttcccaaaccaacagacccaaagtttccccggagccagagggcaccgggcgcacggctgagcctgcaccaatgtctgtgggccctgcctcgcccacctcctcgccctcccctctggagcgcggctggccaatgacagccttcccctggctccatgggtttccccctcccctgttgtatctaccctgccccagctcttccctgcccacccctcgctgactcgcttcgcttccccgacgcgctgggttcccggagcgcagagcccagcgttagcgggtgggctccccgaggccccctgccctcgccgggctgctccagggtgtcgctcctctggctgctcccgaaggggcttctggccctgaggacggtggtgccaagcgaacttcatttttaaaaagaactggtggatgagaagagcgagcgagggcgagctatggaccctgtgagtcaggtgagacagaactgggcagggcggctggctgggagcagggggcgggggatgccgcggcttgggagaggcgcccccagccccttcctcacgctttgctttctctctctcgcctcattcccccaaagctggcctctgcgggcaccttccgggtgctgaaggagccccttgccttcctgcgagccctggaattggtgagtagcagtgtgtgtgcagggaggggcgccaggcagccagctatcaggtgaggagaggtcggatggggtgctccctgctcagttctgctccaagccggagattcaaccctcaagccggggatttcaatcctgccccctcctaagatgccgttccaaggtggtgaggacaaaatcgaggcaccctgcttggaggcgggagtgtggacgcatttttgcaggggcttagacaagtgtcgtctcacctcaccgcttgcagacgcgcaggggctgtggaaagaaacctcccccttgggagataggggaggggggcgcatggaagggctgccgctgggttctggcccctcacctggaccttcgtggggatgaggggatgggtggagggacccatagttgagcggaggagccgggaagacttggccaagctcagaaagttggtcagaactgagacagctcctctgcgggactgggatgctggaagcgcgtgttcaactgctccgcgggagcttcagggagggaaagatgctgcgaagctattacagactgttataaacggcggcgggtagagagcagaactccttccttccctactatagtttcttttctctggccactcctctagggcttttctgattatacccagaagagcccaccagcctgtttgccatggctttcttcagcgactgggctttaggaagttgtattccacttccgtgaaaccaccctgacgctcttattgcaatt

SEQ ID NO: 9785 - DNA, 6000 bp, Homo sapiens
tttgctgccaaagaactcctttttaattttagtttaggttttgcaatttactaagatggggctgagggggtaatggaccttcttgaactgacactatgaagataaataaaatctcatccatgacctctaaggaacctctaagtgacttttaaaattcaaaattttaaggtatacacaattaaagaaatttggcctcaatgttacataccacttactgtaatatttgtttattcaatagttatgttaatttggaagtatcaccgaactcttcgatcaagataaataatgattttccaaatagattttggactctaaaggaagaaagattttctttcttgaaaatacgtgattttattctgcagagaaaactcttttaaatgaactattactatattttagtcaacttaaattcagatttataacttcatgtaatataccaaaaatgctattcataaatagctacacagacagacttatatagagacaagtattggtgaccacttcaaaatgaatcgaatcaaatcagatacttagaacatatttcagaagaacaatattcattttatcttggctccctcagatcctttctggaacaaagtcaagtgtaataaagaaaaaatcatgtaggggcaaatgagccgtctctctgtgatcaggatttttaatgcttcacttactttagttgtcctgtgtccttttgtagataataacacatacgtgtcatttaatgtgatgtttctgtatagtataataagacaatcttatatagaaaaattcgagctgagcaatggctttaaagaggttcttaaattttgaagaaaaattgattacatatttctgtatattttggtacactgcggttttcttaaattgatcagagtaatatattatactcttatactatttctgcaatgtggtagatgtcttaaatcaatctcaagttcttgataacatagactttgtattcaggtctggatttaaagcaagattgtgcctttcattaacttgggttgattatctaatcttcatttttctcatctgtacaatgggaatagtatcaaccacataagcctcttataggaatttaacaatatgatgaatttttaaaaactagaagaattccctgacacgtggttagtgctcactacatggcagtatatgttaaaattactatcatggatcaaacctttgatttttatatatatgctgccttacaattataacaagagcacgttgaaaagagtaaaaaagtggattagggttttgcagtttttaccacatccttggggaatctggtatgaaaaaagaaatatttaatatgttacactctgcagatttccttcatatggttattttatacttctgctggaataccaactcagaaattcaatcacaaagaaggccattggataaccttacccaaattagggataatgacagtttcttacaatctttagatgtattaaaatatataggcacattttgaatatataatacctttccaggttttacataaaagaagcctagatttccatctacatttatctattcagctgcttgtttggaaaagaaaaaaacaatttatatttagaaagacattgaagccagatccccatttgatttttctgtatcttaagctctctgatgtggtggtcatggggcttcattgttctaagccattgctgtttctttttggcttaaggaaaaccttaatttttttttttttttgctaaagcactgctaaaatttaatttccaacttctactagaagcttcagattttaaagactttcctttaattaaacatttggagtgagaaatccattttttatataggcagtgctcactaaaactgtcttaagtgtaattgaaatatgcacatttttctagtatagatcttatcatatatctcagaaggtaatgtctttgttcttttggaattaatgttgtccataacaaatttctgtctggcgactcgttactgttgctaatttagtgtgagatgtttggtcataatcctaaactatcatttgggatgagattgttataaaataatggttttttagtcacatttcatatcaaatgagacactgacagagcattcttttaaaaaaccagttatgaacttgactacaagaaaagcagaaaacatggattccaaaatgttttggtgaagacattattccataaggtagctagtgtatggcaaacaacaacaaccacaacaacaaaagccatttaaaaaatggcaccagtctaaaatcactggcttgctttgtcacttttaataggtaaagtagttaagaatgcaaaatgttgatgcttggtaaaaaaaatgccaatataaccaaagcgatttcccttatacaaagctcttctctgtatgatgtaatttgtcataccctacacaaggataactttctatgaatagggcaacattttctgccctaaaggaccatggcaattggtggtaggctgatctcgcccaatctatcccttctgtttcccacacacactctttctgcctctgagtgattttatagtttacttaaggaaaggcatttacagatggtgagtctatcaagtataaaatagaatctatattttgcctgataaataaatagtcatgagaaaacacttctagttgaaatcctccaatgtcttcctttctgtgaaccatcttaaaattaagggtcttataagtctatatgatgtgttaattcctgcattattgtattaggaagactattttccgaatatcttaaaaatttcacccgcgtaaggaaatttgcccgagataagctggtggtgtgtattatttggagacatgagctagacattgtaatcctgaactgggtaaaccaagcccaagtgtttaaaatgaaagttttcaagaattttaattactttccttttccagagataaaagagatgttaatagcgcacttttggatgtttctaaaccacagtgttatccaatttagacgtattggacctttggggtgggtttctccttaacggttaagccttttttcacggggtgctaaaacaatagcacattcagaattattatagtgagaattcaagtgattcaactttaacaaccgaatgcacttttttcttcacaagtaaatactgtagattaaaagtgtgcagaaattactcttaatgctttacaagaagagtggttgttttattctttcgcaagactatttcattaccgtaattttcaagcatgccgaggtgtcctaatgtctcttctaattgcttgaatgtcgctgacctttttttaaaagaacacacagcgcccataatatgcaagggagacctaagttaagtagcagcaccaaaacgtatccaccaaacaaaggctcttcctcagacggccccttctggagagaacctttcctaatattttccagtagggggaactaaagactcaccatccagcatttagctcggctcggggacctgcgtgagttcctataagccgccttctcatcatctgaacaagcatcaaacggctaccagcgagcctgtgatcacacgtgggcccggccgcaccggggcaccgccgacaccggcacccctttgatctaacgtgaccttccttcatcatccccggtcctgaatggcatcctttggtagtcttggtcttaattttcagagttttgtcgtctttgggctgaaattcggcttctttttgagcttccatgagctcagctgggctttcggctttccacacccagagcctatgtttaccgaatttccttctggaggtgctggtccctggagggtaaagacttcggggatccccctcccccaagctctgtgatccccgcttccccgtccttagcatcttctgtggaactccctcgccctgcgcgatcgcgcatcaaactcatcgtggaggggtcaaaaggcaactgagtaacataagaggggctgcctccccttcctccttcccttggggatgccgcagggggccatagatcttggctaaaatgagccgctggaggttagagaattctgccccctcctttttctcccccttgtgcttttgaatcatataggaagcatctacacacaacctttccagtccaaaaggtgcttctatttcctttcctttcctttccttcctcctactcggcttctcatctggctaaaaggtgaagagtgagtgagtgtgtgattttaacgcgtaatgaggctgcgccctgggtcctggaggctgatctttttcaagaaagcgcgtgcagctccggcagacggagggatgaataattaggaagggcttccatgaaatcactcacggagaaaattacctgcccattaaacgggacgcggcgaggagcaggagcctggagcccacctatcccctcccgaggcgggaaggagtgggcacccgggggcgcggagaaggggaaggagtcgcccggtggcctcggccctcggcagccggcggggctctccgaatttgttcatctccgtccccccggggactctcggctctccaggacccctccccactccccagcgggcgggtggccgagtccggaggttcagggctccgcgcgcccctcctcgcccccgcccctccccgggccgactccaggcagctctcattcctcccctcccctcccgcctcctcgccttccctcctagaagtccttccacccgcggcagctgccggaggaagcggacgctctgctgcgaggctgcgggggctggacccgggcgaggggcctcagcgcgcctggcgctggactgagcgctccctttctccgccgcgcccgggctgggctctcacgcccgtctctgctcgcgcccgcagccgcctggtgcactatcctcagaggcggcaccgcgggggtgtctgcagcctcggcctccgcccggcccctccctccctccctccctccctcgctccttccctgcctccctcaccacgtaggagttcggattctccacccgaatcgtcctgatttcccttctcctctcttttggaaaccggagaggtggagggagggcaacaccgctgcaaaggagaggcccgccaagtctgcccgcctgcaaagtgttgctttgacacattcttattatggaagttaagtaaaaatatagacatattaaaaaataactccggacgtggagctgctacggagaaggaaaccgggggaaagaaaaccagtaggcaggccaatggtttttcggcagcgcgctggcaagtttgtggaacactttctaggaattaggtcttttcctcccccttcatcatcttgacttctgaaggaagaacttggctttggattgcagtggagcctaaggagagagggttagacacactcgaataatccctctggctgggctgaatttgtgggaatttaggaagccagagtgctggaaatacagcagcctttgaagtaccctctgttaatttggatggatctcagtgtgccccgttcgagacctctccaccaaccccttctgatcttgcgatttgctcttcttgactttaattagtatctaggaaagtctaaactttggacctacctctttttttgatactcatttttgtacttttgctctctgggattggtttcttaaagaatctggatcctttttaatatgtcaaaatgagtctgctgatgtttacacaactactgctctgtggatttttatatgttcgggttgatggtaagttaaaaatgctttcatctttttttgcgccccccaccccccaatcccccaaaaccatttctttttgaatttgatgtgggttataaatgaaatgacattatgtctgttagtccgttttggcccggcacgggctccttgggggcagaggttttatttaagtcttttgtttctaaactgctgtaagtggaatgtgttggtagtcacctattgttgttattgttgtaatttacttcactaattaaggagttggataataaatgattgggctcccagttttgttagaaaaagaaatattacagtc

SEQ ID NO: 9786 - DNA, 6000 bp, Homo sapiens
ccaaaacagcatggtaccggtaccaaaacagagatatagatgaatggaacagaacagagccctcagaaataacgccacatatctacaactatctgatctttgacaaacctgagaaaaacaagcaatggggaaaggattccctatttaatatatggtgctgggaaaactggctagccatatgtagaaagctgaaactggatcccttccttacaccttatacaaaaattaattcaagatggattaaagacttaaacattagacctaaaaccataaaaaccctagaagaaaacctaggcattaccattcaggacataggcatgggcaaggacttcatgtctaaaacaccaaaagcaatggcaacaaaagccaaaattgacaagtgggatctaattaaactaaagagcttgtgcacagcaaaacaaactaccatcagagtgaacaggcaacctacaaaatgggagaaaatgttcgcaacctactcatctgacaaagggcaaatatccagaatctacaatgaactctaacaaatttacaagaaaaaaacaaacaaccccatcaaaaagtgggcgaaggacatgaacagacacttctcaaaagaagacatttatgcagccaaaaaacacatgaaaaaatgctcaccatcactggccatcagagaaatgcaaatcaaaaccacaatgagataccatctcacaccagttagaatggcaatcattaaaaagtcaggaaacaacaggtgctggagaggacgtggagaaataggaacacttttacactgttggtgggactgtaaactagttcaaccattgtggaagtcagtgtggcgattcctcagggatctagaactagaaataccatttgacccagccatcccattactgggtatatacccaaaggactataaatcatgctgctataaagacacatgcacacgtatgtttattgtgtcattattctccaatagcaaagacttggaaccaacccaaatgtccaacaatgatagactggattaagaaaatgtggcacatatacaccatggaatactatgcagccataaaaaatgatgagttcacgtgctttgtagggacatggatgaaattggaaatcatcattctcagtaaactatcacaagaacaaaaaaccaaacaccgcatattctcactcataggtgggaattgaacaatgagaacacatggacagaggaaggggaacatcacactctggggactgttatggggtggggggaggggggagggatagcattgggagatatacctaatgctagatgacgagttagtgggtgcagcgcaccagcatggcacatgtattcatatgtaactaacctgcacattgtgcacatgtaccctaaaacttaaagtataataataaaaaaaaaaaaagaaaagaactattgagccacaaaaagaatgaaatcctgtcatttgtagcaacattgatggaactgcaggtcattatgttaagtgaaacaagccaggcacagaaagacaaatattacatgttcttactaatacatgagagctaaaaaagttgatctcaggaaagtagagagtagaatggtggttaccagaggctgggaagggtgtgggaggaggatgaagagaggttggttaatgggtacaaatatacattcatatagaaaaataagttctagtgtttgatagcacagtgaggtgactatcatgaacaacaatatattatatatttcaaaatagctagaagagaaggtttgaaatgctcccaatacaaagaaatgataaatgtttcaggggtgatagatatcccagatactctaacttgatcattacacattttatgcatgtagccaaatagcacatgtactctgtaaatatgtacaatgattatgtatcagtaaaaaatgttaaaaagagagagcataggtgagagctctctgcttttatctaatgagctccggactgccatactcctggacatgatagtaggaagtctcaatcaagggcaagattatgctttctggagagaaatacactggaaacttgatataatctaattgatgttaattgtgataagtgttgctggttttacttttggcttcatacatagtgacttatgttttgtggtggtaatgagtaaaagaggtggggtgaattgatgaaactgcttctgtgccctgataagtggctgtgttctgattggttctcagatgggagttgatttttctacaggaagagaattagcttaccattgtgaaaccactgaaggcaatgtcaagagaagtttactttacctccatcgcagtcttattcccacgtcctcacttttttctcttccctttatttccttccttttctccccagactcatgattgcctttctgtcagcaactctctccaggttctcattgacacagaaattgtaaagactcagaaaaggctatgatgggatatttttcctccttgtttctgtgaatcttatatttggattggaaatagaatttatataccaccttacgggatccttcttcaatttttctgaaattaagagagcccattttttttttcataatgtgttgaaggaaatagtttttgaaaagttgggaatggaaagaggtcaactgagaggagattttttactttgagatatcctctccctggcatgagatgagtccttgtgaagtgaaaagatgggggctatctttggaaaaacacccatccctgctcccagagagctctgggcccgcattttatggagaacagcatctgctctcacattgagcctggttaagcctttgaattttcctttgcatgtgttctcaatcactgatggtgctgaatcatgaggcatattgccagacgtgggaatgaaatttttcttttcttttctttttttttaagacagagtctctctctgtcacccaggctggagtgcagtggcacaatctgggattattgcaacctccgccttctgggttgaagcgattctcctgccttagcctcctaagtagctgggattacaggcatgtgccaccacgcccgattaattttttgtatttttagtagagacagggtttcgccattttggccaggctggtcttgaactcccaaagtgctgggattataggcataagccaccgcacccggctgggaatggaatattcctaatgaggaacttgatactttctgaaaaagtaaattttcaggaaaagccacaggcttgaagtgtatcatctttccttcatggtttggcacatccacgtaagggtgtaagttctgtaagttccttttccatgtgttagttaacaaatgacgtttagaaatatcctctttctcactgtccccatgccaaagatcagcctttcatatttttccttaattgtcaaagaaatatttgagcatctaaggtgatattctttattactgtggatgtgatttgggaaacaattcttggagggcaactctgagtctgtggtgaataaaaaagtgaggataaatgtgaatgaatattgtttctggggttctctgtgcagctggaaaaatgatgagcaagttagcttaattagctgagcatcttcctcttcttgaaagggctgtgatgcttgtgattggaaaaagccgttcttacgtggcatccttttaggaaagactgtggtttaaatgggcttgtttacaggcctcacttttgggcttacctccacctccaagccatccaccatcattagccacgtttctaaaattaacttattagaggaactgtttgattcattagataagtgggttttgattgggcgtggttatggggtttaggagggtctgctggttagttccactgagaccctgaacagtatgaaggggaaggctagttaagaagcagaaagaaaaaaggaagccattcttctcaaacattttgttggaagtctgctgaaagattcattttgcttctgggccccacagattgcatagctggttctgcctctatgctttcaggtcgctcaagtgttaacaggagtgagaaattagaatcaagggcccatttcctcactttcttccaagtttctgtatccacatgtgcactgtatgaaactgctgtccatactcttgtcttaattgatttaatgtttaatctcctttaacagaaggtttgcagaggtctcttttcttcttctagtacaacttgcatacttatttagagtctgtagttaaaagggtgattcaggtcttggcaatatgtgaaacttctgtcctttgaaaagaagtcatttttaaaatcttggtttactttgttttatggtaacaagacaatacatcttcttatttatttcatatgtgcactccacactcattccagcaggccttatttcttaagcaagagacaagaaatggccttattgactggcaggtacaagtgctgaaactagcactaatgactgtgaatattcattcctgagtcgtatttgtgttcagactcaggtgaggggtgcagactggagtgttcgtctattccccttgtgtgggttaagataagcatgagatggtcggcttaggttggcccaggtgagagaagcaaagtgatgggtggccctgttccctgtgggaggctttacttttccatgcttacacactgaacacctaagctggctggtcaaataatcaagaggcagacttggtaaaaatgtgaataaatgagtgtagttactatatagccattaaagaaaaatctgctaatggtgactcagtagtgcctccctgattgtaaaggacaatgtcttctggtgagctgtgagcatgttccatgggttgacaatcagatttacatgtctgatgacattaattgcagggtgctatgggccaggtttctgaagttgggtggaggtggaggccaccggcagtgagtacaacgcccaggggaagcatgtgagtgggaggaagaaaagagagttttctggagctgttgcaatgtgtatgctggtgaaatctacttgagcattaagcagtatctcccagcattgttagctactgagtggcacatcttcagtacgcatgattcgtgggggactcaggcagaggtaaaagtgtggtaagttttaatactgtgtttgcttactagttgcttttgacatgcatacaggttgtgtgtgtgtgtgtgcatgtgtgtgtgtgtgtgtgtgtgtaaaactgactgtaagatgtcaagtttcagcctattgatttttttattccagaaacttttcagcattacctaagaagcaaaggctcaattttggctgcttcattcttatctcttctgccacagttctaacgtgcctgatctactgagaccaaggatgaccaatgactcagaagggaaaatgggatttaaacacccaaaggttagtttggcgtttctgcagtaacctttggtgtgataatgtgaaaagagcaagaacttttgattcataaagacctagtttgaacctgactgtaccgtgtatttatgacattgtgcaagtaacttattgtgggttgtggctgatcaaggcaaagttaatactagcctaatgctgatgattctgtagaaattttatttcattttatgttgggatctagcattgtgggtggataggaagagttgatgttgaagatatgtgccttaaatgcttctcttgatttctgtagcattttcttcctctggggccttcaggaatctggcagctgaagcgttaggtctaccaggcactctttttatccatccttcccatccatccatttatccactcaacacttaggtactgaaccacttactgtatgccagacacagttctaacagctaaggattaagcagtgaagaaaatagaaaaaaaaatcctgtatacatggagctttcattctagtgagggaggaatgcaataaacaaaataagtcagtaattatgggtatattaaaagggaatgtgttacagggtaaataaagcaggaaaagagggtagggtattgaggcaattttaaataaggtgatgagagcaggtc

SEQ ID NO: 9787 - DNA, 6000 bp, Homo sapiens
tttctttgcattttttgagctaaagaaagggatactttctaggatgtcaattagaagcctgaaagaaccatgccttaggaataggagcaagccaaaggtagaccaaattttactaaaattgcagtggggctccaacaaaagtcaataacctgatagaattgtgtaatcagccccttagcctaacaaaggaaagggggagccatagctgatagaaaataacattctgtagggtctctacagttcttttgttcatagggtcagcaaaatttaaaaggacaagatattcaaagagtcaagaaaatacaatcaataatctagagaaaaagtaggtaagataagcaaacaataactgaattatttgaatattgtagttaatagataaggcaatgaaaataactataaatatataagaaaatgtgtaagaaaagatactcaaaagagataaaaggagtagagaattcaaatgcaataattgaaaagagaaaaagaattatatctttcagttccaaaatgtcaatttgattttaaaggatcaaattgacatttgggaactgaaagacataatattaaacactgtgttttcagtggatgaatttaacacagatgggccacagcagagcacaggaaaaggaaattggaatacacatcgatagaagacacacagactgaagcacagagaggaaaaagaacagccaagaccaacaagagcataagaaacatgtggacacacacatgtctaagctatgtatagaattgaaattccagaagaatgaaagagcaagaatagcaatcaccggtaaaataaataaatacattgtggtttattcaccctatgacatcctatagaccaatgagaatgaacaatctataatcatatgcaccattatacatgaatgtcacaaacttaaggttgagtttaaataaaaggcaaacacaaatgaataaatctgagatgattccatttatgtacaaattacaatagcaggtaaaactattatgtgagaattcaggttgtagtagcctttgggcaggaagtagactgcaaggtcatataatggtctgcaattgtctcttattctggatgctgggaggaaaggaaggaagggagggagggaaggtggaaggggtgcactcttggacatacagctaccatttgttctgctttctcctagttagccacaaacccttaattgtgtaattaagaaaatctgatttaatgtcttaaagaataagagcctaggcatgggtaatcaaagtagccgctaaggcattggttttcaaactgtggcaggcagtggaatcacctgaggagttgtttagcagagatcgcaggtcccatccccacagtttctgtttctgtttctgtagttctggtatagggcccgagaatttgcatttcttgcaagttcacaggggatgctgatactgctggtctggggaccataatttgagaaccagccacgttaaagttgctatagcttctgttgtcgatgttctatcataaacttggtctcaataatctggttgttgttgtattcagtaaaacagaatattcataaagatagacatagggtgttagctcaactgggatacatgatagggaacaccagaagggaacgcgccttcatgaaatgtccttaagaaaatttttttggagaaaattcgcttagaacaaaaatttacactatcaaatgagttacttcccagaaagtggagagaaaaataacctagctaaaaacatgatgcacaaagtgttgtatagtctgttttcaaaataattgatttttttttctcttagcatacatttactggaaccccatcaccaagctaatttcagtacaatgtgctccattatcagtcaaggctcacagatatggaaatttttgcctagcggtttgctgtaaaacatttgcttttcaaagacacattaattcaaatcttaaaattaaatataaaagttgaacatgtatgtgtcaatatgatgaagtttatttaattctcttacaggactgcatcaaaacatgtaaacaaggacctcggtaatatggaagaaaacaaaaagttagaagaaaacaatcacaaaactgaagcctaagagagaaactgtcctagttgtccaggtgagtagtctgtacgaggttcatagaaataattccctagcaagtaggaaacatccttaaagatgaagtcctttatgttaagatgctccataattacagctttcaaaacaggaagagaggggttttttttctttttattatgctttaagttctcagatacatgtgcagaacgtgaaggtatgttacgctggtataaacgtgccatggtagtttgcacgcatcaacccatcatctacattaggtatttctcctaatgcgtccctcccctagccccccaccccctgacaggccccattgtgtggtggtcccttccctatgtccatgtgttctcactgctcaactcccacttatgagtgaaaacatgcaatgttgagttttctgttcttgcgttagtttgctgagaatgatggtttccagcttcatccatgtccttacaaaggacatgaactcgtccttttttatggctgaatagtattccatggtgtatgtgtgccacattttcttaatccagtcgatcactgatgggcctttgggttggttccaagtctttgctattgtgaacagtgctgcaataaacatacatgtggatgtgtgtttatagtagaatgatttataattctttggctatatacgcagtaatgggattgctgggtcaaatggtatttccggttctatatccttcaggaatcaccacactgccttccacaatggttgaactaatttacactcccaccaacagtgtaaaagcgttcctatttttccacattctctcaaaacaggaagagagtttttcgaaaggaaactttcgtgactcagaaagtgttttcggaagaatggaaacttaccagtttcccccactccctcctcaaaataatcattatcttctgaataataaaaaccaactatgagatgttaacattcaactatcattttatattttaatgcaaaaactttaagtgcaaagaagctttattttttgaattggtgtttgggttcagtaagaacagattctaataccttagatttgttttaaataaatgattatgaaaataattttaaaatatgaaaattttaggccaggtataggcaatggctcacgcctgtaatcccagcactttgggaggctgaggcgggtggatcactggagactagaagctccagaccagcctggccaatgtggtgaaaccctgcgtctctactaaaaatacaaaaattagccagtcctggtggcaagcaccgataatcccagctactccagtggctgaggcaggggaatcacttgaacccaagaggtgggggttgcagtgagccaagatggtgccactgcactccaatctgggtgacagaatgagattctgtctcaaaatataaaaataaaaaaataaaaaactttaatctagatatttaataaaagcgtgagtgtatttatacagccaatatcccaaatcattttaatgaaaagcataacaaacttgtgcacgtgtgtatacatatacgcatatgcttttataggtagtatatgtatgtgtatgtgtatatatgtatccatgtatctatatgcacatatgtagaggcatatgactgttatatttaacatataaaatagctgtgtgtgatttttaagacaatctcaaaagaggtatgtttccatggcattgccacctgcaatttgaggtttttctttttatttgtgttcccttaaaccaagcaaatagaagagccatttggactattaatgtgtcctttagaataactgttactatagcttaccgatatgatatgacaagccccaaccgccacagtaaacctcgggttcattataaataaaccacaagtcacaatttgagtgggtcatccaagttaatcccatagtaaggatggagcgtgagaaaatactgaatttaaaaggatgcacacaggggagaacaatagaataattgaaacaagacttggtttttaaaatctgaaagccaggattttaaactgatggggtgaaaggaatcagaactggattgcttctctatctcacctttcattggaggtcaagtatgcagcattcccacatgactttttttgtttgttttttccacttctctagggttcttttccccagtcctttgtaaacatagattttaactactgttttcttcaaaatcgtataacttctcaatgaaaaactgtacttgaagacaaatcccacgaaatagtgtgatttgaagaaatgagtgtacttttaacctaaagagaaatgcaatgaaatattttcttgaaaaaaaacttgtaatattagtattaattttacaaaaaaagaaaactctgaataattccaaaaactatttgtagaatggatgaagcaatgcctgagattatagatgggcttggggacaatggagttttataaaaggccctcctgtaaagtaatttactaaattacttttagtacaaagtatctgttgatgttaaaaaattattgctttggaagcttatctaaattatttttttttcatttcagagataaaaatcatatagaccaattgaagcatgaacgtggattgtatttaagacataaacaaagacattgacagcaattcatggttcaagtattaagcagttcattctaccaagctgtcacaggttttcagagaattatctcaagtaaaacaaatgaaatttaattacaaacaataagaacaagttttggcagccatgataataggtcatatgttgtgtttggttcaattttttttccgtaaatgtctgcactgaggatttctttttggtttgccttttatgtaaattttttacgtagctatttttatacactgtaagctttgttctgggagttgctgttaatctgatgtataatgtaatgtttttatttcaattgtttatatggataatctgagcaggtacatttctgattctgattgctatcagcaatgccccaaactttctcataagcacctaaaacccaaaggtggcagcttgtgaagattggggacactcatattgccctaattaaaaactgtgatttttatcacaagggaggggaggccgagagtcagactgatagacaccataggagccgactctttgatatgccaccagcgaactctcagaaataaatcacagatgcatatagacacacatacataatggtactcccaaactgacaattttacctattctgaaaaagacataaaacagaatttggtagcacttacctctacagacacctgctaataaattattttctgtcaaaagaaaaaacacaagcatgtgtgagagacagtttggaaaaatcatggtcaacattcccattttcatagatcacaatgtaaatcactataattacaaattggtgttaaatcctttgggttatccactgccttaaaattatacctatttcatgtttaaaaagatatcaatcagaattggagtttttaacagtggtcattatcaaagctgtgttattttccacagaatatagaatatatatttttttcgtgtgtgtttttgttaactaccctacagatattgaatgcaccttgagataatttagtgtttttaactgatacataatttatcaagcagtacatgaaagtgtaataataaaatgtctatgtatctttagttacattcaaatttgtaactttataaacatgttttatgcttgaggaaatttttaaggtggtagtataaatggaaactttttgaagtagaccagatatgggctacttgtgactagacttttaaactttgctctttcaagcagaagcctggtttctgggagaacactgcacagcgatttctttcccaggatttacacaactttaaagggaagataaatgaacatcagatttctaggtatagaactatg

SEQ ID NO: 9788 - DNA, 6000 bp, Homo sapiens
tccagcagcccgccaagagttgcctcatcagaaataaagacactcctataacccaggaaactgcaagagatttaggagcaggtctgtgtcaggagctggagtaaagaccaaatgttagagtaaaagatgtacccggcgcccctgtcactcaggaagtaacaagggttttaggaattctgtgccaggaactggggcagagactaaacagtatacatattgttattatatcacagtattggaactttatgccctttcccttgacttttctaaacacaggccctgccatgtgtcactgccacagtgttttcctctcagggttggggccattactctgcttaagccagcctgtgtgactaccacaccctgtgcatgggttaggagttaatgatggcacctgccttattctggaagctggtctctaattagccactgcatcagactcagctaatcaattcgctgagctccttgctcagtttgcaccaagcctcatagacattgtgtgggagacacaagactaagggttgaggaaccaccctatttcacttctttgggcccaaagtggacagtgtgactaacagctccccaaatgtaaatatgtcctaagtacagcagaggagcatgatcaaaaagaatcttcgagtgaacactaaaaatgatttagtcgaccactccatatgttaccttaaaattttaacttaaaaatttgctgaaagcctgttatgtgcaaaacactgtgctgggccctaaagattaataaaggaaagaagggaaggaggaagcagagaagactggaaggaaggataaatatcacctttgccataggaagctcaatccaaaaggaagagaaagacatgagtgcttgacattagtgcttgaaaagattctcctctgcagcatcctcatcctcctctccatcacagcatccccgtgaaagctgctttcctagttcccgagttttctaaatgactgtcagcctatcggcaacatcctgtgcattggggcttaagagctgtacaatgactcagtcattttctccgaaagtttttgtcactttaagcttctttcctccttgatattcaggagacactttccttcactgtatatatatcaatttcttcttcactgggtagtgtggtcagatgggaagaagctggtttttagtgttcataacatgtaggattgaattttggcttctccttttactagcacagtgacctgggacaggttttcttcatctcatggaatggagtgctgtttaattttccagtaaaaaggggagatatattaatgcctgttttgccaggtttttataaagatcacaacagtagtgacaagattagaagagcagaaatagcaggcactctcatcttttgttctctttgagatatgggttgtacatgttgagttaaatgggagtgtattgtggaagtgcagcgtccttgacattccatttggagttgaggggaaacagggtaagctccccatagggcactgctgttttttgtatgttcgactgcttgttattgaataaagtaataggtcattaagccataatggctgtagctggggatggcacatgttcctagtactactagtttaggattcagatatctgaaacacaactactcaatgcctgggaaaagatacttgtaacataatatcaacaactagtatccagaatataaaactaaccacttcagatagataagaaaaagacagataagccaagagaaggaaaggaaatgagtgagaaattcagagatgaaaagtcccaaagagttaataaacatgaaaagatgttcaacctcactagtaagcgaggcagtacaaattaaaacaatgtgaagcactattttatactcctcggagtggtaaaaatttaagtttggtaacactaagtgctggtaaggatgtgggaaatggatatttatacattgctgggaggggtgggaaagggagaacaattttgtgaagttggagatgcacctacccttaaacccaacaattccttttcttggcatatgcccattggaaactcccgcatgtccaagaagagatgcatggagacattaaggatgattgcttcagcataagttgtgatggggaaaattgagaatagtgcatgtgatcatcatcagaggaatggataggctggtatactcatttaaaggaatctgtgcaggagttaggtgaatgcctttcattgagatttactttatgggtaaatcttaaatgtaattttgagtgaaaaaaggcaagttttagaagattatgtagaatatggtgccttttatttgaataaaaacacaaattatattttgttatgattacataaataagtagtaatttgtaaaaatatgcaaggaaaggatgcatgccagcttcagaatgatggttagtattaagaaagagagagaggaggaactgaatagtatgtaggagtcactttagctttattttgtttcttaaattaaagggctgaacccaatatagcaaatatgaagacatgaaagctaggtagtggaaacacaggtgtcattattttttatgatgcttgcaatatttcatgcataaaataaagcctccatatttttgcagttcccctctttgtctctttgtccaggggatgtgctagacccatggcttagcatggctgtttgtctttacactgaagctctggagaagggagaaagaagccctgggctaagcaatgtcccaggtgctaagtggtctgtgctgctgctgtccagcagccattttggggtcttctcttctctccttcctatggtctgtgaggcctgtgtgggctccagctgctgatattctcaccactaaggccacagggtgccagtgcaacttctgagagaaactgagtcatttggtccttataaatggagttcttttgaagtagcattaacttgagttttgatttatggtgggctcaattcttgatccagagcttccagataacgttgattccaggctggagtggaatctcctctgccttagaagcagttttgctttgtcaggtgatgtgtaatatgatctgtcggtaatgtgtgtggtttaatttgcttctgtttgtttagctcacagatgtgtacagtacatcgccctctctgggtcgttattttacttcagttgaaatagtggacttcaggtaagagtgtggaacattacattttgctctctttctctggaaagagatccccccaccccacccttcgtcatttacctagcagggattcccagagcctcagagcatgaagggaacctgtaatagaatcacagaatgtcagtgctgggaaggtcttttacaccaacaggctcaactcccttattttacaaatgagaaaaaggaagcccagattaatggtataattcaaccagggtcacacagaagaggggaaaagccagtcccaggtaaaccatttctgtttaacaatgaatgctcaaataagctaagggtagaagtagaaatagatctcaggtcgtgctgtgatgcgagtgatacatgtataggcatttgcttttgaggagcacaagtaatacaggagtacattctccttgtttagtattaaagatgtaaagaggggccgggcgtggtagctcacgcctgtaatcccagcactttgcgaggccaaggcgggcagatcacttgaggtcaggagttcaagactagcctggccaacgtggtgaaaccctgtctcaactaaaaatacaaaaattagccaggtgtgttggtgggtgcctctaatcccagctactcaggaggctgaggcaggagaatctcttgaattcgggaggggaggttgcagtgagccgagattgcgccactgcactccagcctgagtgacagagtgagactctgtcaaaaaaataaaaataaataaaaataaaaaaaagaagacataaagaggtatgcacaggaaaagtctcccttctgcctcctttcttctccactgccaccaccaataactaatgccattcccttccatggaggtaatagctgtcaagagttgagtgtaattacttctgttcatgtatctaccataggcaccacaaatactacacacacataggatatacacacccatatgtattttttattttttaaatttcctcctcatctttaatgttcttgagatgtaggcatcagggtgtatgtgtgtagagtccatttattatccttttacatcattgggactattggagatgacttaaaatttatatcaaagcttcattatccattatgcctgagatgtctctggaatatgaccatcaaaagttgtattatattgagattcccccttcaaactataagttctccaaaccctaatattagcagacctgggaggggaggcacataaagcaggtggtaggtagcaccatggtgtggggccaaacagacctgaagtctacagatacatatggtgcaggctgcctttgatctccttctttaaagacccccaatgggctgggcatggtggcttacacctgtaatcccagtactttgggaggctgaggtaggcagatcatgaggtcaggagattgagaccatcctggccaacatggtgaaaccccatgtctactaaaaatacaaaaattagctggacgtggtggcgcgtgcctgtaaacccagctacttgggaggctgaagcgggagaattgtgtgaaccagggagtcgcaggttgcagtgagctgagatcgcaccattgcactccagcctgtgacacagagagactcaaacaagacaaaacaaaacagacccagtgtacatggtacttacggtgacatctctgcactttatttcaagaagtccaggcagaggtcctaaagtattgaattgaggaagaaaagccattgcttcccaaagggtgctgctgcacatgggtgggaggcggctaaatccctggcacatgcatttgtgtctacaggggcattgtgacctcagccctggactggcccagctagaacctggaaaaatgccctttggtttattagctgctagactcactccagtggtgggcagctgggcgaaaggccctgaaagttgctcttttctcaaaattcagcctcatgtaaatttaccctgtgacctgccatgggggattaggatgggctggccaggccaggctaggtggcctgattttcccattcagcttctgacctggtcttctgaaagtcagactctggccctcttcattagccagcccaagtccttgcccctgggaatgcagggtggctggctgtgtaggtgttgatcatcattagcgataattagagggcagagctcagggaacaagttatgacacctgcaaactaggttagctggattgcagtttgaaagtgcattttttggccctcctttagtggcatccttgaaactatgagtttcttcagagtcctgactctccattattcatttgatctgcaggatctggcacatctcccagccgtagtagagtttataagctcaattgtcagccaccttgtaagatcgaagagtatcggcctatgtgacctgtagccagaagagggagctctttgcctatccttagcaggggcagtggcctgattcacactaatgggactggtgcatctgcaaaacttccccaaggtgatagtctcagatgtggcctcctgctcattattttattgctggttcttaatctggcccatcttaaaccaaagtaataggataactatgaataaactaaatgttgaagtagcatttaaagagtagcattagacactaattaatggagggtagcccttgattatttttattttggaaatgggaaaaaatgttctaggaagatgaaaattccctttccttaggtcccattactgagagttacagggcttggttatcttgccctaggggcctctggaaatgggacagaaaagtttctcactttggggacaaaccagggaagcctgatttgttgctgatacacagggtggtctctgtcaacgttcagaagttctggacccag

SEQ ID NO: 9789 - DNA, 6000 bp, Homo sapiens
gtaatactgtttcattgtttctcccacttgatgatgttaacagagaaaagtaaaatttacccttaaaataaatacaagaatatatatcttcttctatcccatatcctgagacatctctgtccaaaaactctggttaagtagttgttggtcttttcactattatttttttattccttaggtatcatctaataaataagcaatctgcatacttagataaagaaactaatgctctagtagttttatataaagtatgaacctgttttggagtttatttttgttaattttttggaccttcatttattctaggttctgcccattctacaagacagtagggatgctgtccaacatgattgcattttatgatatggctcgtagagctgttgaaaccactgcccagagtgacaataaaatcacatggtccattattcgtgagcacatgggagacatcctctataaactttcctccatgaaattcaaggtatattttgtttctgctgtaactttttttatttggaaatgcttctttttttcttttttttttagacagagtctcactctgttgcgaggctggagtgcagtggcatgatcttgtctcactgcaacctctgcctcctgggttcaaacgattctcctgcatcagcctcctgaatagctgggacgacaggtgcgtgccagcacgcccagctaatttttggatttttttagtagagatggggtttcaccatgttggccaggatggtctcgatctcttcacctcgtgatctgcccgccttggcctcacaaagtgcaatgcttctttttaatttttctagctattttgagtcccaaacctgggctgtaaaacttgcagttattttcacacatgttcaggttttgtaaaatcagtagagacctcaaagttatgttcaaataggaattctaatgataaaaattagtatatcagccaggcatagtggttctcatgcctgtaatcccagcactttcaaaggctcaggcaggaggatgacttgagcccaggagttcaagaccagcctgggcaacatgtcgaaatcccgtctctacaaaaaatacaaaagattagccaggtgtggggcacacacctgtagtctcagctatctgggaggctgaggtcaaggctgctgcagtgtgccatgatcccaccactactctccagcctgggcaacacagtgagacccagtctcaaaaaacaaaaaaaattagtatgtcacgtctaaaataaatgctgatgtgtattcccttttgtcttagttgccaggcaaattagagcttacttcatagctgagcaacagttgccttactccaagtgcctattaacctctagcacatgtgttcttctgaaatgacatcttctctgtttacttcttttaaatatcatgtactgcaggtcattttttaactttttttttttttgagacagtcttgctctgtcatccagggtggagtacagtggcacaatctcggctcactgcaacctccacctcctgggttcaagcgattctcctgcctcagcctcccaagtagctgggattacaggtgcctgccaccacgcccagctaattttttgtatttttagtagagacggggtttcaccatgttgtccaggctggtcttgaactcctgacctcatgtgatctacccgcctcggcctcccgaagtgctgggattacaggcgtgagccaccgcatccagccattttttaacttttaagtggcctcttgttcttttggaagtacacaagataaaaatagataattaaatgaaattattagtaggaactcaaatgtataagattgtttttaaaatatttgatcagttgaattgtatttatttctgtcatgacatccaggcatatttactaaccacctactgagaatgattctctgagtgtatatgtaatataaaaatttttaaattatatatatattttgtgtgtgtgttcacactatagattgaaagtaaacctgtacaaataggtaagcactacattgagagtttaaaaacatttacacctttttagtcttgtcatttcaccttgagataaataaacaaaggaagtaatcagaattttgatacggatatacacggtcgtttattaaattctttttctttttttttctttttttttttttgagatggagtcttgctctgttgtccaggctggagtacagtggcacgatcctggcccactgcaacctccccctcccaggttcaagcagttcttcctgcctcagcctcccaagtagctgggattacaggtgcattcaccacacccagctaatttttgtatttttagtagagacgggggtttctctatgttggccaggctggtcttgaactcctgacctcaggtgatctgcctgcctcagcctcccaaagcgctgggattacagacatgagccactacgctaaaccaaatttcttaaatgtcacccaagaatgaacagagccaacagtacattatggtgtgtccataagatagatattatgaaggcattaccatttttgtcaaaaatattcaaagacatggagaaatgcttatggcacagagtgaaaaaacttccatatgtaacttgatccaaatattgtcttaaaaaactatatattcatagaaagaggatgaagaagaaatatacctgtagtaatgatgatttctatttacatgcttattgtgtcaaattaacatcacaggtattttttaatgtcattactcttctgtagcattgttttgtggctggagagtaatatttttctattcttagacacttagaaaatttccagttgttggccgggcgcattggctcacgtctgtaatcccagcactttggcaggccgaggcgggtggatcacctgaggtcagttctagaccagcctgaccaacatggagaaaccccgtctctactaaaaatacagaattagctgggcgtgatggtgcatgcctgtaatcccagctactcaggaggctgaggcaggagaatcacttaagcccgggaggtggaggttgcggtgagctgagatcacaccattgcactccagcctggacaacaagagcaaaactctgtctgaaaaaaaaaaaaaacaaagaaaagaaaagaaaatttccagttattggtgtggacaaccatgtagttgtgtgtagttggttttgtgcattttcttagtatggagtcccagaagtggaatgattgggttagagacctggaacattttaaagtctgtctctttttttttttttttttttttctgagacagagtgtcactctgtcactaggctggagtgcagtgacgcgatctcagctcactgcaacctccgcctcctgggttcaagcgagtctcctgcctcagcctcccaagtagctgggactacaggtgcacgccaccatgcccagctaatttttttgtatttttagtagagacagggtttcaccatgttggccaggatggtctcaatctcccgaccttgtgactcgcctgcctcggccccccaaagtgctgggattacaggcgtgagccaccaagcctagctaaattatcttttatacatattactcagtaagttgcctaaattttacttttccatcccagtgtgataataccagatgttgagcaaattctgttttgattaaattaattcctaattatcatgcattaagtcatgttcatctaatatatgaagcggcataatttcccactattgtgcacattgttgaggataaaggctttggtcactgaatgtggttatcaggcaaaatgcaaaattaaaattttgttttctttctgtttggttggatttgtatccttaagaaaaagggaaaatgagtatagttttacctcctgcctgtggtttaccagtgtccctcactaaacctagtactcaaaatatataaaatacgagtaacctgggccaggtgcagtggctcacgcctgtaatcccagcactttgggaggccgaggcaagtggatcacttgagatcaggagttcaagaccagcctggccaacatggtgaaacctgtctctactaaaaatatgaaaaaaaaaattagctgggcgtgatggtgggcgcctgtaatcccaactacttgggaggctgaggcaggagaatcacttgaagccaggaggtggaggttgcagtgagccaagatcgtgccactgcactccagcctgggtgacagagcaagactctgcctccaaaaaaaaaaaagtaacttaacatacgtaatgaaaattattttccaaatgcgagttgaatttgtaatgtcttctttcaggatccactgaaagatggtgaggcaaagatcaaaagcgactatgcacaacttcttgaagacatgcagaatgcattccgtagccttgaagattagaagccttgaagattacaactgtgatttccttttcctcagcaagctcctatgtgtatattttcctgaatttctcatctcaaaccctttgcttctttattgtgcagctttgagactagtgcctatgtgtgttatttgtttccctgtttttttggtaggtcttatataaaacaaacattcctttgttctagtgttgtgaagggcctccctcttcctttatctgaagtggtgaatatagtaaatatacattctggttacactactgtaaacttgtatgtagggtgatgaccctctttgtcctaggtgtaccctttcctcatctctattaaattgtaaacaggactactgcatgtactctctttgcagtgaatttggaatggaaggccaggtttctataacttttgaacaggtactttgtgaaatgactcaatttctattgtggtaagctcattggcagcttagcattttgcaaaggaattgctttgcaggaaatatttaattttcaaaaacataatgattaatgttccaattatgcatcacttcccccagtataaatcaggaatgtttgtgagaaaccattgggaactatactctttttatttttattttttattttttttattattttttttttggggacggagtgtccctcttgttgcccaggctggagtgcaatggcgtgatcttggctcactgcagccttcgcctcccgggttcaagtgattctcctgcctcagcctcccgagtagctgggattacaggcatgctccaccatgcccagctaattttgtatttttagtagaaacggggtttcaccatattggtcaggctggtctcgaactccagacctcaggtgatccgcccacctcggcctcccaaactgctgggattacaggcgtgagccaccgcgcctggccagggactatactctttttaaaatagacatttgtggggctcacacaatatatgaaatagtaccctctaaaaaagagaaaaaaaaaatcaggcggtcaaacttagagcaacattgtcttattaaagcatagtttatttcactagaaaaaatttaatatcaaggactattacatacttcattactaggaagttctttttaaaatgacacttaaaacaatcactgaaaacttgatccacatcacaccctgtttattttccttaaacatcttggaagcctaagcttctgagaatcatgtggcaagtgtgatgggcagtaaaataccagagaagatgtttagtagcaattaaaggctgtttgcacctttaaggaccagctgggctgtagtgattcctggggccagagtggcattatgtttttacaaaataatgacatatgtcacatgtttgcatgtttgtttgcttgttgaatttttgaacagccagttgaccaatcatagaaagtattactttctttcatatggtttttggttcactggcttaagaggtttctcagaatatctatggccacagcagcataccagtttccatcctaataggaatgaaattaattttgtatctactgataacagaatctgggtcacatgaaaaaaaatcattttatccgtcttttaagtatatgtttaaaataataatttatgtgtctgcata

SEQ ID NO: 9790 - DNA, 6000 bp, Homo sapiens
acagctgcatccacatttttagatatctgttgtagcaacatcctacttcttagtaccaatttctgtcctagtctgttcaggctgctgtaacaaaataacttaggctgggtaatttataaacaacagatatttattgctcacagttctggaggctgtgaagtccaagatcaaggcagcagcagattcagtgtctggtgaggtctcctcagcttcatagacagcaccttcttgctgtgtcctcacatggtggaaggagcaaacaggctcccttggatctcttttttagaggcattaattccactcatcagggctctgctctcatgacctaataccctcctagaggccccgtctcttaatactcttgcattggggattgggtttcagcatatgaattttgggggcataaacatttagaacatagcatagcctaagtgtgcaaaacagtcaaccaatatcattccattcaccaagttcagtgatttgactcatactagtttgatctccattcttctctatgtagccctgtccctgtgggactagtctactccctgggctcatgccaggtatgtgctgcacacatttctttccactggaaggccttccttactccctctctattcatacacatgctagctggacatcaaggttgagcacagatcccaccttttccacaaagacccctctgaagactccacccagaagtattgatgctagtctgagcactccttataatgtttgatcacaagagtttattgattattgctgctttgtcacttacctaatagttcttaaattcccatgttgtcctcataactagattgtgatttgttttgagattcttatgaccgtacaggtcataagatgtaaacattacttgcagcatgtgtctgtacctatgtatttgtttaggggagaaataatcttgactttaagtttttaaacatcttgttcctattttaaaaaatgacatgtgaatctgaaaagcttaatttagtagtaaggaagtaaaatgcttggtctttggtagcttttatcgtttatcccactgtttggcattcagtgttctgtagcttttaattcaacaaacccacatgaagtccctcctctttgtgctttttctgaatagatggattacatgtaaatctttacagccagagacttgtgaaagaatcatggatacaatttctgatcgcctccgaattccttggcttaggggagccaaaaaagtgaacatcagcatcatccctccgcttgtcctgctgcctgtcttccttcatgtggcttcctggcatttcctcctgggggtggtggttttgacctcccttcctgtgctggcactgtggtactactacctcactcacagaaggaaagaacagaccctgtttttcctgagccttggactgttctctctgggctacatgtactatgtgttcctgcaggaagtggtccccaaagggcgtgtgggtcccgttcagctggcggttcttacctgcgggttatttctgatactcttagccttgcacagagccaagaagaatccaggctacctcagcaatccagcaagcggtgacagatctctaagcagcagccagctggagtgcctgagcagaaaagggcaggagaagaccaaagggttccctggggcagacatgtcgggcagtctcaacaatcgcacaacaaaggatgaccccaagggctcttccaagatgccagctggaagccccaccaaagcgaaggaggactggtgtgccaagtgccagctggtgcgaccagcccgggcatggcactgccggatatgtggcatctgtgtgaggagaatggatcatcattgtgtctggtatgttggaaacatttggagacttggaaagtgtaaattcatgtaaaactctagttacattttatcttcccttgtgctatcccaaaatttctctccttcccagctttacaccttgtagatatttgtgggttgttgtgatgttcccacttagtcatcagtttttcgagtttcacaaatttagttccttcagtcatttcctgaaggagaataacagaaaacttgtggggttttttttttctcaattttcttttgaatgactcctcatttatcttttcctttctaatagagaaatatctacagttgaatgattttttaaaaaaagaattgatcagaaacagtataagcatatttccctgtgctattcctttttaaacataaagctcaagaaagtgtacccctatttttaggtgactcttttgtccccttgccatacatacttaatcgtttttgatgctaccgatgatttccacttaacattattgaatcgaggtcccaccagataaactctctatttgattatttgcagagaaatgggcttttgtacctgccagttggccagtaacaaacgaaggtacataaggctccgtaaaatatgaagtgcaatgtttaaagataatgttgcagcttcactaaatacatctaaactaaagggactataattaattcagatatgaatgctgtaagtagcatgtttgcagtttattgctcttcaggcagtcgtgatcaatgaattaatgcttttcgtgtctaggattctggtcctgtagcgtacctcctcctcagaaggggatgcaggagagggtgagggtgcagaaaaggctgagaggcattggcgtgggcctcaagtgcatggctcaagtgcagggcagctcttttctgggtccttgtctttagaagtaaacaggtgttttcatttttagatgttctacttctgtgtcttcacttattcgtgtgtgtgtgtgtgtgtgtgtgtgtgtgtgtgcgtgtgtgttccatttacaaatgctggtttgcagaaggctcacctaacagcagatatgtgcccactggagcatcctggcatgcagtgggtagaaggcactccctctacattctgccccacaaatggccatgacacagaactgtttttacctgccaaagagcctgcatgttatcaagttgttcttccccctacgctatgtttctaacctctttggatctttatattactcttcatatatttaacatgaattttcccatactatgtaatacttctgatttagcatttttaagttttcataattctatttatctccctttccttaacatggtgaggacaatgttagatctccatagctgggtaatattgatatttaggaagatttgttagccaggttctgctttttatacttagtcttgtccttaaactgacgatatgattccactttgcgaagagtagagaatataagactgcattcctcagggtgcaagtttttaattccctaaaattgaaaaataagagaacttcttaataactggaatttacattttccctatttaaaaccttgtcttggctgggcgcagtggctcatgcctgtaatcccaacactttgggaggctgaggtgggtggatcatgaggtcaggagttcaagaccagcctggccaacatggtgaaaccccatctctactcaaaatacacaaattagctgggcatggtggcatgtgcctgtaatcccagctacttgagaggctgaggcaggagaattgcttaaccgggacccgggaggcagaggttgcagtgagccaagatcgcgccattgcactttagcctgaactacagagcaagactccgtctcaaaaaaaataaagctttcatgtttattatgtaagttatatcaagaactcttaaaaatgtgtttgcttttttatttctctatgctgttttgaggataaatagctgcgttggagaatcaaatcatcaagcatttatacttgcccttttgatcttcttgctcacctcggtgtatgggatcacactgaccttggacaccatttgtagagacagaagtgtcttcacagctcttttctattgtcctggagtttatgcaaattacaggtgagcagtgggtaccacagtatggaggccccctgggaagtaatgggtgttgccattgacagggactattactacttggttaggagttctcaatcaaaacataggccaggctatggaaatgctgggtatccctggaattgccagcaaaattgtgcattggtgatgtgtgtttttcaagggtgctgttaaaaggattgttgacctttaaaaagtgaagaactagttctctacaaacaggaccaggcctaatcagggacttccagagtcaaatgaccactcataggctcaaaagtcgcaacagtgaaacagaaacaataaacaaaaactagcagccccagggcacatatgtgcctattttgtcataacgatcagaaaccttctcactttactgctgctttctgatgttttttagtccaatcttaatttactgcttccgacccttttgagatgtgctcgacatctctataaccttgcttttctttctaacctctcttggtttttcctgttctactttctttctttttttaatcaccactgatgattactgtgatatgtaggtcaaaatttccttaggcccctttatagattgtgaagatttccaggccatggcaaaatttgggattcttccgcttcggcctcagcgccccctccctgaatgctggggcccccctctgcccatgctctttattcccttcccttcatcatcctctctgacataagtgctctggggtatctgtggtttggcccttttctttattctcactcttcattttcagaacaatccttgctttctttacaaagtatccctttgtggcatttgtttttattagcctgtggacagatctccccattgtcatcctagaaccagacacctgtgggcattattagaatagattggtcttcctcagattaagtttccttcctcactgtgtggagagtatctccagcatgtgaatgaaattctctgctaacgctgcaggtgaggcccgtcctgaagcacagcatgtctgtgcactctcggtgcggaggcgagggaaccgaggaatacagtcctgccattgcttctcaccctgctctgtgcaggcgattcacagcacctcatctttttggttaggtccttggatttaatagtctttgaggtcccttcagcttttacaaatgaagattctgaatgaacttatttctaactaactcttaatttgcgaatgttggaaaatcatcaaatggcagaggctaactggcagcctgtctcattagtgagcctgagaggagcttccctaccttgtgtgattgtgttgggctttaggagggtgaatttggaatgtctcggtgttcctacatccaggtaagcacagggctgctggggttgggagtcgtccatcgtcttttcattcctcagcattggactggaaagaatggagattagtaactttagcactgttcctcggcatccacctgcagcttcctagaagacatttatagcagtcccttggtgcctttgttttctcatgagttagatgtaatttacgaattacttgtttatttaacaaacaggtgttgaacgctgttatgtcaggcagcgtgctgggtgtgtggagggtacaaaatgcaaaaaacagtccctgctattctagtgtaatatactagaaaataggcaccagtaattatagaataaacacacacattctcctacttaagcaggttattggcattctgagtatcttccagttcggagggttggggaagatgccaaagtctttagtaataagtaaaaaaatgtgtaaaacgtgagaatgatgacagttttctgaatttgacaaaaacggcagccctgacagcctttttccctctcctagctcggctctgtccttcacctgcgtgtggtactctgtgatcatcacagcaggcatggcctacatcttcctgatccagctgatcaacatcagctacaatgtgactgagcgggaagtccagcaggccctccgacagaagactgggcgccggctcctctgcgggctcatcgtggacacaggccagtacaataggggcttcctgcggaactggcac

SEQ ID NO: 9791 - DNA, 6000 bp, Homo sapiens
ctatgccactttggacctagaaagacaaataaaacagggtcccaaatgcctcctcctactttggagactcttgcaataaagtgcaggatgcccttcacaggttggcaatgggaggaaagaatgcaaaagggcagcagagcagaatactctctgagtaatgtctgtgtcagggagaaagtggccccaggacaaggacaacctcaggggccatctctgcatcaacttgcagtgtggggcagaggccttagagctggccaaaggcagagggatgaggcccaatggcgagtgttaactgttcaggaatgctaatggcatgcaaggcgggcccctcccatgtggatgtgcagcttggtacctgactctggccgcaccccaagcacaactaggaagtgtttttccttttctctcatgaattcatctatggaaaataaaaagaagtacaaatgggtatcttgtgtaagccctcctggtccctcgagcagagcagcccctgtgcagtgaacagagggaaggtggaaggaaggctgcttctcctcaatctaagagcccttggctgtgagaccagtcactgttaaaacctcccttctatccccctggggtcactgatatataaaacaaaatcataacccaataccctgcccttcctaaatatcctctggttataattaatagtttcttatatgtgtaaacaatcttagtgcttacctattacttttgtatcttttatctcatttagtgatcacagcaactccatctaacaagttattgtctactaattttataaacgaggaagtagatactaaggaaaacattgtccaactttacacagtaatgataatgacagcacaaagctgggacttgaactctggcattctgatgccaagtccagtgtggtcaccattatactacagatattagactatgctgtgagccactggaagcctacacttggctccctcttgacatctgtggccatttgggggatgcagcaaatgttttaggtcctctggacaccaacctagtctaaaatacaagtggccaagtagaagctatgaaatgctaacctctcattgacttgcacattgcacattttacttctaagaattctggtcttgggggtaggtggatgagctgtagatttttgatacatccagacaggttttctggaaaagcatgtgggtacagcactgagtttgggggaaatatgcaaatatgagcatcgtgtccaggggctaaagagacaagaagctggagatgtaagtgaagaaaagcctagtgtttctgacctttgcaaaggtagagtctcctgagcagggaaatgtgtctgttctctccactccaggtgtttctatttctactgaaagcatttgctatgtagcaagactttataaactgtagagtgtttagcaaatgatctggcgccaggcagacctgtgtttcagtctcagcttctgcactttctagcaatgtggccttgggcaaattaatctctccaagcttccctttttttttgttttttttttttttggagatggagttttgctctgttgcccagtgcagtggcccaatcatggctcaccacaacctccacctcccaggttcaagcgattctcctgactcagcctcccaagtagctgggattacaggcacccgccaccatgctcggctaatttttgtatttttagtagagacggggttttgccatgttggccaggctggtctcgaactcctcacctcaggtgatctgcccacctcagcctcccaaagtgctgggattacaggcgtgaaccaccatgcccggccccttttctttatacaaacaatggcaagacaacagcttctccccctagatccttcagaagcaacatagccctgattttagcctggtgagactcattttagacctctgccctccagaactgtaagatacatttctgttattttaagccacgaagttcgtggtaatttgtttcagcagcaataggaaatgcagacctgaaaaacccatctctcaggtctgttgagaagatgaatatcaaatgcctaacatagtgcccagagcattgtaagtgcccaataaatggcagttttcatcactatttccttatcttggaagacaggagtagctaaattatcatgtgccattgataccaaaggcctaagggagaagaagagaatgcatagtgaaaaaggagaacattttagtggccagaaaattcagaatatcttgcccactgacatatcaccaccttccaataaccaacccacagctgggctgcctccctggcatttctgtcatgtccttgcctaggtttcttcaatttatgcttttctttttgctcagagcaagtttctaccttccttcttttctcccacttttatctgcgttttccaccctaattgtgactcctgcaattctcccatagaatattcatttgctctttcccctttgtctaaactctgtgtggcagagtcatctctggaaaagtctgtacgtcacggggcataattgggtcacccaggccacctcccttgatcggggcccctgcagttcctttctggaccaataaagcccctcagcggtgcctctgtctttctccacagccctccttgtccccttgatgtgcacggtcatttttcctttgaacccacgctgtaattgcactttaaactccttgaggccaggcgcagtggctcacgcctgtaatcccagcactttaggaggccaaggcaggaagatcacaaggtcaggagttcgagaccagcctggccaatatggtggaaccccatctctactaaaaatacaaaaaaaaaaaaaaaagccaggtgtggcggtgggcacctgtagtcccagctactagggaggctgaggcaggacaatagcttgaacctgagaggcggaggttgcagtgagccaagatcgtgccactgcactgcagcctgggcaacagagcaagactctgtctcaaaaaataataataataataaaaataaacttcttgaaagaagaaattgtcttatttcacacagtacataatcagtacgagttgatatcggtgctgaatttggcctctactgatttctgccctttcctctctatgcttctgttatctgaactcctacgtttcacagtctatttacttttgtctctagtttagatactaacccaactggtcaggaataatgtctgtacataccagtaatgaactttacaatgtgactcaaccagctacatgagtaagtttcccccttgggggagtttgtgcagtctaacacgcaacaataactggaaagaatgaatgaaatttctaagcagaaagaaatgaatggcatttctaagcagaaactacacagagacgcaatggcccagattcttccatttctccagcaaacatgaattgagtacccactgtgtgccaaattctgagctaaaagtgctcataaattttaactgaacttgtcacagctacccaggtaaacagataaaggaaaacatttagagatgtctaaacttacttggaaggttgttaatacttacagtgtaacaatgaggttaaaatttagcaaggcttgagacaaatagaaggtttgcctcccactgctaccctacaaaactaggactttgaccaaattgactggtttgctatcttgtgggcaccttgctcttctgtctctactccctaacttttcctttctctttacctggaatgtcacccacccccacctcactcccacacatatccacctctactctacatatcaaaccatacacatcctgcaagacttacgtcttcccgcctcaggactctcacaatatttcatctcactacatgtagtataattgtgtgggaatgcatcttagtttccctactaacgcaaaaaatcctagaatacaataatctcccttacatatctttgtatgcctcagaatgcatattgaaccatttaatacattttttatttacagcaggaatgcatgaattgattaattaaatgttgagagctgtagatggcttttctcaaggtgcttcaagtgcagaagcccaagtgattgacccacacacttacctttgtgttccttccagaaaatcctcagggaggtgagagacccatgttcagctgtgtatggcaccaaagtctatacatagtttctgggagtcactgtgggctgtggggaagcacgtggactctggagtcacacacaccaaggtctctagcctagctctgccacttactggttgtgtgaccccagggaacttaatttacaaatttaagctttagtttcctcatctgcaaaatggagcctcctcgcctttcttcttttgctaccgaactgggttatgagaattagatgcgtgcatgcaaagcacctggtagagtggcacacacctggcagaaggaagtaaattctagtccccgttttcacttaccctcatatacaacggggcacttttttatttgccaactatttctttgaagataataaaagagtcagaaaatgatagtttttaaaagcaccctgcagtccacatgggaaccaaccactacctctggccatgagtttaccctttgggtttccatttgtcatggccaagggcagtgagggctatgccagggaccctcagtgtgtttggccctacccaatcaccatctcaggtctaccccttgtgcattccaccttgcggggctcagtccaccactcagaaggatgcattctgcacactccttgcctgaaagaactcctgaaaggcactgaccaggctctggaaggctatattcttttcattctttataaaagttatgtgattaccaagctcaataatcaaatgtccttcatcgctaaaagattatatggctttggtttggatgctttgggaacaaggaggcaatacgcaatggcttggtttactcatgttacagaaactgtagcagttatttggtaatgctttcaacagtgccttcagcttgtgggaaatcccgaagatggccaaagacaactcaactgttcgttgcttccagggcctgctgatttttggaaatgtgattattggtgtaagtaatgattattttccaggaaattctgcacttcctgtaatcataattctagatgaatcaaaagtaagagtttaaaggaaaataatgctgtgattactggcttcctatatttttgcttcattttaagaaatgtgttagtaaatatgctagctagaatttaactgtatgtcaaaagatcatggttgaaaaagtagatattttcctcccaactttaaaatataagtatctaaaaggagtcatgtcaaccatagtcagtgtctaaacactctgactacgaacacacttcactatttcttttctatgtcaccttggtttgatttccatgggactctgctgttaaggttttttgggacagatgcttgcatcttgttcttctcatacagaggccagtaccagggtgtaagaataatacagaggccatactgtgtgggtctggtggcatagaagaacatttgttttggagtccagagctcttggcccagctctccctctgactccccatatgactctggccatcacctttcaaggctgagattcctcatctataaaatgtgggtgttggcaaagataagcagcaaggttcctctcagctgtcattgataaatatgaccaggaccagctcaaatattacaacccagaaatgtgggtcatgacatgggggcagggggagatcattctcataccagaaagcattgtttgagtgattcatgccccaaggacattgtggatggtctgaaattgtgtgggtctgttactaaatagacagaataacatgtgaagggatgtatgcaaccagttagtaggatggaagtagttgtttgatttcctggcaatggggagtttagattagttgcataaagcctgtgcaggaaagggagccagtcactcttaccttccccaccctccaccccctttcccaaagctgcactcctgatggagcccacc

SEQ ID NO: 9792 - DNA, 6000 bp, Homo sapiens; identical to SEQ ID NO: 3730

SEQ ID NO: 9793 - DNA, 6000 bp, Homo sapiens
caggtttttggaacgcttaaatgaggtaatgtgtataaagtgcgtggtccatggagagtaatcaataaataatacagcaaatatttaatgtagtgcttttagcatgttacaaggcaatgtttcaggcactttacatgatcctatgagatagatactattgtcatctttaaaacaagcctatgagatagatgctattagtagccacaatatatagatgtggaaattgagatatagaaaggcaaagcttgtccaaatttacatggctggtagatggtggagccaggattagaacccaggcagcaagtgaatagatagtttctatatccctggtttcttgtgtcttgttggttttgggagactgatgaagcatagtgatgtagagatactagaaacttagaccgaagtaccagttctgctatatactagcagtgtgacattgagaaagtgagccttagtttcctcatctgtaaaatggtggttttacctacccaaccgtgaactatgtggcactataaaaatgttgggattgacacatttgagcatgtattgggggccctgtcctagatgtgggtaaaatctgttgtgaagcctgaggtcttatacatactgtgcagtgcaagcacccataataggaatgtcgaacactgctagtgaggtagaaggcataggcaaaatggcggaaattccatcccctttatcacccactctatcccccaccctcagcgagcacttttaataaaataatatgtaccatattggtattgtttcccaaactttggtactgtcacatatgcaagataatttgataagcaaatgaacattaaaaaattctccccaaattttcacacacatacatatttgaatgaaacaagttcatttaatttaaattaggagaaaaacttaacatctcaaaactgatttcacagatattattgctaaaaaataaaggacaagaaaagtaagtcaattcaaagaccaatattaggtaaatagtacaggtggatgaagataattctgaaagtggtacttggatgactgaagactgggaagttatgaactaaaataaatatgagtgcttttgcccccagtataaaatgtttttatcttaaaagtggcatttgtgaaagcatttggttagaacgtatatacaaaatccacttacatgttgggctttgtttattaccttttgagagataacttcctgagacattgagcctgtagtcattacccctacaaggttctgaagaagaggggtgtcttattatcttgggtccaggaacttgctaaccactactatagtagtttggcattgtgggaatttattttcctcagcctttacataaaagtttacccagatttacctagattctagcttgtgctttttcctccaacagttgctgatggggagaggaaaaaatagccactattcaggttccctgtgagttaactgctgctgtacaaaggcaggtgtaatattttctctgtattaaaggtgaggagaaatggcccagtgccctaaacatttatctatggccccgataagctaaaaactcctaaatcttcccatgcaattgttgtaatctcttgctttccacagttccactggttcttccttgggattttcccaaccacaaccctccttaagaccttaaagatactttaacctagcttaggcctgacatggacagatttccttttctgctagcacagtccagataagattagtttaaaaaaaaacaaactatattatgaatccgtggtaaaaagaaaaaaagtaggggtatgtttattgaattgatggagagacagcttagcctaaggtggttggaatctgtctacaaattagttaagcctgacgttgatcattggacattcatccccgtttgtcaggcttaaattcaagtgctttggatgctgaatcaaattactgtggtagaaagaggtttaattttttccctaagaaaaatcttatctatggataagtagaaaccattctctgacaaccttgtaataattttgacagggaatgtaactactgtgttctgcttttggttaaaggctaaagtacatattaggaaaatttgaggctgggcgcagtggctcacacctgtaatcccagcactttgtgaggccgacgcaggtggatcacttgaggtcagaatttgagaccagcctggccaacacagttaagccccatctctactaaaaatacaaaaattagccaggcatggtggcgggcacctgtaatcccagctacttggcaggatgaggcaggggaatcgcttgaacctgggaggcagaggttgcagtgagccattgcactccagcctgggcaacagagtgagaccctgtttcaaaacaaaacaaaacaaaacaaaaaaacaacaaaaaaaggagtatttgaaatgtaagtttgtccaactttagttttccagttagtgaagtggtgggcaacacacctgcattgtttgctcttttcaactgagtttctctaattgaggagtgatgtttcttgatggtaggactcttcattcctgctatctggcataattcatgggacacattagatattcagtaaatgtttggtaaacgaatggaacttacaaattgtattctttttacagtatgtgttttagaaagcatggatcatatatttattgatctgtcctccaagtcactaaagaataactttgaagactacatgaaatttggcaacctattaatgaagtctattcataatatttctattaggatcctagagaggccagacataaaataatacagtctacttttattttactttttgagacaggatctctctcatcacccaggttggactgcagtggcacaatcatagctcaccattgccttgaactcctgggcctgcttcagcctccccaaagcaagtactataggcgtgtgccaccatgcccagctgatttttaattttttttatagagacagagcctcaccatgtttctaggttggtcttgaactcctggcctcaagcagtgttgggattatgggtataagccatggcaccccatccaatctgcttttaaatactaaaatgtgggtatttagaactgcaagttacaactcaccctcaaattaattcccagaatggttattgtgttgcagtgtacttctggaaagacaacagttttatagttaaataataaacgcttaaggggatagagtaagacattttcctactttcttacacttaggctaaatgttacaattgtgatttaataattaagtaaaacatggtaaaaaaaaaattaaagaggggtttatagtatagatatctcttcagggatcccaactttttcatgctactgcttttaggagagaaaaaaactagatgaatggaaaaaaacaccaattgggatatgtcacactgggacttcagtttgaagactccactgtagtaaaaagactaatttgcttctggatatttttctctttaaatgaatggagaggctgggcgtggtagctcatgcctgtaatcctagtactttgggaggctgaggtggacagatcacttcaggccaggagtttgagaccagcctggccaacatggcgaaacctcatctctactgaaaatacaaaaatgagctgggtgttgtggcgcatgcctgtaatcctagctactcgcgaggctgaggcatgagaattgcttgaatctgggaggtggaggttgcagtgaactgagatcgcaccactacactcgtctgggtgacacagtgagaccctgtctctgaaggagaaaaatattaaagggtaatgacacagtaacacctagagatttctcctttttcctcatgaaaagaggaaaaagggatagtgaacttaatgcattagatttattagttgggttaatttttattgtcagatcagttatcaccatgaatgggaagtcatattttgacttcacacagcagtgaaaactatcagctcctgatttacaagctttgtaacaactggttttctgtggtatttttttttatatatattactcattttttcctttttggaatgagataatattgacctagattaagtgggcaggtaaggattaatttagtctctaagatacaatatttttggaaaaatgcctgtgagatttttatcagatttttgaattttcaccagttgcctcaccactagtgaggaagcctttagtgacattgtgctttgatggcctgacagagaagagttatcacttaatcttagatagtgaacatgttttaatttaatgttttaaaaagtatgggccttagacaataagcaaattgtcaagccctatcccacagtcagtggttcagaattttgagggcagagctcagaaatctgcatttttaactaaactttcaacttcttatgcaagctaaagtttgagagccactgtgtattttatgaaaggttgagtgactgttgacctgagttccttcagactcaggcctgtgaagtcctttcatctgtttttgtaaagcaagaagagaatccaataaaataggccattaagatttactttctggtaaaaagattgagaacaacattaaaaccaatattcctttagctttaggatttattttaaataatttttttctgattataaaagtagtatatgtctactgtgaatattgagaacatttaggaaattataaaataataataaccaataataccatttcttagaggtgagcatattcttaatttggcatctttttctgcatccgtttttcaatccctttttccttctctttatcttcgtctctttatccttatgtttgtgtaaaacaacatttgcaatttttatcctacttttttctccttaacatgtaagcattttaccacattattaaactttctccacaaacataacttttagttgctgcattatattctgttatatgaatatactataatttacttaaccatcaccattttataggatatttagattgctttcagttatttgagtggaagaatgtctttctgtttaaaattttgcctggatttctgattatttttctcaagacaggtatatatttaaatttattgaggttaaaaggtatgccttcagactcttgttgaaattgccaaatcattttgagaactgtttgtaccagtttttacttccatctgtacttatgagaatgccagacagaagtattattttttaaaaagctaatgtggctgggtgtggtggctcatgcctgtaatcccagcactgtggcaggcgcctatagtcccagccacatcctatgctgtggcatgggaacccaggctgaggcatgagaattgcttgaaccctggatgggggatgttgcagtcagccaagatggcgccactgcactccagcctgggtgacagagcaagatgctgtctcaaaaaaaaaaacaaaaaacaaaaaacaaaagctatatgttaagtgaagcatagtatgttgttttaattagttttttgttttttttttcctcctgagacggagtctcactctgtcgcccaggctggagctcagtgacgcgatttcggctcactgcaacctctgcctcccgggttcaagcaattctcctgcctcggcctcctgagtagctgggattacaggtgtgcaccaccacgcctggctaatttttgtatttttagtagagaaggggtttcatcatgttggccaggctggtctcaaactcctgatcttgtgatccaccctcctcagccacccaaagtgctgggattacaggtgtgagccaccacacctggccattttaattactattcttatattactagtaagttgaacatttttacatatgcttatcaagtttggctttaatttttatgtaacccaaattgttcattttgttttaggtcttctctgttggttgaaatgtctatgattttatctgcctcagtcattcgtgtcagagatggactgccactttctgcttctactgattatgaacaaagcacaggaatgcaggagtgcagaaa

SEQ ID NO: 9794 - DNA, 6000 bp, Homo sapiens
gtagcggggagccatgcaaggttttaagcaaggaaggacagcatcagattttcacccttggggtatccctactgctgtgtagagaaggatcagggtggtgttgggtaggtggctgctccccaaatcctgagggctgagcggaaggggcctgtggagctcatctggcccaagcctacaagcaggtagggaggccttccttcgcagagtgtgactgactgactctgggccacacagcaggctgacggtaggacaggcactcagtagggccctgggttccactagctctggcggcttctgaggggcagatggcccctcacagcctgaggaccctgtgaccgttgggtgtcaactccctggaggcttagcaccttgcggctggagaaataacatagtaaaaaccatctggccaacaagtgctgatcacgtgccaggccctttagttctgtggactaattacgtcaacccataaggtggggccgttgtccctgtttacagacaaggacacaggcatggggaggcaagtgccctgcaaaggtcacagagcttctatggactagagccagcaaggaatccaggcagccacactgtgggggtgaggacaggagctgtaggtgcagccccggacagtggacataggtccagctttagagtcccaaggggcctgagttggagccccggcttccccaaagagagctgtgtgacctcaggcaactcatttcccctgagtctcagttttctcttctgtaaaatgggtattcatgtgcctatgagcaacagcagtggcagcccaagctgcttccagccatgaggagagttagtgcccattcctgagctgctcggagactggcagcccacggttcagcagcagccagctgcccaccatcgtcctccggatgttgacttctgtcatagagctggcctcctgactataagaggactgccagggctgcagacacctcacaggagggcatcccaggcagaaagtgagtggtggggtaagggtttcccctgacttttcaccctaagggagtctttcctgggagtcatctggctaatcccctgatatcgcctcaggcagagccaggccacattccccccgaacccccggacccagtgcttcagcaacgacacacgaagctgaagatatggctccctgaagctgggctcatgccctgacacagccggggtcggccagcaaggaaggaggaagactgacaggtggccggatggccaacattccctgccacaagaaatgtgttgggtcatctaaaagctgaaagcagaccttggctgtgggccccgggggcacagcctctcctggcaccatgtggagctaggcttctaaggtcagtcctgacggtggaaacagggtctcccaggtgtccccatacccccatggcatagctgaacctggcagccttcccatggtgagtgtggctaagtgactgtcttatttcacttagcatgatgtcctcagggttcactgtttctcaaaatggtgagattttaaaaatgtaagcacatgacatggcatttgacactacagaagggtagacacagtgaagagtaggtctccttgtccagcacctgtcctctcggaggccaccagatccctgggtgtccttccagacatgctctaggcgtgtaagtagtatccactgctttgccgtgtgcttacagtaacttcttgagaatctcacctacaggcatgtatgtcctatgtctgtctgcctctgtcttttcattttgaaaaattcaagcatatgcaagaagaagggagaatagttcaaggaacccccaccttcccaccacctactcccacctgggatgactgcgaagccagtcccagccttgtggattctgtgactatgtctgaacgtatctctaaaataataagtctccctccacccaccctttgtgaaacgttttttatttctttccctttttcaacataaatgttaagccctgttctgcactttggttttcccacttagtgtatcttagacagctgtgggatagtttgaaaggcatcaggagcatagtgtgcacatgtgtgcaggagcgtacatggacacacacacaaccacaaacacaccacacacactgcacacacacacacatatgtaccccacaccacacacaccccacacaccccacaccatgcacacaccacacacaccgcacacacactgcacacacacacacatatgtaccccacaccacacacaccccacacactccacaccacacacacagcacacacacaccccacacaccacacacaccccacactatacacacagcacatacaccacagacaccacacacacaccacacacatatgccacacacaccccccacaccacacacacaccccacaccacacactccacaccacacacacagcacacacacaccacacaccacagacaccacaccacacaccacaaacacacataccacacacacaccacacacatcacacacacacaccccacaccacacacacacacaaacacacaccacacatacaccatacatacaccacacacaccacacacccgccacacatgccacacctgccacacatgccacacacacacaaatgccacacacgcatgacacacacacacaaatgccacacacgcatgccacacacacgcacaccacacaccacacagagacatcatgcaccacaggcacacaccacacgcgtgcaccacacacgcacaggacacacacgcattcccaccccactggcgtcagaccctcccaagcaggccctggctctggtgttcctccaaaggccgctttggcctcctctgaaatggaaacacctgaagccttttttcttaactgagaactcacataccatacaactctttcaaaccctacaattggtttgcagcatttttataaggttttgtaactatcaccgctgtctaatttccaaacattgtgatcaccctcaaaagcagcccagtgtcagtccatcagcagcccagtgtccatcagcagcccagtgtctatcagcagtcctccacagttcactcaggttctagttttggtctctctggatgtgactgctctagggacctcactaagtgggactgtttggcactcgtccttttgtgactgtactattcgcttggcataacgccctccaggtcagcccatgtggcagcatgtgtcagcaccgcattcctttcatggctgagtcatattccattgcatggatggccgcatacatttgcccactcagcagtgcacacttggattttctggctaatgtgaatattggtgctatgaacttcatggacaagttttttgcatgatgcacgtttttagttctcttgagaatatgcctaggaccggaattgctgagtcacatgtttactggttttgaggaactgccaaactgctttccacagcaacggcacccctttacactcccaccagcaactcgtgaaagctccagtttctccacatcctcaccaattcctaattgtctttttaattatatcctgaaggctcttaatgtaattttaagaagttaaaacactttcttttatgaactcttacacaaaaaatcataggcaggggtgttaatcttggagataagaaccccgggtggggcaggagtgatctgaagaaaggggagctggaagcatggaagcgctggcctgggtctctacatggctgaggctgcgaggggctccggacctaattcggagagcggtgaggctgctggcccgcagcaggtgctaggttaaagccagtcgttgttccttctcataggagggacaggctcagaaggggcaggcttcctgtcccagcgctgagataagaatttgctgggggaataaaaggagtgaaggtgcaaaggagagtgctgattggtaagtacagaatcagcccatttattattgagccaaagcagcccgacagcccacaagcggctgcagttttcaattgggtgtggaattaaacagcgctgcttcttatgcagcctcctgcttttagtaaacattgaagagtccatgtgtgcccgtactcacacggagcgcactctgatgccacaattccttatcactcctcctctgagtgccccacggcatacatacccagcgcgtccttctcccagcctcagcaaagtcagaatccgtttctcccaaatctcggcccaggacagatgcccgggccctaaaccacacagtgatcagtgacagccctggggttcgaatttgggtgcccggcgcagctcctgctcccaattcccgggcgcatcccgccggggcagcgccagagtcagggagcccgcgctgccctgacgcgtccccctgtcccgtctcctgtcgcccacaggacccgcgctcgaccctggcgaaggtgcaccggcagcggcgcgacctgctgaacagcgcctgtagccgccactcacgccggcagcgcctgctacagccggaggacctgcggcacgtgctggtggacgacgcgcatggcctgctctactgctacgtgcccaaggtggcctgcaccaactggaagcgcgtgctgctggcgctgagcggccaagcccgcggcgacccgcgcgccatctccgcgcaagaggcgcacgcgcctggccgcctgccctcactggccgacttcagccccgccgagatcaaccggcgcctgcgcgcctacttggccttcctgttcgtgcgggagcccttcgagcgcctggcatcggcttaccgcaacaagctcgcgcgcccctacagcgccgccttccagaggcgctacggtgcacgcatcgttcagcgcctgcggccgcgcgcgctccccgacgcccgggcccgcggccacgacgtgcgcttcgcggagttcctggcctacctgctggacccgcgcacgcggcgtgaggagcccttcaacgagcactgggagcgcgcgcacgcgctctgccacccgtgtcgcctccgctacgacgtcgtgggcaagttcgagacgctggcggaggacgcggccttcgtgctgggcctggcgggcgcatccgacctgagcttccctgggccgccgcggccccggggagccgccgcctcccgcgacctggcagcgcgcctcttccgggacatcagccccttctaccagcggcgcctcttcgacctctacaagatggacttcctgcttttcaactactccgccccctcctacctgcggctgctctagcggtcctggaggtcctgtggccacgcggggcaagtgcctttccgacaagacccccggggaatgcaggtgctgccggccccaggacccctcttcaagagccactgcgtgcactcacctggccgccgggccagcgggcgcagggcacacctggccaggcttgggggcagcccatctcaggtggccctgcacgcgtgtgcctgcctcggcctgtcgcctgaggcctgcttcctccacttgctccagctgacaggcacctctccaggccccgtagatgggcaaggacttgataaccagggttttaggcttttaaaggccattttgggggtcagccctgcccctgaacctgttcatggtgcatcagaacataatgctgacaccggtgtcagtgtggcccgagcctgtgtcctccccacctcgcccaccctggcaaggacagctgcggccaaggacgaaagccctcccttggctggcctcacgatggggccgtcccgggagccaggtgggagctgccttccactgccatcgggtctcctctcctctcccacgcggctggccctacccaggcgccaccttcggtctcagtctggcaagacgctgggtcttcaggctccatgccaacagagcccctggtgcaatgcggtcacaggttttatgggactttggtgagctgggcggtcatggttttgaaataaatgtattttgttactttctgattttttggagtttatctgcttcattgggccattttctctgggagactgcagctgtctgatctcaaaccactccgtc

SEQ ID NO: 9795 - DNA, 6000 bp, Homo sapiens
gcggggggcgggcgctgcccctccacggaggctggggagaaagtttgcggcggccccgcggggaggcccctgcggtgtccaggcccgtcccggccgctggacctcggctcagacctctggccgcgggcgaggacggggtggccaggcccggatagggatcggagcctcccagcagggccgcgggggccggaggaggtcgtgcaggctaagcccccggccggccctggggcgcggggtggaagttggagcggcttcccgaccacagctgccaccgctcccactggcccggagtgcggggaggtgggctctgggtgccgcccaggaggccgccccgctcgggcctccttggcctccccctctcggggcctctccagggtcagccgcttctcccggaggcttccgattgcttcctggatagtcccgggcctgatgtgcggcgaagctggaggcagcgggccgatcccgggctgccaggggaagggggagtggggactccagggaggcccctcggtcggcgtgaggtcccaggtgcagccctggaaaggaggggaggggctccgaggggcggccccgggcggcgatctgccccaggctcctgtgtggggttctggggccacgccccttgaaagaaaggggtgtgtgtgccggggaggggacgtggtcgagcctctgtcccctcagcgcggctcctgtggctcaggctgctccgtgctgccccatctcctttcacacgtagccggtttgggggtcggtgcagggatggggcgcagtttctgctccccgggcccttgaggagcttgcctcaggtcccctcgatttcctgcggcttggggtgtgcggcagaggccaggtgctgcaccaggggcaccaagatgctgcccggcccttgaggagcacccagccccctgccagaggcaggcatgtgaaccagtgattcgctgcagggccaggcttccattcctggggggtgccagtggggcccaggaagggcgttttgggcagaggacagcatgggcggaggcctgggtttgtggcctcagtgtgtgctctgggggtgggggacacatgaggtgcctgtggacaaagcagacagccctttgctggactcctggccccccaaggtcgttgcctgcctgttttgagcccccaggaaagcccccgtgcacagagcagcttagagcagctggccgggaggagcgggtgccccaggggaaggcctgcaaaggtaggcactttttctcaggagcaggactccaaggccttcagagccggatcccctaggactggtcgggagcagaaccactgggaccacctcccatgacccccgttgtgggggaggcggagtgccaggagcagctgtcttcccccccggctgctgttgtgagccactgggcaggatggcagccccacaccccaacctgcctgagccatagcaggatctggcgcaggaggacttggggggattggactcttccttgtggggagggctttgggggcctttgtttctcagggtgagaaggagctttggtgtcactcaggccaggaaagggaaggggacactgttggcttggcgttccaccaggcggcgatcccctcctgtccaggagaggagcccctgggctggggctcctgcacgcagaccgcggggtctctctccgcctctctctccctggctagccccatcggcatcccaaggccagtctagcctcccctgccctggctctggctctgcctcagcctagaacagctctggccatgccggagagccacagccgttcctactgccctctgcacagccagtgtttcccaccccaggcctttgctcctcctgttctgccccccacccccaccacgaatgcccaccctcctgcaccagctcccaggctacctggtcctctcttgaggcctttccccggccacagtggccagctctgctcctcggtagagtgcagcatctgcccatgctcccctcctagccccggcatgggcccctggcaccctggcacctgggcccagctttggaatgaatgcattttttcctaggcagacccaagcctatgagagttgagccctgcaggctggctggctggtccagtctctggaagctcgaaatttgggccctgccctgctgggactagttgggtgaccttgagtctgagccccaagtcttatacccctaaggtggaagaagtggcccaagcattgtcactggcctttattagatgctgggcatgagggacccagccctaggctcggggctccccctttcttggccggcaaccctgtgaccccaggcaagtcccttcccagcagactttgttggggcagtggggtgagggtggagtttggggcggtgggcccaagaccaggctggagtttggatggtggcttcttagcctggtccctcctgttgaatacaaaaagtagggcccataattgcattaagacgtgtataattatcccagaggaggggagagcccagcccctggtaattgcaggcctgctttgaactgataaacggtgagtgattcatgttttctttggagttcacatgtgctcagctcccagccccggccccactgccactgtgaggagcctgttttctggctcccgggtcttccttgagctctgaggcgggggcgggagtggggactcctcccctgctgttcttggggcgctgtccggcaaaggcagctggcagcctgctaggagcaccctgcagttcctgctctgggattccagccaaagctctttgcttctgagagcctcggtttccccacctgagcagtgggtgtgtgctgtgcacacactgggcagggagtgtgtggggagtgaaacaggagtgaagaagcatggggggctgccgcacccagacctggctggccctccgcatacccttcattcattcgctcactcacggggatttattgagtcttcctgggtccctggcttggcttggggatgcagtggcaaccacccagagccaggccctgctctcacagggcagccattctggccgggagaatgggagcaataagtaatagagacccttcacgagtcctgtgctgcagatgagaacagggtgactgagcagggcggggagtggagacaggggcacagaggcctgggggaggggcaggcagccccacactgcatgtgggcaccaggcacagaggctgatgggactgtgcccagctccctggtagacttggagaaggcatccatcttcaggcctcagcttccccatctgtaaaatggggccagaccatacaaggggtgtctgggatggtctgtgcaaactggctggctgaggcttgaactcaagactcaggactcagccttgctgtagccggctccagccaggagtgggtgagaggccccagcacatcaggcacatccagggcagcaggccctactgacaaccaagggggtggcactgctgactatgccttgtgggcaggtgtgccctttcctctttcatccatgagaaaagagctttcatgccccttttgcaaatggggaaactgaggctaggaaaagggagtgtccccatcagagtcatctgcctacagagtaacagggtctagatttagcccagtgcttggctgccagttgctaggcagggtgtggtgagacttttccagaggcagtggaggccaggacaggatatggggactcccgccaggatctgggcagcgctgacctcgtgtgcaggtcagaagagtggccttagcctctgcatagggacctggctgtaggtggttgtgggtggagggagccgagtaccctggcaatccaggaaggaggggtgggcattttgtggagtttggggtggagtcaatggaccttggtagtgagtgtgaccaggaagtgagggcccgatgtggagcaaggcaggagggggccacacaggtctgggtgggtatggggtgctgaggctgggaaggggtcactgtggaggggtggagtgcagggagcacctgccagccttccctgtggaggaattcctctttccttggagttgggtgtgaggctgggagcaggactggtggcttggatagagtgctgagagtcagggctggtgggccagggagcctgggaaggggccgtgtggcggggcacccgtcggctggggtggggatgtgggtgggacacattgcctggcttctggactgcaggtctcaaggtttatccagcatggggcttggggtcccaccgagagcagcccaggctgccacctatccacagtgagaactgctgcctgtgtggcctgggcctccatgtcctccgtggtgcctctgctgtgggctgtcagggcgtgttcgggggagaggcagggctgtggaggtgggagtgagcactaaagcccatctatgtcaagcttctgtaggggacggtggtggagtatgtccccaccagcctcaggcagggagctggtgcccaccctgggagtacagagctgtggggagggtcctgctccccagtgcatagggaggctctgggtgaaggctgctctccaggttggtgtcagatgttggtgtcagctggggtcccattccacacctcaggcccttgtcacctgccttcctgttcctggcctccgccagtgatggcagggcacaggtgccaacggagtgacctcttgccaggtgtcctggggatacctggtgcaccccacagcttatagggcctcaggccagggaggtgcccagtttgcccctggctcctcctggtgggtcaggttctgcctcctggaggtgcagtgggcacgcccagcactggaagggctcacactgggagatcataatatcatgggatgggccatgcctgcattcacatgccctcttctgccccttccccagggctgaagctcctggcaccatgatgctcaccccagcaggaccagagcaccgaggcccaaggccccagcctgccatgccgctgccaccgcggagcctgcaggtgctcctgctgctgctgctgttgctgctgctgctgccgggcatgtgggctgaggcaggcttgcccagggcaggcgggggttcacagccccccttccgcaccttctcggccagcgactggggcctcacccacctagtggtgcatgagcagacaggcgaggtgtatgtgggcgcagtgaaccgcatctataagctgtcggggaacctgacactgctgcgggcccacgtcacgggccctgtggaggacaacgagaagtgctacccgccgcccagcgtgcagtcctgcccccacggcctgggcagtactgacaacgtcaacaagctgctgctgctggactatgccgctaaccgcctgctggcctgtggcagcgcctcccagggcatctgccagttcctgcgtctggacgatctcttcaaactgggtgagccacaccaccgtaaggagcactacctgtccagcgtgcaggaggcaggcagcatggcgggcgtgctcattgccgggccaccgggccagggccaggccaagctcttcgtgggcacacccatcgatggcaagtccgagtacttccccacactgtccagccgtcggctcatggccaacgaggaggatgccgacatgttcggcttcgtgtaccaggatgagtttgtgtcatcacagctcaagatcccttcggacacgctgtccaagttcccggcctttgacatctactatgtgtacagcttccgcagcgagcagtttgtctactacctcacgctgcagctagacacacagctgacctcgcctgatgccgccggcgagcacttcttcacgtccaagatcgtgcggctctgtgtggacgaccccaaattctactcgtacgttgagttccccattggctgcgagcaggcgggtgtggagtaccgcctggtgcaggatgcctacctgagccggcccggccgtgccctggcccaccagctgggcctggctgaggacgaggacgtgctgttcactgtgttcgcccagggccagaagaaccgcgtgaagccaccaaaggagtca

SEQ ID NO: 9796 - DNA, 6000 bp, Homo sapiens
aaacaaaattaaggcagttctaacgtaagtgaaatcatgttcttctgggttgggcctatcgacaggtaagatacatttttaagttcttagttcaagagaagcaaaaagtactctagctctgaaacctcattgctctcttatagaaagtttgtatgatatttataggtaacttctgcatctcggaaacggcctatcttcttaagctgtcttacctttaaaagtattccatctcttaaacttgcttctgagtaagagacctgaactgctattgttttcctgtaattggattgatctttgtattttttgatggtccactttgtattttggtgtttatttaaaagaagggacagagatgaaaggcagtttgatgtttgtgaaaggtatttatacgagctacatgcttttcccattccttctgctgagactaagccacattcttgcttaataaaaagctatctctttaggggctttgccagaatttgcagtcagatcattaagaattttttttttttttttttttttgagacggagtcttgctctgttgcccaggctggagtgcagtggcgcgatctcgactcgactcactgcaacctccgcctcccaggttcaagcgattctcctgcctcagcctcccgagtagatgggattacaggtgcctgtcaccacgcccggctaatttttttttatttttagtatagacagggtttcaccgtgttagccaggatggtctcgatctcctgacctcgtgatccgcccgcctccacattacaaagcgctgggattacaggcgtgagccaccgcacccggccttaagtatttaatttttaaatcctctgtattccgagccctgttctaggtactgggagctcataaaaataaaccctttctagtctccaggggtttcagagggagaagttgtattcctagaaaagtttagcttttctgtttatgattaaaaacactgtaaggaactattataaggtgtgaggccactgctgtagtggccctgcctcagagccagtgtaaaagcttaggaaacatcaccagctagagagaagcgcccttgggatttgggtgtgtggcctccaggcttttctccatattccacacagatgtggatgtaatgtgataggctctgtcttttggaaaaaaaaaaagtgggggtggggatcattccaccgtgcttgcttccatgttttgttttgtgtgagacagggtctcgttgtgttgcttaggctggaatgcagtggcatgatctcggctcactgcagcctagacctcccaggctcaagtgattgtcccacctcagcctcctgagtagctgggactacaggcgcgcaccaccacacccggccagttttgtttattttttgtagagacggagtctgactgtgttgcccaggctggtatcgaacttctgggctcaagcaattctcccacctcggcctcccaaagtgctgggattacaggtgtaagtcaccacgcctagccttcagtgtatttttaaaccagcttttctgggccccttctggatgtgccaagtgcaggagtgcagtggtgggtaaggagtgggcacaagctctcggaactgggagccccagaaccagcacacaggatttcctcccttgtggcccactggacagtccccggccgggctgtgtttctgtgcagcaggctgaaatgaggcagtgaaggggatttggttctgtttggcttctcagggcttccgagtggacctgccaatcaagtcggcccgctaccgtggccagtacaacacctatcccatcaagctcttctatacgtccaacatccccatcatcctgcagtctgccctggtgtccaacctttatgtcatctcccaaatgctctcagctcgcttcagtggcaacttgctggtcagcctgctgggcacctggtcggtaagtaggctctttgaagatgagctagcaatgcagctaagttgcagtggtttctatcagtgtcttgctcatgaacagatatttcatccaaagatattttccattgtgccttttacaaattcagcacattaaattatcttttcagtaaaaaaattgtactgtgggcaccgagtaaaattgcattctttcatctgctcagaactatttttgccttgatgctaaagtaaaatgaaggagcactcacatgcgtttggtttcttcttccccaggacacgtcttctgggggcccagcacgtgcttatccagttggtggcctttgctattacctgtcccctccagaatcttttggctccgtgttagaagacccggtccatgcagttgtatacatagtgttcatgctgggctcctgtgcattcttctccaaaacgtggattgaggtctcaggttcctctgccaaagatgtaagtagaagcaaaactttctggaagggtgatgaaagtgtgactggtataaggggtgtggacttgtcacctcatcataaataatggtctgtgacgtgtgcagatagatcgtcgtcctttagggggcagttcagaagctttaagggctgacagatggagtccagcagtagatcagctgtgggtatgagaatctgaatccacactgtaaagttagactttttcatatgacttccttgcggcagttttaaagttctctgtatgaatattgtcagtgctcgaagaggcgatctgtaactgttcagtaccacttggaatgcctatttccccttcagcctccaattccaacttctcccctgtgggcaccctgcaggttgcaaagcagctgaaggagcagcagatggtgatgagaggccaccgagagacctccatggtccatgaactcaaccggtgagtggtggccccaggtccccaacctcccgtctgtggacatgtgttgtttctttccatgcagggcatcctgataggccctagcacttactgggtcactaaatcttatccttgggttacaggacagaattaaatgttatatatttataaacttgctaagtgctggacactggagacgtaaaaataaacacttacagcccctttcctccagagggagccactgggtaaggagatggaagcatgtggccaggcggataggagacagtgcagtaagggtcctgagagcaacagctgtgactggcagcgggaccctcaccctggctcatgccggtggggtgctgaagagagcgccctggaggagggtcactctgagctcagagcaggcaggtcctggcatctgagcgcattttggggcctgtggtggcattaaggctagagaggctggcagtggctgggcacggaaggggttgatgtgcatctgaagcagggcagaagggatggagcctgcagtctcttaggaaggtcagtgctaatacatgaaaccacgctagagagggagagggggaggccacatacctgccaggctgtggtgagagtttgggccagaggtgatggtgccagatacagctgtacccttggagatggagcagttaggtaaggaagggcaaagtccaggtgaccttagatgctgccacagcactcttcagtctgcacagtcctcagtacaactactcatctcttccatcgtcactcagaagcagccacagacagacaacagacaaatgagcatggccgtgttcctacaaagctggctacaaagtcagctgcagaccaggttgtcctatgggccttacctaaaggaagcaaccacaggaaaagccagaattgcaaacttcagatcattttctaatccctagcagggatggtaggcaatttagttcattctcttaatattaagctgctggatttacagcactgtgcagtagaagtagaattcaagtcacatgtagtttttaaaatttctagaagtcacattaaaaaagtaaaaagaaacaggtgaaattaaatttaatatatttaacctagtatatccaaagtatcatttcaacattataattaatgttaagaaaaaccatgatgaaatattttacatccttgtcttcaaatctccaaaatcttatgtgacatctcagtttggtctagtcacagtcccctggccacgtgtggccagtgtggccactgcctggacagcagcgccttggcctagagcgctagcatgttagtagatgactttctaggagacagcagaggggcctttgaggcattaggtcccaaagtctcaggtgagcctgttggccgcctggctcacggggagctctgtgggtgtccaggagctgactgtgtcccctcccccaggtacatccccacagccgcggcctttggtgggctgtgcatcggggccctctcggtcctggctgacttcctaggcgccattgggtctggaaccgggatcctgctcgcagtcacaatcatctaccagtactttgagatcttcgttaaggagcaaagcgaggttggcagcatgggggccctgctcttctgagcccgtctcccggacaggttgaggaagctgctccagaagcgcctcggaaggggagctctcatcatggcgcgtgctgctgcggcatatggacttttaataatgtttttgaatttcgtattctttcattccactgtgtaaagtgctagacattttccaatttaaaattttgctttttatcctggcactggcaaaaagaactgtgaaagtgaaattttattcagccgactgccagagaagtgggaatggtataggattgtccccaagtgtccatgtaacttttgttttaacctttgcaccttctcagtgctgtatgcggctgcagccgtctcacctgtttccccacaaagggaatttctcactctggttggaagcacaaacactgaaatgtctacgtttcattttggcagtagggtgtgaagctgggagcagatcatgtatttcccggagacgtgggaccttgctggcatgtctccttcacaatcaggcgtgggaatatctggcttaggactgtttctctctaagacaccattgttttcccttattttaaaagtgatttttttaaggacagaacttcttccaaaagagagggatggctttcccagaagacactcctggccatctgtggatttgtctgtgcacctattggctcttctagctgactcttctggttgggcttagagtctgcctgtttctgctagctccgtgtttagtccacttgggtcatcagctctgccaagctgagcctggccaagctaggtggacagacccttgcagtgatgtccgtttgtccagattctgccagtcatcactggacacgtctcctcgcagctgccctagcaaggggagacattgtggtagctatcagacatggacagaaactgacttagtgctcacaagcccctacaccttctgggctgaagatcacccagctgtgttcagaattttcttactgtgcttaggactgcacgcaagtgagcagacaccaccgacttcctttctgcgtcaccagtgtcgtcagcagagagaggacagcacaggctcaaggttggtagtgaagtcaggttcggggtgcatgggctgtggtggtgttgatcagttgctccagtgtttgaaataagaagactcatgtttatgtctggaataagttctgtttgtgctgacaggtggcctaggtcctggagatgagcaccctctctctggcctttagggagtcccctcttaggacaggcactgcccagcagcaagggcagcagagttgggtgctaagatcctgaggagctcgaggtttcgagctggctttagacattggtgggaccaaggatgttttgcaggatgccctgatcctaagaagggggcctgggggtgcgtgcagcctgtcggggagaccccactctgacagtgggcacacggcagcctgcaaagcacagggccaccgccacagcccggcagaggggcacactctggagaccttgctggcagtgctagccaggaaacagagtgaccaagggacaagaagggacttgcctaaagccacccagcaactcagcagcagaaccaagatgggccccag

SEQ ID NO: 9797 - DNA, 6000 bp, Homo sapiens
ggggtttttttttcttgctgatttgtttgagtttgttgtagattctggatgttagtcctttgtcagatgtatagattgtgaagactttttcccactctgtgggctgtctgtttactctgctgactgtttcttttgctgtgcaaagttctttagtttaattaagtcccagctatttatctttgttttcattgcatttgcttttgggttcttggtcatgaaatctttgcctaagccaatgtctagaagggtttttccaatgttatcttccaggatttttatagtttcaggtcttggatttaagtccttaatccatcttgagttgatttttgtgtaaagtgacagatgaggatccagcttcattctcctatatgtggttagccaaatatcccaggatgatttgttgaaaagggtgtcctttcctcactttatgtttttgtttgctttgttgaagatcagttggctctaagtattttggtttatttctgggttctcttttgtgttccattggtctatgtgcctatttttataacagtaccatgctgttttggtgactgtaaccttatagtatagtttgaaatcaggtcgtatgatgcctccagatttgttctttttgcttagtcttgctttgggtatgtgggctcttttttggatccatatgaattttagaattgttttttctaattctgtgaagaatgttggaggtattttgatgaggattgtgttaaatttgtagattgcctttggcaatatggtcattttgacaatattgattcttcccatccatgagcatgggatgtgtttccatttgtttgtgtcatctgtgatttctttcagcagtgttctgttgttttccttgtagaggtctttcacctccttggttatgtatactcctaagtattttatttgattttttgcagctattgtaaaagggattgaattcttgatttgattctccgcttggttgctgttggtgtagagaagagctaacgatttgtgtacactaatcttgtatccagaaactttgctgaattcttttatcagttctagaagctttctagagaagtcttcagggtttttgaggtaaataattgtatcatcagcaaacagtgacagtttgactttttctttacctatttggatgctttttatttctttctcttgtctgattgctctggctagaacttctagtactgtgttgaagaggagtggtgagagtgggcatccttgtcttgttccagttctcagagggaatgctttcaatttttccccattcactattatgttggctgtgggtttgtcatacatagatggcttttattacattgaggtgtgtcccttgtatgctgattttgctgagagttttaatcataaagagatgctggattttttcgaatgcattttctgcatctattgagatgattatgtggtttttgtttttaattctgtttatgtggtgtattacatttattgacttgtgtatgttaaaccatccctatgtccctggtatgaaacccacttaatcacagtggattatctttttgatatgttgttggattcagttagctagtattttgttaagaattttagcatgtatgttcatcacggatattaatctgtagttttcttatttggttatgtcctttcttggctttggtattagggtgatgccagtttcatagaatgaattagggagggttccaccttttctatcttgtggaaggaatagtgtcaaaaggattggtaccaatccttctttgaatggctggtagaattctgctgtgaatctgtctggtcctgggcttttttgttgttggtaatttttaaattaccatttcaatattgctgcttgttattggcctgtttagggtatctaattcttcctgatttaagctaggagggttgtgtttttccaggaatttatccatttcttctaggttttcgaatttacatgcataaatgtgttcatagtagcctcaaatgatcttttgtatttctgtgatgtcagttgtaacatctcttgtttcatttctcattgaggttatttggattatctctctccttttcatggttaatcttgctaatggtctatcaattttatttatcttttcaaaaaactactttttgtttcatttatcttttgtattttttttaaactgttgtttcaatttcatttaattctgctctgatcttggttatttcctttcctctgctgggtttgggtttagtttgttcttatttctctagttctttgaggcgtaaccttagaatgtcagtttatgctcttttagtctttctgatgtaggtatttagggctatgaactttcctcttagcactgcctttgctgtatcccagaggttttgataggttgtgtcaccattgtccttcagtttgaaacattttttaatttctatcttgattttgtttttgacccaatgctcattcaggacaggttatttaatttccatgtatttgcatggttttgagggttccttttggagttgattttgttttattccactgtggtctgagagagtgcctgatataatttcaattttcttaaatttattgaggctcattttgtggcctgtcatatggtctatcttggagaaagttccgtgcactgttgaatagaatgtgtattctgcagttgttggatggaatcttctgtatatatttattaagtccatttgctccaagtgaatagtttaaatccattgtttctttgttgactttctgtcttgatgacctgtctagtgctgtcagtggactattgaagtcccacaatattattgtgttgctctctgtctcatattttaggtctattagtaattgttttataaatttggaagctccagtgttaggtgcatatatatttaggattgtgatatttttctgttggacaaggccttttaccattatataatatccgtctttgtctttttaaagtttgttttgtctgatataagaatagctaaccctgcttgcttttggtgtcaatttgcatgaaatgcctttttccaccctttaagttttagttatatgagtctgtctgtgttaggtgagtctcttgaaggcagcagatagttggttgttgagttcttatccattctgcagttctgtatcttttaagtggagcatttagaccatttacattcaatgttagtattgagatgtgaggtaccattccatttatcatgctatttgttgcctgtgtaccttgttgtttttgctttttaaattgtacttttgttttataggttctgtgagatttatggtttaaagaggttctgttttgatatgtttccagcatttgtttcaagatttagagctccttttagcagttcttgtagtggtggcttggtagtggcaaattctctcagcatttgtttgtctgaaaaagactatatatttccttagcatatgatgcttagttttactggatacaaaattcttgggtgataattgttttgcttgaggaggctaaagatagggtcccagtcccttctagcttgtagggtttctgctgagaaatctgctgttaatctgacaggttttcctttatagcttacctggtgcttttgtctcacagctcttgagattctttcctttgtcttaactttagataacctgatggcaatgtgcctaggcaatgatctttttgcaatgaatttcccaggtgttctttgagctgcttgtagttggatgtctaggtctctagcaaggctgggaatgttttcctcaattatttccccaaatatgttttccaaatgtttagattcctcttcttcctcaggaacaccaattattctcaggttttgttgtttaacaaaatcccaaacttcttggaggctttgttcatgttttcttattcctttttctttgtctttgttggattgggttaattcaaagaccttgtcttcaagctctgaatttcttctacttgttcagttctactgctgagagtttccagagcattttgcatttctataagtgtgtccaatgtttcctgaagttttgattgttttttctttatgctgtgtatttcctcaaatatttctcccttcacttcttgtatcattttttggatttccttgcactgggcctcgcctttctctggtgcctcttggattagcataataactaacctcctgaattctttttcaggtaaatcagggatttcttctcggtttggatccattgagctagtgtgattttttctggaggtgttaaaggaccttattttgtcatattaccagagttggttttctggtttcttctcatttgagtaggctctgtcagagggaaagggctgaaggctgttattcagattcttttgtcccacagtgtgttcccttgatgtagtactctcccccttttcctgtggatgtggcttcctgagagccaggctgcagtgattgttacctctcttctgggtctagacacccagcaagtctaccaggctctgggctgttactgggggttgtctgcacagagtcctgtgatgtgaactgtccatgagtctctcagccgtggataccagcacctgttctggtggaggtggcaggggggtgaaatggactctgtgagggttcttagctttggtggtttaatgttctatttttgtgctggttggcctactgccaggaggtggtgctttcaagagagcatcagctgtggtagtatggagaggcaccagcgtggggaagggggtgcctagaactcccaagagtacatgccctttgtcttcagctaccagagtgggtagggaagggcaatgaggtggaggcagggctaggcatgtctgagctcagaccctccttgggcgtgtcttgctgtggctgctgtgggggatgggggtgagattttcaggttaatggagttgtgtacctaggaggattatggctgcctctgctgagtcatgcaggttgtcagggaagtgggggagagctggcagtcacaggcctcacctagctcccatgcaatctgaagggcctgtctcactcccaccatccccctctaacagcacggagtcagtttccaggcagtgggcaaggagggctaagaacttgccccaggctacctgcctcccagctgaaaagggctttagttcttcccctgcctgtggagtctgcatgccagattcgcaccctcccctgagttctggccaggaggcttctgaacaagttcatattgttacaaagttcagctggagacttccttctccctgtggcattttcccagtgcctctggctgccctcctgagggatccctgtggtgccaggcaggaatttcctgcttggggaacccagtgggctcccagagcctttctcgcagcttcctctacccctgtatttcgctcggctctctaaattgactcagctccaggtaaggtcggaatcttctcccataagctagaccttcagtttccccagtagtaggggtgtgttcagggtcagaggatcccactgcaagtgggagatccctttcccacttcggcagtttgggcactcacagtatttggggtgtctcccagttcctgcaggagcaggtcacttccttcagagggtctgtgtgtcctctcgggattcctggtttattcctgcagtcattctggagctaaaattcatgatgcaagcctccatccgctgctctgtctgtccaagacagagctgcgatctagccctgcctcccatctgccatgatgatcgggaaccaatccaaactgtttttcaaagtggctataccattttacattccagcaatgtatgaagatttaattctctacatcctcaccaatacttgttaatatctgtctttttttattatagccttccctgtaggtatgaagtgatattgtggtttcaatttgcatttccttagttattaatgatgttgagcatcttttcatgtgtttactggggctgttgggattatctgttctatttctttacccatttttaaattggtttgtttttttattgttgttgtaagtgttcttt

SEQ ID NO: 9798 - DNA, 6000 bp, Homo sapiens
ttcttttctatttttgatgatgaatattttttattattattatactttaagttctgggatacatgtgcagaacgtgcaggtttgttacataggtatacatgtgccatagtggtttgctgcacccattaaccatctacattaggtatttctcctaatgctatccctccccgtgccacccacccccctaacaggcccaggtgtgtgatgttcccctccctgtgcccatatgttctcattgttcaactcccacttacgagtgagaacatgaggtgtttggttttctgctcctgtgttagtttgctgagaatggttgtttctagcttcatccatgtccctgcaaaggacatgaactcatattcgtttttttcaaaaaggctcaaactcagtaattaaagagatgcaagttaaaacaagtaatcatatacatatataacttaccaaattcacaatgtagactaggatgtaaagagataagaactttcaaacactgctgttaggataaaattcatagaaagcaatatggttgtgtataaaaaaagattttttaaaacttcacagtttttgacaacttaatttcactcctaggaatctatcctaaaagagtcatcagaaatgctgacaaagagttatatgtaagatgttcatcataacattgccttttattcaaaaaaatgggggaaggtacaatctaactatataaaaataagtgaataatagcacttctatataatgaaatactaacacactcatattaaatgatgtttacaagagctttggtgaaactaatacaattaagtgaaaagagcaaaacatcaaactatattatcctttaattatgtaaaaaaatacatacagataattgataagaaggaagtatgccaaatattttgtctagggcttaaaattgtgagcaatttgttcaaattctctccaaattttctattatgaacaccaaaaggtgaaattaaaaattagggatatatgtggtaatatttttgaagaaaaaattaatagatgtgtcaattatttttctcactagtatattcattttatttcttcctaattcctagctataatattttctattgttatttatgccaccatttttgcctaattaccatagacagtgttataaaaagtggtggaaatgttttctccaatggcagtaaaataatataagctcttggaaacttacaacctgaaatgacactgccagggccgtatttaaacctgaatgcagggatgatttcccctaggaagtcagcaaaaattcagctccattttaaaggtgattaaacaaagtttaccaaccccattattgttaaacagaatcagacctggacttatctggtagagatacattgatatgtttcaataaagcctattgccataaatgagaaagtcatattttcctctgcagacccccattcattttttggcagatacggctaaaatagtagtctgctcagagcccagaaaacttaccaggaagtgaaaaatcctatcttccaggtgttttaaaacacatcagtatttatttcacacagaagaagtgtgtagatttacaatttcactcctctcattcagtattctgcctaggtagagatagtcttagtttatcctttaaaattaactttttctattttcaaaaaagtgtcactgtcaccatttcagccaagaaagaaaatttaattccttattatctgaataacatttttccctattttgaaactctgcatgaaaacatttgcatagggaaactggggggggaattgccatagatgaaaaatagataactttaatcaacaatttttttatttttccatcttcaatctatgtttttggtggtattctaacacatgtatatgtattgtcgggggaaggttagacaaatgtcataaattgaacatctgaaaatcaaaccaatagagctttttaagaataaaaggatacaatttgacctagcaatcccattactgggtatatacccaaaggaatataaaccattctactataaaagcacatgcacacatatgtttattgcagcacgatttataatagcagagatgtggaaccaacccaaatgcccatcaatgatagactggataaaatgtggtacatatacaccatagaatactatgcagccataaaaaggaatgagatcatatcctttgcaggaacatggatgaagctagaagccatcatcctcagcaaactaacacagaaacagaaaactatacaccacatgttctcactcataagtgggagctgaacaatgagaacacatggacacagggaggggaacaacatatactggggcctgtcgggggtcgggggggtgaggggagggaacctagatgatgggtcaataggtgcagcaaaccaccatggcacatgtatacctatgtaacaaacctgcacgttctgcacatgtatcctagaacttaaagtaaaataaattttttaaatgaaataaatttttaaaatgaggattaaaaagcctgcctgttggttgaaataaaagtaagatagactctgtctatggaaacagtggtagaatcattcctgaattattccaacaacagttttcaacctaattggtcaatctatgcccaccagcagaaaccagtgtcacttctaactgttcccttccctccttttagaattggccttgtaacaactcaagggacacactgccatcaacattccttcactgtagatcatgtaactgttgcttaccctcttattttaggctttctggctcatgcttcactagaaacactgatcacagaacctaaagtaaggtgtgcagtgaaggggagtgttgcctccattcaaattagaggtagttcttccctatttgctttctgtgtttgctgggaataatgcagtgggagcagaggctgggtgcacccaagataacaaaatgtccagacacagaggctcgtttcctggagaacctgtaaagacctataaaggttaaagattggagtatgtatgtggggggggagtgtgggggtgtgtgggggtgtgtgtgggtgtgtgtgtatgtttcagggccttgaggtccagattttggagagtgtcattaaaatgtctccggagggctgggcacagtggctcacgcctgcaatcctggcactttgggaggccgaggcaggcagatcatttgaggtcaggagttcgaggccagcctgaccaacatggtgaaaccccatctctactaaaatacaaaaattagctgggtgtggtggcaggcgcctgtaatctcagctagtcaggaggctgaggcaggagaatcgcttgaacccaggaggtggaggttgcagtgagccaagattgcgccactgcactccagcctgggcgacagagtgagactccctctcaaaataaataaataaataaataaaaacaaaatatatctggaagccaggcacagtgagtcacgcctgtaatcccagcactttgggaagccaagataagcagatcacttgagctcaggaattcgagcccagcgtaagcaacatggtgaaaccctgtctctactaaaaacataaaaattagccgggtgtggtggtatgcatgtatagttccaaatactctggaggctgaggcatgagaattgcttgaacccaggaggcagaatttgcagtgaccccgatgacaacactgcactccagtctgggcaacagagcaagactccatctcaaaaaatttttaaaaagtctctggattcagaggccagacatacctggcccccatatccgtcaaccaattctctagcaaaatttagttgtatagacaaaacataacacctgatgtcttcagccaagtctctctactgtgattatacaattcctaatattttgaccaattctagtgaaaacttttctgcaaaatgtagaagatagtgtatgagatctgaaaaggctctggagtgttctagtttagatctcacatgttgtggatgaagaacctgtgacctacaagggcttaggagtttgcccccaacctgcccagcacacgacaagttaggggcagcatcaggagcagatcctaagcctctccgtgaccaggccaaggacttcagcccagctaaccctggtccctcctctggcctttgtgggacctcctgtgtcagccacagagtcctcatgtggttcttgtggcacgagtgaaagcatgacatggaaatcaacggggtccctggcttcctctcatcccagttccaatgcttatggaccaagagcatagatctaggatttggcttcgtgttctcaaaagtggggacaattttgcctgcccctgctgctccatatggaaacagagaaagagcgctggactggaagctgaggtgggagccccacccctgccgtttttagagtatctgtggttccaggcactgggacaagtcccttaacttatctgtacttttcttgactcacccccaaaaaatggggataatagtgcctgccctacccatttctgtaagatcaaaatggaaagatgtaagtgaaaaaagtcgttcatgagttgtgaggagaaaatgtgaaaagtctggtttaagacagagcacggtgggtgcttcccaggggccatcttaagcgaggtcagccaaagtggtctgcagtcacgttccccgtggtggggacacgtcagccttttctccagatggcggcgctctccggaggagccggagctggagggaggccggtctggcccggagcagggagtccttctgctccctggcacggctctgcgctgaacccacccggcctgcggagagcagacaagtgcctcttgggcccgcttctctaacaaatgtaaaaataatgcccttgaaccaggagcgaaactgagctatctaaggaaaacactgtgagcaaatactgagagcctagggaaaccatctgattagaagagctcccctcaggagcgcgttagcttcacaccttcggcagcaggagggcggcagcttctcgcaggcggcagggcgggcggccaggatcatgtccaccaccacatgccaagtggtggcgttcctcctgtccatcctggggctggccggctgcatcgcggccaccgggatggacatgtggagcacccaggacctgtacgacaaccccgtcacctccgtgttccagtacgaagggctctggaggagctgcgtgaggcagagttcaggcttcaccgaatgcaggccctatttcaccatcctgggacttccaggtaggcaccgtgcaccccggggtagagccaggtgaaccaggtgagcagggaagggggcgtttgcgttaagccccactcccacctctgggtgaggaccctggcagctctggctcagaatgaaaggtgtgaataaaaggagaagctggctcgtgtctaatagggcaacagtcatgcaggagaaaatgggagggttaatactcaaggcgaaggaatcgctagtgaggaggcaggcctcaagaagaatgggtctattgtaagggtatgttcatgatacctggaataaactcgtgtttctcaaggagaaaataaattgtgtgcattacttgcatgtggcttgctcctgcctgcacatacatgggagcagggaagcaggatgctgagtattttgttatatctggaaaagtttattgagagctaatttaattttctttccatttcaattaaatttttcaaagttggagtctctgtgggtgccaaaaagaatattgccattaaattataaatatccttttgctgcatttgtattaagaatatcttgtatactgtcctaaaaatcaatgtatatcaaaatataattacagaattataattatattatgtcagaatataaatataattataaatgtgacatcctttcacccctaaagatgaaataaattaaacccctgcttttaatatagataattacttcaaatatgcatcatagcaactttgcattctgaataatatgggagctctatttgtatttttaaaatgcaaacaagaaaataa

SEQ ID NO: 9799 - DNA, 6000 bp, Homo sapiens
aatgtagagagtttctccaggcaatccatggagtggttccttagaagttatggggctgtttggagatggtgtggtgggatagaaagtacatggacttaggaatcagccatacctgggtttaatacttagctttagctctgtgacattgagcaaatatttaacctttctgattttattttttaaaaattggaataaattgatataaaatacttgccttgcaggttttttatgaagttcaaatgaagttctctgggtatgggtacaaagcttggtgcctggtgcagagcaagcatgcaatcatctcatcccttctcttcactgtgtcagctcttacgaatagttgggcaggacctggactagggtgaggcaagaaggtgcctgggttaacctgagagcaaggccccattaaatgatgcaccgtaggtaccttgcttgcccctccttggcctcagcagtgcagctgaagcattgtcagaccagggctggagcatcttagggtagatgcctcccaccccaccaccatctctgggaccatcttacggatgacacagtagaggcccagacagtcaatatcatttgatttaagccaatcagttagtaagtggcaagcctggaatgtgaatctaggcctctgggctcttggcctctgttttgctccctcaaagcctatagctaaactcttttctctaataagtctgtaaattttctcaatagggaaagaggacatgtctcaaattttcagcacttcccaagacatttactacaggtcttgcatgcagttggggttcaataaataaacatgcactgattgagaaaaaaggagatattatcatggcattataattttaatgcatagaaatagttataataaacattaacgcagctgaaggagagaaatgcattaatttcacaacatgttcagctctttaagatgttagcttttcaggctccacaggggctctggaactctggaactcacatagactcacgcccactgtttcaaaagagaaaactgcaacttggaaggggaaatggtagctggagacagaaaatggagaagtgggggaggtagagggaatttagcttcagcaatttaggcagtgattaaaccaggagtaaaggaaagaggaaagcagtgctgctcatacattagtgagcacacacatcacttgaggatcctgttaaaatgcagatccagttcaggaggtctgggtggggcctgggattctgtatttttaagaagctcccaggcaatgctgatgctgctggctcgtggaccacactatgtgcgtggaagaaattgcatggaggctttgagtttgtgaatctggtccaatggaagcactgtcttcagtctggcaattctcaggattcccactcactgttttccatccttctgcaggggaaatctgtgcgttcaagatccatggccaggagctgccctttgaggctgtggtgctcaacaagacatcaggagagggccggctccgtgccaagagccccattgactgtgagttgcagaaggagtacacattcatcatccaggcctatgactgtggtgctgggccccacgagacagcctggaaaaagtcacacaagtgagtggcctgacagagccctctggacgcccctccctcccgtgcccaccccacttcattcacatgctgctcttcagatatgtttaccctcttgtcacacaatggtgctccaactttgctcaactgcttggcagtttcctggtcccatgcaggcatcttcccagtctgctttccacacctgcaatattctactccctcttcttcactggaagacactcttgtttcaccctcaggtctgagtttaggtgtcacttcttccagaaagccttccctaagctggcccacccccgcagacctggtcaggacctttccctgggcctctgccgtgccataagctgctctctgtcacagcagttttcactgtgggttgtcactgctttttcccttatgtttatctcagagcctaacagagtaagaggggttaaattcttactgaatggaggagtggatgaatagagggaggaatgaacagtaaacctgttgcctaaagctggtgcagagggaagggcataaaagtctctctgggatggattcatctcagagcgtcagagcaagggcaagtagagagtctccagtgagagggaggatgggacactcagacaactgccacaattggctgatggtttctcctttcacttggccttgggacctcagtcagtgcccccaggaggtacaggaggttggtgtgactctttctttaccaccatcccttcctttctgtgtgtggtcccagggccgtggtccatatacaggtgaaggatgtcaacgagtttgctcccaccttcaaagagccagcctacaaggctgttgtgacggagggcaagatctatgacagcattctgcaggtggaggccattgacgaggactgctccccacagtacagccagatctgcaactatgaaatcgtcaccacagatgtgccttttgccatcgacagaaatggtgagtgacctcagaggacccctgtggggtcaggaaaacaaatccatcgcctccactctgaagacccaacatgggctctgaatatgcttggcaagttatgcctttcttgccatgtttggtctaagctccataacccagagctcagtcccacacttgagggaatggccttatctgattagcagccctgccaggtctaaaacaccctcaggaaacctcagaaacctactcactcaatgtagtctgtacaactcacagtgccacacatctagataccgaagatggttgatttcctggtcaaattttccagttgtcatccagatgtgagccatgccatcagcttggccatatctgggtccgtttcctatgtaataagtcataataccagccctattgcctctagatgaagacatgctaacagaggaggtgggacttttgaaatcccttctaaaccatagattcattcaggatttttttttttgagatggagtttcgctcttgtcgcccaagctagagtacaatggcacaatcttcactcactgcaacctccacgtcctgggttcaagttattctcctgcctcagcctcccgaggagctgggattacaagcgtgcgccaccatgctcggctaattttgtatttttagtggagatggggttttaccatgttggtcaggccagtctcgaactcctgacctcaagtgatccacccacctcggcctcccaaagtgctgggattacaggcgtgagccactgtgcctggcctcattcaggactttataaagttcttgccagtgtccttttgagaatttcaaccccagtgagaatgaagaatgaaagaaccctcccataataacccaatcccagactgaacaagactggaagcattcctataaagccatttggacatttccccatcaccacgaatagaaaactcattgtagtataaacgccacaaccagagccccaacaaactcagcccactttagctgtaaatttcaacaccttcaacacctaaaatcaagtgtaattatttgccaagtacattgtttaattattagtgtgagtgtgtgggtgtttatatgttcttcctactttgtttccaataagatttaagtagcacacaaagatgcaaaagttgcaaaattcaaactccattcactctgtaattatttattgagtgccaggcatggtgctgaacactggaaaggagatagagtggaacttaaaatagacatgggcctgtccacatacagctcatcatctagcagaaaaaaatagaaaatccagtggcagcaagggtgaagatggtgcacaaagaatgccatgaaccagggttgggcagcaaattagctctgtacctcctgatagccaatgtctagaggaaaatagcatcagccacctgcttgtacaccttcaggagaaacccaacacttcatgatgttgagaccaggtagaaacttactctatggcattgtcttctgtaccctgagactgcggcagatgccatagggactagaagtgaaggagacactctcatccctgtctttaagtagcttagaatcagtcttggaagacagaactaatattcataagacagaaaaaaataataataaggtaatttccctctaaaatgctaaaacatggggaaaagacaattacatacctggataccatgagataattatacaggccacagtgtcaatgcacaagcaagtaaaggaggaaatataggactttaattaaagtttggctcaaaactaagaagaaggtaattttaattagtagagcctgtcagaatcgttccccgatagtttctcccacaggctctgtgaaatgactagcctgtccccaccacagaggcacacatgtgcacacaccactccataaaatattgaacaacttctttgtatttttctcctctgggtttctttttctgtgtaatcagttgtgcagtgtatcccataaaagctttggaatttggggagtgacaagtccatggtgaatagcaagactagacaagtggaggtatctgtgctcagtggtcaagctctacttggcctcctgccctagttctgaagagccacagctcagtgagatgagatgcaaagtctttctttggagggtaaactgccccagtcatgaagataattactcaccttgatgagccattttgctaacatatgccaatttatttccctggctgtctcattaaaagtgagtaatgggcctttgccaggcctctgcctctaatgctggtttacaacctaagatgaagaggagaatgggccctctcagggagtgtgggcccctgacagcgaggtgtacagaagcagtcctccaggtaatgaagcaggacctaggggcagacacagagacggctcccattctaatgagcttcccaattggcccttatccatcagtttctctgagcgacctttctgactccttgaagaagtactttgcatgctcataaggaaagtgcttctgaatttagagcctgctcattgaggcctaggtttcccctaccccatggcttcagatggatgtctcctggcccctccaactttccaggctctgcttgtggggtaaagaatggcagcagggagaatagaagacacaatgtggagtcaacctgacctgtctttaaccagagactcaccctcttcctaccagaggccctcagactccctccctttgaattcctccccatgaaattatggcattatcagtccttaccccattgtggggttgtgagtattcaaggagaagcagtgtgtggggatattgtttgcagggtatctggcatagagagagcactcaataagtggtgcaacaattattaaatatttacctggatgattgggacttgagatttatttaccaggcttaaattatgagcagataactatgagttcatcacatcaccttcctcttggaaagttctggatctatttgagatggcctcatctgctagctagtttttctgagataagtagagcttgggtcctcaaaattgaatcctaaaacataaagagctagcctaataacactgtcacagtggtgatagagctaggactcaacccaggtctcctgagtgttagccccaagacctttccatcagatcgcacctccttgatgataatttacaggatgcatggcagtgatgtttaagtttgcaaacacgaagtatggggcgatgtcagcaaaaaggcagagaaggagatcccagccttcattccccgacaaagtacaatcagacagctatctatgaaagaaaatagctgtaggagagctcaggagtccagttgagaagatacagcaacacagtataagaaaaacaatgagaataattgtgcaaaaagagtaggaagaacagtttcatcttgcatgcatcatcccatcccccagaccagaagtgcttagcacagagagagaactccttagctcaaaagttacccttga

SEQ ID NO: 9800 - DNA, 6000 bp, Homo sapiens
tctcccactctagagtgtaaacttcatgaaggtagggtctaggcctgtctgcttcacttttgcatctcacatagctagaccagcacctggtacattataggtgcttactaaatatttattgtcatccttatatttctgggataaacccaaattggttctagtttattgtccttttttccccacttgagtggatttgttttgcttatattttatttaagagttttatgtataaattaatcagagacagtaccaaatttcttctctgaaatccctctgtagttattatcccctttgaatgagttgggggaaatattccctcttgttctcttctctgatagagataagactgaaacaatctagttcttgaaagtttggtggaaccctcctttaaatccctctggtaatagtgttgtttcaatttgtaagtactgtttttcttctttttctttcttttccttccttttctttttttttgagacagagtctcattctgttgcccaggctggagtgcagtggcgcgatcttggctcactgcaacctctgcctcccgggttcaagcaattctcctgcctcagcctcccgagtagctgggactacaggtgcgcaccaccaaaccaggctaatttttgtatttttagcagagacggggtttcagcctggtctcaaactcctgacctcgggtgatctgcccaactcggcctcccaaagtgctgggattacaggtgtgagccaccgtgcccaacctctttttcttttttttttttttgagactgggtctcactctgttgcccaggttggagtgcagtggcaccattatggctcactgcagccttgacctcctggggtcaggtaattctcccatctcagtctcccgagttgctgggactacaggcatgcactgccacacttggctaatttttttgtagtttttgtagagatggggttttgccatgttgcccaggttggtctcaagctcctaggctcaagtgatatgcccacctcagcctcccaaagtgttgggattacaggcatgagccaccgtgcccggccataagtagtcttgtatctttttgagattgttaaagcaagttgtttttccttcctgttagaactttatcatttcatctcagtttctaaactaagtagagcggttactcttggaggtttttgggctgtgtaatgggttcatgcatattcattatattaaaacataggacatttaaaagggccacttggactaacaatggcagcatatcttaaatcaaggattatgagtaacctgaatctataatctcaagttctattgaaaatgcatatttgttcaaaatatgagggagtgaatctatcttggtgcccaggggcaaacattttccaaaggtgaatcttctaggattcacacagataggcccaaatgggaactgttcaggtaacccagccttgcatctttccccagttcagactctggaagaaagtccttgaagatctctggacatttgtccaggattaagcaaaagccacagcaagtttctttcactcgcatcagtgtgaagagaccaccaaacaggctttgtgtgagcaataaagctttttaatcacctgggtgcaggcgggctgagtccgaaaagagagtcagtgaagggagataggcgtggggccgttttataggatttgggcaggtaaaggaaaattacagtcaaagggggttgttctctggtgggcaggtgtggagggggggatcacaaggtgctcagtgggggagctttttgagccaggatgagccaggagaaggaatttcacaaggtaatgtcatcagttaaggcaggacctgccattttcacttcttttgtagtggaatgtcatcagttaaggcaaggaccagccatctggatgtgtacatgcaggtcacaggggatatgatggcttagctttggctcagaggcctgacagtttccaatagaacataacaggcagcagagaagacagagactgaaagagcatcctgggggagatggaattgtgacaaactaaaccagtgagccgaaattaaggctagccctgtggcatgactggctcttgtgcaagtgacattattatgtgacatattatatgtctgggtcattactatgctaaaataagtagattaaaatgaaaggaatttccaaacaaatgcgggaaggaaggcattatgaagttttcagatgtcattagctataacaaagttcagaattaatcatgacaccatgcaaaatgggaaaaatttgcaagcaaggagagggtggagatgccagaacccgtaaatttatgccagctgagcactgtgggggcacctggcaaatggatttactattttgccaacaccagtaaagtgttacaaaattgcaaacggaattatttctatgcaaacaattgtttttaaaaagggtccctacatcgactaatgcaattcagtttttttctgggtaagcacaaagccagaaactaaatgaaaaatattagaaattatttttcttggaatcatgttgaatattaaaattgagatttactttcctccccaattccctctctctcccatcagtcttttcatgcaccaatgtcattttagttttcgtggtaaaagaggtggtgaaaaaggggcaggggcatttgagagagtaggcgaagggaggctggggattccagaaaaggaaaagatggggagtcgctcaattaaactctaccaccttcatctgttaacagggattcttgcctgtctcgacccacttccagaggcaatgccatattatttgagaaagctggatataaaatttgagctctgctgtccttgtcccaatccccctccccaggagaaaaaataagctgaactgtactcgtgacattatgggtttttctggaaaacaaggataaataagttttttgaacatttttctcccctgaaactaaatccgtaagagagttaaaaacccgtggaaagcgagttaagtcacttttcaagtctttgtactcaggggattctgtaagactcatggaagaataatggcgcaaacagcaatattttaatgttagaacggtcctctgaaaagtctgcccgaaacgctacaaagataattgtgcagtaacttctaaaaactctactgggacaggaggcaacaaaactccggatcagcgagagctctgtttatccgagggtgctgagcctcaggccccacggagattcccttttcggcacttggaggcctgaactcaggtctaacctttcgtgtgcgcgctctgatactcaaccaccgttcagtctccggaggctgttacaactgtccccattctacagatgaagttgaggctacagcttagtgttcttggggagggagggagttggggggagagagagacgcttttcctcataaccttaaacaaaagtacttaaacctaaagcaactgaaaaatgattttctttcaacaacggtgtttcctttggggtcaagttctttgatctcatctacaaaaccaagaagcgggacaagtatttttctgcaaattagaacggggcgttcccctcccccatcaccccaattccagaggacgtcaatcacagtggacgcagcaccgcgagcggaaatgcggagagcatcggggctccgcatgtggggcacaatgaaacaagagcagccccggccagaggtccagtaaagcggaaagacggtcccgcccgcacacccctccggaaaactgaagcgtctcctctgacccccaaggtcagaaagatttattacttccttcgagagggcgcagccacagacccactagagagggcgggcagggtgtcggaagccagagaacggcgctccgcgtcctcccaccgctccagggcgcagaggtgtcctcagtgcccggagaggttggcagtgtcggccccgagggaagcgtggagcggacggccgacaggggatttctgcccaaacttcatcaccaactctttctgagagcaaaaacatggggccgagtccggcagctgcacgcagaatccaactctctggcagctctcggcaccgacgagctccagatcccgcgttcgcatcccggcgctttgcgcgcagagctaagccttcggacccgtggactgcagcccccgcgcgtcgcggtaaagcgggtcgcgtctccagcccccgaggcgcagcgacggtgggagccggctcggcgttgggggcgggggcggggccggcgaagggggagggctgcgcggcggaggggaggagccgcggcgacagacggcggcgcgcaccaaccgggcgccggctggcaggagccgcgcagaggctggtccgagcgcgttgcgggcgcccggcgtaaggggagtcgggtagcagcatcctcctgggcgccgctttcgcgcggcggcggcggctgcggcggggtctttctttgcttaaatacctcgttggccagaagcgctggtaccgggggcgggttgggtcgggtcgggcagtgctgcacacctgggtttccttgcctagagctgtgtgttcggggtcctttggtccagtcggaggctgcggagcggcgggggttgcctgcgctgtccgcccgggcatcctcccggtgatggaagcagccgccgccgccgctgcggggtcgcgctgtgccccatccaccgctgccagagaggtgggaaaattcgccgcacggaggccgaaagcgagaggggctgcgccgctatgccgggagctgagtcccatataagccgcccccagccatcgcccccagccggcttcgttcccctgagcgagacaggaagctgcggtcccgagaaagcggaggagacgtcgctggagccgggaggcgccgggttcggcggagcgcggagcggggctctgggccgcgtgaaagtttttcttcccgagccgcagggcgcccgctgcccggaaactgcccagggataagtcggccgactccccagacccctcgaaggtgcggggacccccagcggaagcgagagggagcgaaatcgaggaacgagtgacagccggacagtccgccgggcggtgatccggggccgctcccgggcgcgccctcggctccaggtgagcggaggaaccgggcagaaccgagggtgggcgttacttaggaggaggaggctgggagggagattggggcgcatccgctcactccgcttcccctcgcaggtcctacccggagccgctgccatgggagagccagccttgggcgctggggaccagccgccgcgcccgcctcggagtcgcggcccgagtcccggcgccagcagccagcccgctgcgtccccttcccgggctgcagggctgcctccgccgcgccgccggcccggattgtgcctgtgatgagccgcagcccgcagcgagctctgcccccgggcgcgctccctcggctgctccaggctgcgcctgcagccgcgccgcgtgccctgctcccgcagtggccccggcgcccaggacgccgctggcccgcgtcccctctcggaatgaaggtgttccgtaggaaggcgctggtgttgtgcgcgggctatgcactgctgctggtgctcactatgctcaacctcctggactacaagtggcacaaggagccgctgcagcagtgcaaccccgatgggccgctgggtgccgcagcgggggcagccggaggcagctgggggcgcccagggccgcctccggccgggccgccccgtgctcatgcccgtttggacctccgcactccttaccgccctcccgctgccgccgtcggggcggctcctgcagccgcggcagggatggcgggggttgcggcccctccaggcaatggcactcggggcaccgggggcgtcggggacaagcggcagctggtgtacgtgttcaccacgtggcgctctggctcgtcgttcttcggcgagctattcaaccagaatcccgaggtgttctttctctacgagccagtgtggcatgtatggcaaaaactgtatccgggggacgccgtttccctgcagggggcagcgcg

SEQ ID NO: 9801 - DNA, 6000 bp, Homo sapiens
attcccggtatagaggcaaatacaacctgtaaaggctcaaacgcttcatcaaaagccatgactataatccaaagctattaggtttaagcaacttatttggaaattatcaccttcaaataacatgtagggcaacctcagtagagatgaaatggacgaagcaggcatggaaactgcccttcctgccttaaatacagaatgccagatcacagctctgaataaaagttaagaccacattgggccagatcaggactaacactagatacacagctgagataaagttccagtgactttggcagtgtgaaagtcaggaccagtaggcacatatactgaaggcaatttaagctgtgtttcctgattaaagccagggactgaaaaatcactacctattcatgatgaaagactagaaaacttctgaagaccagacagagtttcagagtggtatagttactaatctactaaatactgcaaatatatagtatctgcaaatatatatataaggttgaaaactaagctcagaaatgagcattaaaaacttttccagatcaagggagtgctgtacccccaagctgaggtttcataggctaccatcatccaggcactcagtcttcccaagcaagttaattcccaccaaaaatgaacacagtcaaagattacaaaacctaagcagaagtccattatcaagaaacagtgtccacaagtgcaataaatataatttatacctgaggaactataaatagtaaagcaattgggtaggggctcttaacagacagatattcaaaatgttaaggaaaataaaagaagaagtagacttcgtaaaataggaacagagggctaagaaataagaacaagtagatctgaaaaagaaacgagtaaaaagcctagaaatattagtgccaatttctatgggtcaatgatttcacaagtgaatagctaacagttatttcctgtggccttacttggcagagagaggtgggggaagcaacataggagcagaaacagttcctttctaagtctgacttataaaataggaacaataaagacaacagtttattgaacaggatggtttattgagctgtccagcactataagcaaatggcttacaaacattttcctactctttttgatgcttgagagagatactttgatagaagattattccaaaatataattacttggtcatttagttctctctttattatcataggaaactatggggaatttttttttctttagattgcaaactagttttaaaaagagcttgtaatgaacaatttaattagattggttttggcttgcctaaaagcttaagaaggtattaatattctaatcaaaagtcttgggaaagcattcttagaataaaaaaaggaaagaaaatcttcattcttatgctttaagaaccaggaaagctgtcaaaggatataaggtaactcttacaaaagcaattgtaaaataaacgtggtttggccacaatgagccaacacctatgtttgccacagacttagattcccacctcactcatggcaaatttattcagctgcttaagattattttttactcatacttcgaaagaacaacagcctggaatttttagacttttaatggcaatggaaggaacttacctatgataaacatttttctttactctcacgctttcttaacccatggctgttctgagtcaatgtttgccttgcattcaaaaaataatagtaaagattcaagtaaaacatattcattaagcactatttgaaagatataccaagtgctttaacattatctcactttattcctacaaagatcatgtgcaataaatatcactgttcatgtttcctacagatgaaaaaaaactgagggtcatgttcagagaaattggatgacttacccagagccacacagatttgtacgtggcaaaggaggattccatttcaagtctttcaaccccaaattcatcttcctttctctaaggggaaatggtgctatggaattcatgtaagccacagagcttggataaaaggaatagtaagaccaaaaataggaaaagtaggaagaggtggatcctcctatgtttttaatcagggttctatctacctgtaactcttctgggaaaagaagcaggatgtgactgaaacatagctgctttctagatctcacaaatctggcttttctagtcaatcacatctctctctccttcggcttctcaccaaaccagcatccgttcagcttcaaagaaaaaagagccctactgtttcccactcatttatcatcaatctaaagtaactgccaatcacaaaagtcccatctttatttctttccttagaaacaaatttctctagggaagcttatcagtagcagaagtgcagactgggaaatggcctatgtcaccctcccatctagaaatgcccagtgcacatccagatcccacacccccaagagcgttgtgcaatatctgttaatttatgagagctgtttcccatagatgatgctgcaggcattagtaaggagggcaaagttcaagtgatgacaccatctctactccacctggctggtttccaggtgccatctcctgatccctctccccacccccactgccctctcaccatccttcccccaaaccccacactccccaccaatctgggtcagtgataaacacagagtattccacatgcctctgatatgatgtaacattcgacacactaaagataatactgcctttaaggctcctgtccccctggctagacttaaactgtgtagaggaggagaactgtgactttattccccttgcatcctggacacccacacatggtaggtgttcagtgaatatgtgatgagttggtgaatacccactgaatgtgctatttgcattgctacttccttgtgcttccttccactgtttctatcgcctaaaattcttctccctttttcctccaccctcgagtaggaaaaaatttgtttctttattgggcagggagttctggtcattatacatttatgtaaaatgttcttctaattggcatattccatgctatgtccagattctttcaagcgaattctcattaaggtaataatacctcaccgaagtttccagggatgatcccctagctgttcaaagctaccttttatatattaaataccagtcaatatgaatcaatggtaactgaaaaaaaggctgatagcttgtgaaggagttggagtacaaaactatgcctataaattgatcctcacaaaggcagactttttcccacagaaattgtattatgaatgctagttatagtttgagactagttaataaaattctactcactccaaacataggattaatggaacccacatgagttgtgtgctgtcaaagtcgagtcaagaggagagagaaggagaagaaaatttcctccctgttctcatagctcagggcacccaagggattctagagcgtaaagtgtactcccttctattttttactgcccttattcccaagctgaaccaaatatttacctctgccctcattttcagttatggagttcactcaggcccttttcaaccttcgaggttccttaacctttacattattaattctttttctaagcaaaatccagctgatctctactagatggttaaaaggatagtaaataggtaaattaatccacattaagccacaaatgactgctagccctaaccctttaatgactaattaatttttaataaagaatatgtgtctatataaatgaatttatacttctaagttggcataagttcagaaaaaatagtaagatgaactggaaaatctacaaggtatagggaaatcctctgggtgaggaagaactagtcatacctccctaaaagcctagccctagtttctgttacattatttcttcttttcatcttctgttttctaaaccacaagtttctaaaagcaccaaggaattttctacctgtttatttcgttttgtttttgtttctgtttttttgtccaaggtgaggcccaagttgacactgagtattctctgtgaaactctgcaaggagcaacatgtgatttcacagaaattagtctcgatacactatattcatggctgtaagttctatgctgctcacccattcatttgtccattcagtcactcattcatgagacatttatcatctgcctcctggaacataccagggcctacaccagaaaacaaggaaacaagtaaacactagtaaactttaaacaggctctccccacaagcaactgacagaccagtggagaagacagatatgtcaacagatgattacaataaagtttcaaggccgggtgcggtggctcacgcctgtaattccaacattttgggaggccaaggcgggtggatcacccgaagtcaggagttcaagagcagcctggccaacatggcaaaaccccgtctctactaaaaataaaaaaattagctgggcatgatggtacacactggtagtcccagctactagggaagctgaggcatgagaatcacttgaacctgggaggtagagatcgcagtgagccaagatcgcaccactgcactccagcctgggcaatacagtgacactctgtctcagaaaaaaaaaaaaaaagtgtcaaacctacatccaaaatgtcaaagtgctcaaaaaagttgggaaggcttcaccaaagatgtgacatttagggtagataacacctgtttgtggatactaatgtcctggtgagtcaaagaagaaaaggatgtacattatataagctggatgcaaaaaggaacaataatgaggacatgcaaccaaaaacttacatagggagaacaactttacttactcagggaaggcaaagagaccacttaagaactccttcacatgtgttatgtcttaaaagctgactactggagttgtatcccttgcacagcatccctttgcaccaaagtgaacactactctaagaacatgtgttcagctctcctgaatgccaagcacaaccatgcttggcatggcagtggtgtcttatttctgctcctctttttccccagggcatgccattgcaagagaatgctcagccatgttcatctggggacctgctcctggtagagcaataggatctgtgtgcccagcaccactgcccacctagctgtcctggcctgtgcccaatgctgaccttcacctcagagtgtggctgtaccacattcggtgatgtcactctcactgaaccttcagcctccttcctgggacttcctgatggactgttatccagggcagaatgtgttgattttctaaatcacataaatgaatagcttgactgttgattatgtagaaaatcagagcaaatatttgcatggctttgtgcagcccattcttgagcatctgattctccccagaattctaaaaaacctgctgctttctcaagccctcagtaaagacatgctttcttgataatcctagccaaacctattcatttgacatctttgttacacaaatggttaaccacagagttaacttcagaaatggctggcaggtatgaaggttagaagattcatgcacttttgctagactgaattggaagttaaagagtaagtagttactgactgcagaggcctggaaaaccatggaaaaaatcctattcctcaaagtcgagccctacctcctacgcctcttaaatcaattgccacagtgaccaatttgtcagtcacctaaaggcagctatcctgaccacttaagggagaatacttataatctttatacctaagtaaagattgtgagaggaaagaaatggtttaaagaatatgaatgtgtcacacttctgaggttaatgataaatgaattggtcctgcttacctcaggaaaaactttcaagtctttctgaaaaactaatttaattcagtagtattttctaagatttaggttatgtttttaatcaatttggaaaccaagatttacttatagaaaaaaaggaaaaggacctagataggtttattcacatagaatcccaatttcacttctctggatgataccattttctacaaaagcaattat

SEQ ID NO: 9802 - DNA, 6000 bp, Homo sapiens
ctctgtgttgagcaaacaataggtaccagtctttggtttctgaagcaggatattgtggtgattaagaggatggtctctataatcagactcctttggtttaaatctacctttatctctgtggtgaattaaagctggccagaaattctctgacatttctttcataaagaggtgaggtctatgttccctccccttgaatttgagatcattctgactacactgaccaataaaattggccaaagtgaccctgtcccattttctggcccaggccttaagacaatggcagcttctacttatatctcagagccttatgttaccatgtaaaagtctaactacagtgttgcagaaaccacatggagagccctgagactaaaggaagaaaaagaggggcccagctttatatgagcccagtgttatagctgttcccatcaagccaccttgatatataagtgaaaccaccttggattctgcacaccaatgtggccacaactgaacaacagcaaataaccgcaatcaatactacttggagcagaataatcacccagtttgtctcaacccatcttcctgacccacaaaatcctgagataaagtaaaatgattattgttttaaatacacagttttgagttggtttattatacatcaaaagataaccagtggcctgatgtggtggcttacacctgtatcccaacaatttgagaggcagaggcaggaggattgcttgagcccaggagtttgagaccagcctggccaaaatggtgaaaccccgtctctactagaaatacaaaaattagctgggcatggtggcacatgcctgtgttctcagctactcgggaggctgaggcagaagaattgcttgaacctgggaagcagaggctgcagtgagctgagattgtgccactgcactccagcctgggcaacagagtgagactctgtctcaaaaaaaagaaaattagcctggtatggtggcatgtgcctgtggtccctcaggaggataaggcaggaggatcgcttgagctcaggcagtgaaggctttggtgagctgagattgtgccactgcactccagtctgggtgacagagtgatacccggttccaaaaaaaaaaaaagataaccagaacagtgtttaccacttgtttttgtttcctcatctctaaaatagggacaataatgtcatgtaattgcttgcttctatagagctcgatgacaactctagatagtgagatagagacatctgagagggaggtctgtttcttctagttctccagaccatgtggccctttagtagttcagcctctcccaggaccccggtgctttagggaacactcatgttgaagtggcccaggcatggaggagtcagtcatgaagcgtcagagctcttagagaatagtgactgtcttcccttagacaaaatatttcacatttctttgttcgtggaggccaagttggctctcaaccctgctcccagctcaccaacttggcacctcacaatctccccaaatcgtgcttcatcccatcttccatctttgctcttgttatacttccttgtctcaaatcacccctcactttctctctgccaacacagattccatcacaagcacttgggaaatgagtaagctccaagttttccaaaggatgttctggaaaatcctggtcctgccagctacaggatacaaaagatgggttctgcaggcattgaagcttggaaaacgctgggtactatatttctcagctctccaataattacacatgcacttgcaaattaaaggccctaaaaagttctcattcagagccctattttgctctgtgttattcagatttcccaaacatatcttgacagtaaaacagttttcttataaaacaagacttcttagaaaaagtgaccactgagctgagtcctggaggggtgtagcaggaaagcaggagaagcgggcagagcaggaagcaggaagacaggagggctgatctggctggaagacaaatcagggaggactaagtttaagatctgagggccatggaagcctcctgaaggctttcagcaaaaatgtaatatcagtttagcatttatagagatcactagttctcactttataaagatcactaactttcactacctgatttgatctttattttttgattgaagacctatagtaagcaaaacatgttgcattattacctaacatctatgcacacataacaaaaatttcataaaatggctcttattacatgcaatgcccactaatattttctattatttttttcctcctttggaaaatcacttttaacaatctattttcatcatccaggtaagcaaagatgaagacctgaattttatttgaatgcaaatgtgtggagacccctgtcttcttcctgatattctgtgtgaatagatgagaatgctctgctttaagacaagcagaagaagccatgtcttgttcttctgctaaggggcagttactcatttaacctctgtgtatggcttctcttgtctcttgtcacaagtagaaggttgtaacatcattgagggcagaaagcaagtcttagatttattttattcacaaggacagtatttggcacattggtggacataccatgcatgtaacaatacacttatcgattgcactgaattgacagctcttcacccatttcagggtgaatgtcttctgctcctgtgcttgttagctgaggaattgacttcctgcatcactggaaggaacccctagacttcctgctgcttagtcccgtatggtcaaacctcacatccggtgaggtccatggagatagtgcccatattcacattcttctccttttcttcccccaaggatccctcctgtctttctatcccttccagggctactatttgctctcacttctgaagtctccatagaaggctagtgacagaatggggcttagtgtcctcagccacttccttcttgctgtttctgaaaacaagggagttagcctttttggtttaaagccttcactgctaaacacccagaggaacagaataagcaataaactatcaagtaggagtatcacaaaaatgattcccagaatctcacacaattttcccttgcccccaaagcagtctgttggtgacctccctgctacacttccagagagtgaatttcaccaaggttcccatcccccccacgattccctctctccagattagatattctacttcttgcctggaggtctgaaggcacaattaataattgaacaattaatgagttagtcactatccaagtgtttgaagtctgaagtggtcagggcattccaggaaagtgactgtttttcagtgtttctcttcctctacccaggaaataagttacctcaggcttgaaagaaaactgaagtgtggtccacaatatttcttactttcatctagtcactcagacagtatacatgggtaactccagttgtgcatctgaaaaatctaggacaacagggctagtgttggtcaaatgccatgatggtaacttctagaagcaaacggtgtagtccagggagaaaggagaaagctgcccagtccccagagagaagctgcctagctctaagtagcatatgcatttgattaacccaatccactcacccccaggactgttgcctttagagttcatatgctcaagactccctgtcagaagccagtgggttataaataaagttcatttgcacctgcctggagtgttggaaaacagctgtcagcacagtgatgacagcccttgtttgcttctggtggaaacacagctggttttctttttcttccttttgcttgtctgtatatccaatttttctaccaaaaaaagtcacattattttgtaataaggaataaaatcacagtttgttgttgtgttcagaagggtctcctactgtgtgcatatacctcacacacagtgtcattctattgtttatatttaaaagatgatgttttgttgtttgtttgttttcaaaaaggaaaatctatgagagagaacatagcctgggttttggcaacacagagctggagaggaggtaggctaatgggtatgaacatacagttagccaaagggataacctctgttgtttgacattacagtaaagtgaccatggttagtgataatgtattatagattgcaaagtagctagaagagaggacttaaattgttcccagcacatagaaatgatcaatattcagtgatggatacccccaaataccctggcttaatcactacatattctacacatgtaaaatatcacacgtaccccataaatgtgtaaaatagtatgtataaataaaaaataaaatcttagctcttcttcttatgctgagatgagcttgcaaaaatcactttgagcagaagcatccccacttgtgaagggggcatgacaccttcttcacagaagggtgaagaacatttaaggtgctcattcgtgcttggagtattatgcatggctcaataaacatttgctgtttttctgctttctttctcatcctgaccctgagatttctaagtatctttataaagcaaccagtactcatttcttagaaattttagaaggagcctcaacatttttccagtctgacttttctggaatccttcccacagcttccctttccaagggcctctgagccttggcaaagcccagtccatggcttccttgtgagcaggtggcctattccacggtaggacaggtcttaccatggtaataatgtcacttgctttttatttagctaaaatttgactccctaaaatattcgacctattttaacctctagattctcaatgaagaactagtaagacttccagttccacctcttaatccttcagctgttatgtaataccagtaccaggcagggccatcgcataatgtagagcttggtccaggcgtggcagagaacttcttaagtgacacaaagcaaatgaatgaatcatgcccctggcagttggcaaactttctaataggggtgtgttttactgcctcctgcactctataactgctcttccaactgtgtcttctccccagtcaactcatcaggaccttttctctccctctctaccaatgctgaccttcctttccccttagccttagtggatgatggtttctttattcctatatggaagacatagctgagaaagttgattaggaaaactgtttttgctaattccatcacatcgtgtagggaaaagatagaacttaattacttaattgcgtaacaagtagagaaacacagcaatcagacaataaaatgaacagtagctttttgccttaaacaattcttttaagtctgagctcaatgatacacaactagaccatcaaattattttgatattgaggaaaacagaagctcttttggataaccctgaattccaggctttcagtggaaaagacaaagacacgcactgtacaccattaagtacttgggagacatgattttaaccaggatgtaactcaattatattagtgatttataaagagtctggagaaaatatttctttatttgggcatgggcactgtcagattaaaggtgcagtggttctaaatgctgtttgttccagccctgtcttcgattgcaacaatgtgagtgtcttgtctgtgctggtggattattaacagaggttattggtctccatggcaaaacgattgaatgattgctctgaacgtaatctcatttatgggggtgcaaaaaacaaagcacttcaggtcagggagaatgtataaatgtccattgccatcgaggttctgctatttttgagaagctgaagcaactccaaggacacagttcacagaaatttggttctcagccccaaaatactgattgaattggagacaattacaaggactctctggccaaaaacccttgaagaggccccgtgaaggaggcagtgaggagcttttgattgctgacctgtgtcgtaccaccccagaatgtgcactgggggctgtgccagatgcctgggggggaccctcattccccttgctttttttggcttcctggctaacatcctgttattttttcctgga

SEQ ID NO: 9803 - DNA, 6000 bp, Homo sapiens
caggaagcctactgattggatccatgacaagtgtataatttataggagcagctgggccctccttggcacaggacaatcctaattttttctctgtatactctctttccaattctgctccatcttagccttctccttctcctacttcattggtggacatcagctgggaattccttacacttctcctatttctttctcttattttcttcttggggaaggaaagggtctcctccctttcctaaagtgaatctcagaagttcaatttagaaggatatcctaatgatatccttctaaaggatatgagatgaacctttatctcataaatcagggtctcatcgtctctcctccgtaaatcctaacagctgtcttacctatcagctcccaacttccttcatattgctaccagaattaggtttagcatttgtggtatgatatttatttagtcaaatctgatggttttttggtctctactcagatgggagatttcatattttatgtttatgagaagtttctttttcccttttctgcctgtggccctcaattggaatttttccaatgattttcccattcttaatgattgttggattttctgtggcttaaagaaaaagaaaatagagattttctaaatatggtgataaaaatctttgtaaacataataagggcaacctttttgtttatgagtctaaaactcaacagatctgatgtcccagtgattttctctctcagattataggtaaatcgctggctgtttttaagaagcctatgtagagaagtggaatatttagaagcttctgaaatactctttgactatcaataacttcaatatctggcttagaattttctctcctgagggaaggcttctgggagtaacgctttctaaacgcaatctgtgctggccactaaaagttaacgtttctctcagtgccccgtatttgctttttttcatcatgggatagtggctgaatgcatagacttcagtgacaaacagcctacatttaaatcccagtatctactgtgtgactatgggtgaattacttaacctccctgtaccttagtttcatcacttataaaatgggaatacaatggccaaatatcatcatgcatattttaagggtgaaaagagataatcctttttacatgtacacagtacttgagtgtacagcaaaggcctatttttattgctattgttatatttactattatggttagctatatatattatttgcatttccaactaaattgtaaatctcttgaagtcaggttcttacactgctacttaaatataagggcataagaagggcaacctttttgtttatgagtccaagactgccattaaaagtaatggcaggccgggcgcggtggctcatgcatgcctgtaatcccaggactttgggaggctgaggcgggcggatcatgaggtcaggagatcaagaccatcctggctaactaacactgtgaaaaccccgtctctactgaaaatacaaaaaaattagtcgggcatgatggcgggcgcctgtagtcccacgccaggcaggagaatggcatgaactcgggatgtggagcttgcagtgagccgagattgcgccactgcactccagcctgggcgacagagtgagaccccgtctcaaaaaaaaaaaaaaaaaaattaacatggaatgcttagggatgtcacttaaatatgtaagaattttttatcatgtctttaagccatctataattgatgttcaaatgtgaataatgattcttagattttttcttcattaataatagttgaatgttttacaaatagaaagttatagtaattactgaatatatgtaacttattcccacaaggcaaaattttgatttaaagcataactgaaacataactgtgtagttaaatatgttgaatgcaaaagcaatgcttacaaagtttgtttatttatttatttatttatttatttattttgagacggagtctcactctgtcgcccaggctggagtgcagtggctcgatctcagctcactgcaagctccgccttctgtgttcacaccattcttctgcctcagcctcccgagtagctgggactacaggtgcccgccaccacacccggctaattttttgtatttttagtacagagggggtttcaccgtgttagccaggatggtctccatctcctgacctcgtgatctgcccacctcggcctcctaaagtgttgggattacaggcgtgagccacagcgcccagcccaaaatttattttttaacatcattttttaaaaagtctgtggtgcacttaaaacaactatcccccaattcctagtaaggtgtcagttttctgcaagtacttaatggtatctggactaagtgtacatttcaaaacactcacattatgagttaatgcatttgcaacaaacttctgagtgaagtcagatattgcctaggttgcaaataaaaaatgcaaaggagtgaggacttaagacctattgagtacccctggaacccttaatggttttctttgcttccttttctctcttaatagacaatcatcccacctaggaccatactaatcaaacaatacacaaatgtttcatgttaaggctcagaatcatagactcatataatcaggagattggaaggaaacacaaaaagtaagacttttcaagacaacctcattcacactgtttacttgaattatttactcttgttttattattaatttttatgctgttcaattgactacaattcaaaacccagtgtattcataccatgtgctaagatatgctccttcctatatgtgttcctctaaagaaccatctggatcttgtgggggatattttcctttgtggtatcaaagccaggagctcgtggttttcctttattttttaagggaacactatcatgtagcatctgggaccagaaagaaatcttgatgttatatattttacagatattttctttttggattttttttcctctaagagaaaagcttttgttaatgtgtcatgtaaaaatacattaactagtaacttgtcaagaagtgctagattccattcttgtgcgggtccatttatatatgttcctgaacagctaatatttcatttagtttccaattaaacttgctcaaatacatttttgaagtgcattgcttaaaatttacattcaaggcaagaaaacgagtttgtcagtaaatgtagtaattaaggaagtcccaagtctgtatttttaagatactagaggtaattgtaactaatcactttaacttaaagaaatagaattggaaatacccccctccccccgccaccccctaccaaaaccataccttagtcactttggaattataaccgtcttttacgtctatcaatataaatgtattgcatttggcattcaaattactttcaaagggataaatttcgaatttttttttttcattgtagcttctgatctttaaatgtactgaacaggaggatttggggagcttgtcttgtctgataggtgttaagtatctatgacgacaaatttgagctgaagcaatgtgcaatatggactagtaatatcttcacaagactattttggaaattctcacgttgatgttattaatgacgtgggtttattagcatttgggtaattaagaaaaaacagtactagaatttaaaaaaaagaaaaaaaaaggtaagaagggcgaaacagagttctccactcctctcccaaccctcattcctttggaggctcgcgccctcttggaatagcaggttcctgcatgtgccagaaatccggtcccggcaaagctagacgctctgcaatgacaggcgttcccagctagggactcctggctgcttggagcttgaaaacacctggcgtggttctcgagggccctagaggctcctgctacggactggtcggctctggggttgtaggcagaaggctctaagcggtcggaagggtttcctgtgtgtcagcaacttcactttgccgagatagctggcggaagagggaaggagcgctcgcgggccaatcgcctgccagcagccaccttggagcgcacccctctccctcgccgccgactccggtagcagcgtgccggcagaggctgaacacactcggcctcggcggagacctgctccccagaagacgcctcctgcttcccactgcgccctggaggacgcgggctggctgctgggcgagctcggcggaggcacgcccctcgcctccccgcggagtgcggactcgccccggtgcccaaactccgcccaccctctagggagctccgctctcccgcctaaccccggcactccggacagagctgggcctggggaaggggttcctgaactacgcggacgccgaacgggacgcgctgcagaagcgcacgagtctgcggccacgcgcgctccgatggctgccaggagctgagctcagggtgggcggaggaagcggttagacgccccgaaactgagctgcacgtttctaaggtagggaggaggaagatgcccccaattaagttgatctttgagccaaggaggctggggagcagcctccccaagctagagccctgcagagcgagtttcccttgacctcgctgcgcctctggcgcgctctgcagcgcggacccgcggcccctcgggaaagcgcagtcggaaagttatccgcggcggttccctgcgcgccctgttgtgtaagctcggcgttgccagcggacggagaagttgctggcttgcccgatagcccagttcggtggcggcccggggcggatttcatggcccgcggcgaacgcggggccagagctggcgtgggcgagcccctgcgcgccccctcccgcggggatccagttcgcctgctcccttccgctcgctggcttttccgatgcttgctgcgcccctggccgccgctgccctctcgccgcctcctacccctcggagccgccgcctaagtcgaggaggagagaatgaccgaggtgctgtggccggctgtccccaacgggacggacgctgccttcctggccggtccgggttcgtcctgggggaacagcacggtcgcctccactgccgccgtctcctcgtcgttcaaatgcgccttgaccaagacgggcttccagttttactacctgccggctgtctacatcttggtattcatcatcggcttcctgggcaacagcgtggccatctggatgttcgtcttccacatgaagccctggagcggcatctccgtgtacatgttcaatttggctctggccgacttcttgtacgtgctgactctgccagccctgatcttctactacttcaataaaacagactggatcttcggggatgccatgtgtaaactgcagaggttcatctttcatgtgaacctctatggcagcatcttgtttctgacatgcatcagtgcccaccggtacagcggtgtggtgtaccccctcaagtccctgggccggctcaaaaagaagaatgcgatctgtatcagcgtgctggtgtggctcattgtggtggtggcgatctcccccatcctcttctactcaggtaccggggtccgcaaaaacaaaaccatcacctgttacgacaccacctcagacgagtacctgcgaagttatttcatctacagcatgtgcacgaccgtggccatgttctgtgtccccttggtgctgattctgggctgttacggattaattgtgagagctttgatttacaaagatctggacaactctcctctgaggagaaaatcgatttacctggtaatcattgtactgactgtttttgctgtgtcttacatccctttccatgtgatgaaaacgatgaacttgagggcccggcttgattttcagaccccagcaatgtgtgctttcaatgacagggtttatgccacgtatcaggtgacaagaggtctagcaagtctcaacagttgtgtggaccccattctctatttcttggcgggagatactttcagaaggagactctcccgagccacaaggaaagcttctagaagaagtgaggcaaatttgcaatccaagagtgaagacatgaccctcaatat

SEQ ID NO: 9804 - DNA, 6000 bp, Homo sapiens
ggaaagaggatgggcagaatgggcatggagagctgagtgcacaccaggctgagtatttctgcagtgcccactctctgcggtgttatctgaagacgtttctttcttttaggtgttttttgtttgttgttttaacttaattttgagatttataaatataaatcctaaaaatactttttaagaaaaatatagaattaagtcgtgggtttggacattattaccgaagtacttgttcccatatgataaaatctaagaaaaaatcctttggaaaaaattaataaaataaaaacaaaaacatgcagctcttccagtcagtgatgctgatggcttaccctgtcaaccagggagcttgctccctagtgtgaggaatgcccaggatgacaggatgactgtctttagccagtagctaggcatcctgaattgggaagaaggttgcattaatgaatcaaagctcctctctaacataaagaatccttgagtcccgcaacctgaaagactaaagaccaatgcaaattcctaatttctaagctcttttaattcctacataaacagtcacttttgactacattatagaagtgatttttttttggctcatgaacaatggaaatttgtttctcacagttctggagaccggaagtctaagatcagggtgccagcatgatcaggttctggtgagggccatcttctggtttgcagactgcagacttctccttgtactctcacatggtccaaatagtgaatttgtttttcaatatttcagatgtaagaaatggacatttgtttttttcaatcaaattaagccaaactctgagctcttagaccaagctaggagatgagccatttactttcagtggtttttcaacgtactctttcagggttattcaggaatctgatatcatcacacaggcatagaaattagagaatagcctccatcttcagcccaccgtggtcactgctgagatccctacagtccaaatgctccagctggagtcagtggttccatttccttccaatgctcatgagctccagagcctccactcttcatgtccaggttctccaacaaccacacgccatgctatcagagggcctctcggggccttgctcagagcaggaagcatcttcttgtcattcacacaacctgccattactggaacctaccccattcttgggaaggccaatcatctccctgacaagtggactaatatataaattccccagcttctgactccacttcacctcaaccctcccacaccaggagattatttttcgtctttaagactcatctaggaatcctaaaaaacaaacaaccagaaaagattacatcctccatgaaagataggagagttgtggtggagagggatagagaagttagttgatgcgttgatgggtgacatattagaaagtcagacttacaaaaaatccatatggatctctcttttctggaatgaggaaagggaaagaaaatgctttctttctcttccagttggtccataatatcaaacaaacaacagaaacactaagtcgtgtttttcttcctaataccctattgcttctctacaggtaatcactgtgaccaaccaggtcacaggttaattcattcagtatgtactgagtcctgtgctggactttgggggtgcagcagtgagcaagacatacacagtacagcatcttccctcagcatctgtgggggtttggttccaggctccctgcagatatcaaaatttgtggatgctcaactccttgatataaatggtgtagtatttgcatataacctatacaccttctccctcctatactttgtcacctctagattacttataatacctaatacaatgtaaatgctatgtaaatatttgttatactgtattctttagggattaatgataagaaaagtaagtccatacgttcagtagacaaaatatttcccccacatatgttcagccgcatttggttgaatccacagatgtggaactcaaggatacaaaggctgtattttgccctcatagaaattagtctagtgggtgtgtcaggaagtaaaaaaggagaacaaatcattgtaaatgtggtaagtgctttgatagggatagtccctgtaagaggagttagtttagatggcattcaaagaagggggccaaggaaggaatatttaagcaaaggcatgaaggctgaggagttagccatgtactgactggtgagtaactttccagggagtagggtctgcaggtagcaggaagctctgaagagggacagggtttggctggtttgaggaactgaaggtaggtcagcatagtttgagcctaaggaggaacaggaagagaaatgtaccacgaggaggctatagaggagactggagccatcaggaggacattggaagccatggacaggagtttagatttccttcaagtccatggaaggttttaaatctgagattatggaatctgatttaaattttacagatcattctgactgtggtgtggagaatggttggaggagagagaagtcctaagatgtacacacagtagtacacctgccacgtagggagaattccataaatcaaaatggactcacctgtcatttgtgcctagtccttccaaaccagtccacttgtctctgggcccctcctcccaacccaagcaaacgtggtaggctggccttagcaggaggagaagggaaggaggtggttcagggttcagggtgggtgtgaaaacatcacctctgcatcaatgtactgacccatctctcccctcaaacactgctaggtgcagatagtgagttggactgtgttgtttttgcccactggggtcagagataagaggaaaatggcattttgccagccctttccagttattcaagctgaatccagcttctgatatttaaggagcccttttggaaaaaaggaaaataatcctctataaaagcaacaaaaaatatctatttaaagtctattatatttaagtcattatgtgagccctttcaagacatagtgagaaatcatgattatattctttgaccaaactcttattataatacaactccaaatacctgcattttcaaatgtgaattattcatgttttacaaacacatataatgcttataaattattaactctccatgacaaccttaagatgcatgttctattgtgcagaaaccaaggcacaaagaagcttcataagcaggattcaagccatgtagtctgtctcccaaattgcttttaactcctgttctttgttacttctccatttaaaaattctgttaatgagaaggcactgactcattgtaccaggttattttaagtttaactttaaattccaaattcattcacttgacctgcagagggaaatgcttcagggctccagtgtggtatggacgtgagtatcaaatgctgacggtgactttttttgtttgtttcaaaggattattgggactttgcagaactctgcagagttttcagaagcctttcactgccgcaagaattcatacatgaatccagaaaagaagtgccgggtttggtgatcttcaaaagaagcattgcagcccttggctagacttgccaacaccacagaaatggggaattctctaatcgaaagaaaatgggccctaggggtcactgtactgacttgagggtgattaacagagagggcaccatcacaatacagataacattaggttgtcctagaaagggtgtggagggaggaagggggtctaaggtctatcaagtcaatcatttctcactgtgtacataatgcttaatttctaaagataatattactgtttatttctgtttctcatatggtctaccagtttgctgatgtccctagaaaacaatgcaaaacctttgaggtagaccaggatttctaatcaaaagggaaaagaagatgttgaagaatacagttaggcaccagaagaacagtaggtgacactatagtttaaaacacattgcctaactactagtttttacttttatttgcaacatttacagtccttcaaaatccttccaaagaattcttatacacattggggccttggagcttacatagttttaaactcatttttgccatacatcagttattcattctgtgatcatttattttaagcactcttaaagcaaaaaatgaatgtctaaaattgttttttgttgtacctgctttgactgatgctgagattcttcaggcttcctgcaattttctaagcaatttcttgctctatctctcaaaacttggtatttttcagagatttatataaatgtaaaaataataatttttatatttaattattaactacatttatgagtaactattattataggtaatcaatgaatattgaagtttcagcttaaaataaacagttgtgaaccaagatctataaagcgatatacagatgaaaatttgagactatttaaacttataaatcatattgatgaaaagatttaagcacaaactttagggtaaaaattgccattggacagttgtctagagatatatatacttgtggttttcaaattggactttcaaaattaaatctgtccctgagagtgtctctgataaaagggcaaatctgcacctatgtagctctgcatctcctgtcttttcaggtttgtcatcagatggaaatattttgataataaattgaaattgtgaactcattgctccctaagactgtgacaactgtctaactttagaagtgcatttctgaatagaaatgggaggcctctgatggaccttctagaattataagtcacaaagagttctggaaaagaactgtttactgcttgataggaattcatcttttgaggcttctgttcctctcttttcctgttgtattgactattttcgttcattacttgattaagattttacaaaagaggagcacttccaaaattcttatttttcctaacaaaagatgaaagcagggaatttctatctaaatgatgagtattagttccctgtctcttgaaaaatgcccatttgcctttaaaaaaaaaagttacagaaatactataacatatgtacataaattgcataaagcataagtatacagttcaataaacttaactttaactgaacaatggccctgtagccagcacctgtaagaaacagagcagtaccagcgctctaaaagcacctccttgtcactttattactcccagaacaacaactatcctgacttctaatatcattcactagctttgcctggttttgtcttttatgcagatagaatcaatcagtatgtattcttttgtgcctggcttctttctctcagccttacatttgtgagattcctctgtattgtgctgattgtggatcttttcattctcattgcagaataatgttctattgtgggacttattacaatttgttcatcctattgttgatgggcacttgagaactttccattttggcgctattacaaatagtgcaactatgaatgtactgcatgttaccatcttacttgagcctttaatggacttatttcttcaaatccttccaaaaattattataagcattgaaattatagtttcaagccaactgtggatacccttaccctttcctcctttatcacaaccaccgttacaagtatacttatatttccctaaaatacatttaaaacttacctaagtgacatttgtagttggagtaataggagcttccagctctaataaaacagctgtctctaacttattttatttccatcatgtcagagcaggtgaagagccagaagtgaagagtgactagtacaaattataaaaagccactagactcttcactgttagctttttaaaacattaggctcccatccctatggaggaacaactctccagtgcctggatcccctctgtctacaaatataagattttctgggcctaaaggatagatcaaagtcaaaaatagcaatgcctccctatccctcacacatccagacatcatgaattttacatggtactcttgttgagttctgtagagccttctgatgtctctaaagcactaccgattctttggagttgtc

SEQ ID NO: 9805 - DNA, 6000 bp, Homo sapiens
tgtaccatctgaaaccttctcatgtgtatatacagtactttgggaaactttgcataagaccatctgggtctactggttgaatggtaagagaagggagtaataaaaaaataagaaacaaaaatgatactgttataagcttataagccatgtgggtaataaattagaatggaaacatgagtttgtaaagacagataaatgaatttccttgacttcaagccactgttattgtcaagataaagttgtgcatgtagagaaggaagtctaacaaaatgacattccattctggggcttaaatgcttgcccttccttcttttttatgactcttgctttattgaatagcactggggtcataaggccccagtagatgtaaatgctatgctgtacatcttgtcaggaaggccagcctttgtgtctgcgggaggaatgcttgtccttgttgcaagaaggtaaaacagtcagaagcaaatgagatcagatttagattgccaagcctcgggtgggacccttggaggtcagaacacagacaaaaggaaacaggaaagcatgtttaagagtaagagaagggtagggctagcttcgtggtcatgtaaccatgtgaacttgtggttgcacaagttcccatgcctagaagggccctgaacttggtttaatgctctgctgtcactgtcttgaaattcttattaatttttaaatgaggaagcttgtatttttattttgtactgggccctgcaaattatgtagccagcccttggtgtggggtagacaaatgcttatagaagactttgtggtttaggttcatggggtagaactggaagagtgagaactagatagtaagttgcaaaaaaggaaaaagtttcagctactaactggtggtgtctcttctgattgaccttagttcatagattaaataatttaacattggactccaggattctttttgccttaaactcctaggctggctgactaacttccttccatggttatgaagtagtagagggaatggcaaattatatctggagaacatggataatgaaatgaatagatctctgagaacttgaaaaaattatgtagtaagtttgttcctgatgagttaaagtgtaaaaccaactcatagtggattaagtaggggcttgcatgtaaatatccacaaagggtggctataagacaacagagagtgatgggcagtagaggtgatggtgggcacccaaggaaacatagcatgtttaaaggaaaatctgtattgaatttcagcctgttattgccaagttatgttcagtctgttattgttccttgtagctcaaatccttccaggttttttagaagtagctggaaatctggatttttgactgtaatatttttcaattaaagaaaaacaactatgtagactatgtctgagttgaattcattttaatccttaagtggactttttaaaaacctcttttctaaagattaatataagaagtgaccattcaaattactgttttagggagggagtcatagcaatgtgaggccatctctagtaaggagatggaattagagtaagagttgccagtggatactgaggattatgatacagaaggagctctaaattttctatattggagggtcttgggggttaaaaacaggcttgtctttgaggacttatgctatggcttgaatgtgtccccaaatatcatgtattggaaacttaatacccaaatttatatgttgatggcatttggaagtgagtcctttgggagataattaggattagataaggtcatcagggtaggcctcccatgatgggactggtagctttataagaagaggaagacagacctacacactacttgccttctcaccatgagatgccctctgctctgttatgacatggcaagaaggccctcaccagatgctggtgctatgctctttgacttcccagcctccagaaccattatctaaataaatctttattgtttataaattacccagtctgtggtaattggttatagtgacagaaaacagactaagacaacttatttgtaattatgtttgcgtagcaaactcactgtttttacttagattatatgacgtagtcataagaaatagccaacctttctagtacattttttcccacaccttagataagattgaaaaaccagcaatttcccatctctaggagtgggtggggaactcttagagctgctggattgtaaggggaagtaaaaaaaaagttctcacaccccagaccagtcttttacccaccactcttatggtttatttttaaaacaaggtcatcattattatggatacatcaggctttcttagcctgatatcattaaacatgcaattcattttgtgatttcccctgagtgtgtgctaaccttctgaatatgatttggcttcccaactggattggtcagagggagggaatgggtaggtcctgcagtttagaatataggtgtttctatgactatttattgttaattataacttaataaattgacattctagcattaaacagcagtcttgtgactgtggtcagtgaacctgccagtgaaatttcgaatctctttggtcagctgacacactcagttttgaacttgggcagctcagaaccagatcctagactatagcaaactggtcaaagtaatgaatgaaattttgggagccccgttggaaagcctttccctaggtgacataaaaaatatatctcgaatgtatgcatttttcctatttgaatttctttagtgatagagttgagacatacggtttataaaagtcatggagtagggagggatagccccatggaagtgttaataggatttcagataattttgggaaatgctggtttaagtgaaggtaactgatttctttatgaggacttttccagaacatttattcttctaatgagtgatccagtaggaacaaatggtaagtggtgtttctcaacctcatttgctaatggtacttttaaaatgtttccttggcagcacttttggaaagcatcgtgaaatatttaccaagtgcagccttaagaatacaatgaaattgagatatttctggaattttcctggtgtctagtcagttttgggaaatttgtgctgaaccccagtttgcattgggtttcataagacctaccagagagttctggaatccacaggaatgaccatttgctcactaggtatctgtattagtgagagttcttcagagaaacagaaccaataggatgtagatacagatgtacatatagatatacgagctgaaatttattagcgggattggctcacacaattatgaaggccgagaagtcctacagtggacggcatgcaagctgaagaacccaggaagccagtggcttggcttagttcaagtccaaaggcctgagaaccaaggcctggtgtaactctcaatctatggtcaaagacctgacaacctggggatgctgctggcacaagtctccaaaggctggagaacctggagttcttatgtccatgggtagaagaagatggtattctatctccaggggagagagagagagagagagagaaggagagagagaaagaaggagagagagagagaaagagagagagagaggagagagagagagaaagagagagaaggagagagagagagaaagagaaagaacatatttgcctttctttctatctgggctgtcagctgattggatggtgcccacccactttgggtgacggaggatcttccttattgagtcgactgattcaaatgtcaaatctcttctggaaacactttcacagacatgtgcagaaataatactttgccagctctctgggtatcccttaatctagtcaagttgacacctaaaagtaatcattacaatacatgaacctggaattgtcccagtgtggacccaaggcagaaatggaatttagtaatctggggttgggaatttggatgtacatattgtgagtcatcttggaattgccagagtccaagactttttttttttatctatatatattttctcctgatagcttacttcttaaaagggaacttcccaggttgaatatgcaatgcttattaagacccattccagaacccggctgtgttctcacagataggactcaatgagcacaatggttaaatctttatctttacagggatttttttttttttcagaggattggagattagattatagagtaatatggttttatagacattcatgttactttctttgtttctagaataaggaaaaggaatgcagagctacatttcttaatatgaaatggtgattgccagtacagcccaactgtatattttcagtttgtaatgacaacattaggaggaaaattgattagtacttttaaaacagtaggaaaattatttctgcccaaacattgattagcctttgaatggactttcttataattcttttcttccacagactgcagggtgcagcacagtcatattttaggcagagtcaagcagagaaacctacttgccgctattaaacttattactgccttttccagtgggtgcaaataactttgtctccagtagttacactctcctggcttgataacacataaggacttctttgtttattttgattaaagagactaaagatacttttgtcttatgtgaaatgtgaatacagtgaaatattgaaattttttgatgacatatattcctccttttggcttataaatgtcaacttgtttagcttccttgcatgagtgctttaaaatttattagctgaagctcaggtaatattaatttgttcctggttaaatgttatataaaatataggaataaagaaaactgaggtccttaccctcaggtaacttatatatttgaggagttaagacatagaaataagataaataggagagtttatgatgagccccagatgagtgggttggaatattacataaccaatacagggtttcagaaggagagagattttgtgtgcgtgcatcctgaaatagttggggaggactcatgcaggagctggaacttggagataggaagaattcatgcaggtggaagagggtaggagggatgctggtgccattagcagagagggctagaccagaacatgcctgctttttcaacagtgagtagatctgtttggctctaatagaggactcatgatggggggtaatgaataatgggaaataaaactagagaggtaggttgaattcaaattgggaggggctttgaatgccaggcaagggaatttggactttattctgtagaaaatggatgaacagtgaaggttcttagccaggaataagaagaaaattgaagaaattgctttgtagtttagttagagcagaagcagcgtacagctctgaacccaagtgccttagatggaagataagggcaaaaagaactgtatgcaagctctgtcttcacttctgatgagatgcaggaagaagttagctgcttaattctctttatttttccttctctcatttaaggcttgtattaaatctctttttcagtcttaaaatgcattaattcaaatttgaccttccttactgtctgatagttgaatatccaaagctattttcagttgttccagattgtcacagattttgatgtctaggtgccaactggaagggccaaacctggcctgcggaggattgtttttaaaatctgattctaaattaagcactttgagacagaagaaatgagatgtggcctagttctaactcaccatttagctaaatgtatatgtatttttttctctgcctaaatatttgtcttattcttttagacccaaaaatctcagagccaagaatatttagattccctttcactctttcactttttccaatagtttttggcttttactattcttaataagttacacttataaaggaatgtctccaaatctaattcttttttttaaaaaaaattgttttaaattcctggccctcctcctatcctgtatctcacaaattattaaaatggaattgaatttatttcttgaaggagaagctactgataggatttagacttttaaatatc

SEQ ID NO: 9806 - DNA, 6000 bp, Homo sapiens
tttctttcccatttatagtccagtatcacactacaatttacttgaatattacagtagtcttccatccatttccctgccttatgcatttttttccagttcatcctacacacagccaccaaaatcatgtctaaatcatttttctagttatgtcctattaagaaactactagtggtctttctgctgcttacagggtaaagtagaaatttccttgcctaccttgatgactattctgcttttacacacttaatctcccagtacttcctagcttgtctctactagagccaaattttgtgtcattctcagccacaatatttatggcttttcagtcagtttacccaaaacttgttcatctttcaaactttatcttcctcttccagtgttcccatccacattgataatctcactcctaatttgggtgctttcactttgttgccaaggctggagtgcagtggcatgatcttggttcactgcagcctcaacctaccagggctcaggtggtcttcctacctcagcctcctgagtagctggaactacacatgtgtagcacctttttctatcttttttttttttttttttttatgtagagaaggagtttcaccatgttgcccaggctggtctcaagcctggtttcctgggctcaagcagtctgcctgcctcagccacccaaagtactgggattacaggcatgagccacccaacccatcctactctgtgtatttcaaaaatattttttctgcccctctttttgggaaataataattactgcttctaacagttatgtaacagagtgtacatatcatgccttacaaatctttgctgttaactgtagcatccaaagatgatagggtgagtactctgtaagtctggaagaacaggtcacatttattcagacttctcccccacaatttttaatcaagcacctcccagtaacaagttatttaattagatcgattttaagttgacaacagatgtatcagatgaggaaaaaattgagcatgtgtggtgtgattatataatagaattggtttctataaaccatttatagtattcaacttttatagtattactttttcagatgtatggatatatagactattatttactaattgaggctctgcgaagtgtagtgtattttacaaacataattaaatactatcatttaatatgcctgatactaacatatattaatatattttagcatggtttcaaaaattttaattaggaatttttgccttttattatatcagaaagtatattttgcagtcaggcctcaaataaatcattatgaatcttgtagttgttcctgaacttggagtgttaaattttgaatttgccattttttaaggttccagttttttgctgggcgtggtggcttacgcctgtaatcccaagactttgggagactgaggcatgcagattatctgaggtcaggaattcgagaccagcctggctaacatggtaaaatcccatccctacaaaaaatacaaaaaattagccggacatggtggtgggcacctgtaatcccagctactcgggaggctgaggcatgagaatcgctggaactcaggaggtgggggttgcagtgagatgagatagcaccattgcactccagcctgggagacagagcaagactgcgtctcaaaaaaaaaaaaaaaatctactttttgtgatacgtattttcatatataaaagttttaatttcataaatacttggtttttatagtagccttcttttgggttgagtgatttgggctcttaatttttattgccacaaatagcccacagctggtagttgcagactgtaggaattgtacactggtatgatcttacacaggtaattgggctactggaagtagaggacttgcgaaatacaaaggaagaaatgagagatgtacctgccaggagactcagtaaccaaaacaaaaacttccacttcatctaacaaattattcctttttgggataaagttaaagctgaaacgtaggtttgttggttgttctttattttcctcaaacataacttaattcagacttctcttaactttggaaaaacccaacatagataagttggatagattcttttttctattttgcatcattagattttttttgcttgaaacagctgtctttagcattaattcttagcatcttagattcttgccagattattttttactattatttgtcattttattctttaatgaagcagcccttcctgaaatcattcacatttagattatatgttgctggaaatactgaatgttctgtgtattgtgcttaagcatgcaattatagacagtaattaagtacagtgcatttgtttcaatagcttacagcaataagacagcttttgaaagtttatacataagatgtatacaaagatagactgccttcattttcttcagtacgtgagtagggaaaataaattcacaggaggaattgtcaaagaagttcagaatgaaagggaataaagggaagatggggaatgagaaacaatgaagaaaataatagaaaatttgggaaaagatatagaagaaagaaagcagagaaggattaaaacggcctttccaaaacgactctttgtcagtgcacttccattaatcacctcttcaaatgagatagtaataactctttttgcatttttcatttttgcctcacccttactggagaagagaagatgagaaagacagtcccaggagtgtctggtatctgcagccacagggggaaaggaaagagaatacaaattgtcattgtgtcagtagttcttatggctaccacattgggggcagctgtcattgattaatttgagaactccttctgcgatctgttgtccattgttcaggatacatatctttggctgttattttaacatttatttatgacacttgtttctacttactttgacatttggatactcactattagcaacatcttatctttttaattactgttttgtggcttataaaaagagactataggccggtgacgatggctcacgcctgtaatcccagcactttgggaggcctaggctggcggatcacttgaggtcaggagttcaagaccaccctagccaacgtggcgaaaccctgtctctactaaaaatacaaaaattagctgggcatggtggcaggcacctgtaataccagctacttgggaggctgaggcaggagagtcacttgaactcaggaggcagaggttgcagtgagccgagatcgcaccactgcactctagcctaggcaacagagtgagactccatctcaaaaaaaaaaaaaaaaaagaccgtataagaatgaaagtgaactggtacaaagtagttaccattgtggaaaaaacaactcaaatgcctcatagttgaagccaagaagcagacaggctttgcctctatcaacttatatttgaaaaacgtagtttctttaaatctccatttttgtcttttgaatactttattaggtcgctccagagaaagcttgaaagcaaggcctgtactccacttgaaaagattcataaaatagatttgtaaattattattcagcgcatgaatttctcaagtatatgattatactaaattaatattcatatgttgcaggaagttggtgaaccatctaaagaagagaaggctgtggccaagtatcttcgattcaactgtccaacaaagtccaccaatatgatgggtcaccgggttgattattttattggtaggattatatcagtaaaatcgtattagtgtacatatgttatgaagttaacctacatttgggatatgtagaagttttaaaagtgctttccaaatgtgattgttctggtgatggacatatggcagttgattattctgttcttttcttttatgattgaaaatgtctataataaaaagataacatgttttctaataacaattgttggaaatttttttaaataggatttattttcagtgttttaaaatactaccttttgtttagatagtatgcgtacttggaactaagagcactggctttttttccccaaacaatgtcattataagctgatgtcatttataacaccagagcttataagtaggggttgagtttgcctttctcatcaattaaaagtgaattgcagctgggtgtcgtggctcacacctatagtaccaacactttgggaagccaaggcaggagggttgcttgaggccaggagttcgagaccagcctatgcaacacaatgagaccccatctctacaaaaaaattagatgagtatgatggcatgcgcctctgaagtgagaggatggcttgagcccaggagttagaggctgcagttaactatgatcccaccactgtactccagcctgggtgacagagcaagaacctgtctcttagaagaaaaaaaaaactaaattgccagtgtagaggaaaagtcctttatcgtctctttctttactgtttttaatgatttgacattcattacaagttttaaaaagtagatgtgctaatctcttcagatataatatgtttagctgtttcttgtgacagcagtggattgttgacagagcttcttcctcagtgtattagagtaaaacttgatgagaatttttattacttgcagggagtggtgaacattttggtttatctacatatgcttgtgattaataagagtgatagttacatacagatattttaaatttttgaatatttccccattaatttaacttgctttagttggtctttctgaatgccattatttcccaacattacttttaaaagatacttaatatagttcacaagttgaggttttggggaactactaatcatgatcatgttagatttagttttctgttgagtttggttttcttttttgttgccagagtgttgaaattttactttataaaatattatttagatagacataaatccccatgtatgctaaatttaaaataatgaatttcttctttagcttcaaaagcagtggactgtcttttggattcaaagtgggcaaaggccaagaaaggagaggaagctttatttacaaccagggagtctgtggttgactactgcaacaggtactgtttatttcttagtgaagaataacataataattttaaattttcttcatagtcctgaagctccttacatcattaaatgtagtgatactacaacataactcaaatactgttttcacatgtaacctgatttctttggtacctctggaaatgtgtttggtattagactattatacttttaactgtatataatttttatttatgttctattttatatatttgtgagccctactgaagggtcagcaacaaaagtcatataccagtgcctacagtagaaaagaaagttttttcttttgtagagcaaattggttgaggagtctttttttcaaaacttttgcaggaattcctattagctgtgttaccgctacttttttagtgcctgcaccctgagccataagcctcataccctttcctatttggttcagtgtttgctaatgtagtatttcttctaaaatcaaggaagctgcaacatctaccttatctttttctgagaatttcaagatgaaatacagctaattcagtaatatacatatatttttcataatagatactttttctgttttgaaaaaacttttgatgttaagtggtttacctaaaagacaaaatcaccttccttttggaaggaagtatgctggtttttctttccatttcttttcttttttttcttggtttacttaatactaagcattttcttaatatatgttaactaaattttgttttcataacactaaagcttatcttttgggattttagattattttatgtgtactaatattttatttaatggcacctaaagtatcagccacataagaaccctcttaaaaaccactatttcacaacctggtttcttaagctgtcaagttaaagaattattgaatatttcttaaaattcttagttgccaaagactagaggttactaacagaccttttagaaacagtaggtttcggccaggcacagtggctcatgcccg

SEQ ID NO: 9807 - DNA, 6000 bp, Homo sapiens
tgttgcttgggttttatgttttatgttgtatttagcacaaaagccattttaaaaaagtgttataaggaaatatctgaaaacattcagtccatagaccctggtgatgaaacgtcccccaaacacaatggctcactcagaacatactcctatggaatagtttccacaaatcaaactcatacgaatatagggaggatacataagaatgcaaaatcaggccaagcctgctggctcatgcctattataatcccagcactttgggaggccaaggcaggtgaattgcttgagcgcaggagttcaagaccagcttgggcaacatagtgagaccttctctctactaataataagaaagattagctgggcatagtgactcatgcctgtagtcctagctactcaggaggctgaggtgggaggatcacttgagtcccggggttcaaggctacaatgagctgtgatcacgccactgaactgtagacagggtgacacagatcttgtctcaaaacaacaacaacggcaacaacaacaacaacgttctgaagcatcacattagccaggggtttctgaatacttactttgtaccaatgttactttaagttctgcatatatattactaggttggtataaaagtaatcgtggtttttgccgttatgtttaatactttgcaccaacctaatagctcacagaataaaaaaaaaagtctatgaggtaggtacagttttcatccttattttacaaatgagaaaaggaggccaagaatgataaagtaacttggtctcacagccagaaagtgatggagccaagatttgaacttgggcagttggactgtgttcttagtcactgtgcttcctgggtgattactgtgacccttgtacttgacactctgctatcaattacaagagccatttctgtgtgtgcacttgatttccttggggtctccagggaaatgtaattgtctcctcaagtccaggctttcctagaagacatggtgattgcactgataaccagcattagggctggctttgggaaagctcagtacctatgatttatggttagtatcttagattttagaacgctgagcaggaagtttttgtgctttctgaaatcctcacacctttaagtctcatgattggtgaggaggcagtggtccaagggaatggatagaaggagataataagataagccaaatgtttcaaagggagtgaaaactgttgaatgtaaatgcagctcaaggaagacttccctatctgaataaaaaggtgcaaataatgcggcctatttgtatgcatggtggcttaatgatgttgatggtgatgatgatagctttacactatcagagcgctcattctgggctaggcagttttctcagtggggtacagatattaatttatttacagtgagccagagaagtctgctgtagcttttaatgcgtctaaaatgggacacatgaaccccttaggaattttcagactgatcaggacagtttcctagaaacagttcgtgaaagggatgagatgggcccatggtatctaccccttcctagctgcgtgaacttgggcaactcaaccttcttgtgctgtttctctatggctagtgcgtgtaatttgttgttgttgttgttgtttgcttttgagacgttgtctcactcagttgcccaggctggagtgcagtggcacgatcttggcgcactgcaacctccttcaagttattctcctgcctcagcctcccaagcagctggggttacaggcatgcgccaccatgcccggctcatttttgtattttctgtagagatggagtttcaccatgttggtcaggctggtctcgaactcctgaccttaggtgatccgcccaccttggcctcccaaagttctgggattacaggtgtgagccaccactcccggcctagtatgtgtcattgacaattgttcctacctcaaaggctgttatgaggattaaatgagctaatgcatgtaaaatgcatctgcataatatataacacagctcgataaatgtgagttgctattgttgattattatggccacgtttgccgctgatgatgttcaaccactgaaaagcatcgttttctttcttctagtaactgtgtgtactgaatgcctcgcgtttgtccctactgcacttttcagtctgtcacaatcctgggtcgtcgggggactgtaccgagcgcccttggagtgctcgcagcagggaagaaggagcgagcagggaggagctgaggagggtcggagcggaatggacacccagagactgagatgagagaggggctataagaagagaaaccagtcgcaggaaaacagaactctcgacaaacgcacgccctctttgcgctctccgtttctctggacctggatggaattgttttactttgcatcgccggactgcgctgcggacggggtggggcggcccaatggcccccctggggttactctgctccccttcacgcttccctcccggccccgccccgcgattggccggcgcgccccggggctgccgccgattggtgctcgccggccggagccgcggggcttaaagagggggcgggggcgcgctgcccagcagcgctgctgtccccgccgtgcgcccttcgccgctgagctcgcagcctccggcgcccacctccacctccagtgtcccgcctcgggccgtcgccctccagcggctcgcgagcgtgggagacgtacctgggcaggcactgtccagcccaggcccaggcacagccgtgaggggcgaggcacggggacatcctggcggccaccatggtggccacgtgcctgcaggtggtgggcttcgtcacgagcttcgtgggctggatcggggtcatcgtgaccacctccaccaatgactgggtggtgacctgcggctacaccatccccacctgccgcaagctggatgagctgggctccaaggggctgtgggccgactgcgtcatggccacggggctgtaccactgcaagcccctggtggacatcctcatcctgccgggtaaggacccgagcttggcggcggctcccaaatccttatcctctgggtagagagcgggatattagacggcgtcacagagacattttgggggcttgaagacctttgggtacgtttttgacatccctagtcccaccttgttgtaaaagaattaggcagccccgaacttaacttctctaggccgcagtattcttatctggaatttgagataatagtggcaatgtggccggtggtaacactggccgggtccctttgagaatgaacaaaccggaacacctaataggaactgagtccgtgttaattactgcggtcccagcccgcatccttccaccgtccgcttcccgaagtgcttcccgctcccgcccggcctcccccggggcgccgagccttcgcgttaggttccgcccgcagaggtgagaaggagcgtgtaacacaagctgacaggagaatcgaaccggctcaggctgagtttctcggtcctcatgggatgggcgaagcgcccccggccaggttagagccctcctagctccgtccgcgcagccgctgagcaattcacgtccagggctctctgggctgcctggtttgggaaatgtcacgttgattcccgcacgtgcccagggccatctccgctgcccccgctacccccgcccctgctgtgggcgcgtcagactgcggggctgcggtgacgccggctcccgctccgcgccgctgggttggatagggacgagcgggcgctcctcggagggcggactccactggggagatacggagcgcgccgccgagggtcgctcgccgccacccctccagcgtgtctcagattgggaaggggaggtaaaaattgacagcctagcgccggccaggggccacattttcacatgtgtcctgtggaaacattttgggcgacagcctcaattcagatttaaaccaatgggttgggcaatggcgaggtcgcgggcacccccttggttttctgctggaatctctgctctacccccaaggcatgtccctacaaggtgggcttctgtcccccagccttcgtggattgtgctcacttaaaggattttcccggtttcctcaagatggggagaaacctgtccctgaagccgccagtcagataagactgtgctcgccccttaagcctcctccaagcacgccctatttccggtcctcgcagtcggaatctgaatccctcctttctccttgctgcctagtacttggctcttatcctcacaaaggcacattttatcttgttttttgttgattgttcgtgagtgaagttctcccactacgttttaaattccttgaagatagagatggcgtcctgttattctctttgcttcctcttctggacctggcatggcctctggcacacaatagctgcgggcagtgcttgcctggtttgccttacgctatcctttccttcattttgaactttcagaaggccagaggtcaacgaacgcagatctagactcagctttggctaatgctggtgttggcagacccgggccagcctccggcatccaggactcacaatctgggtgaggggggacaaattgctagcctcagtgaaccacggttgtcttcttttaaaagttaaaatcagatcaaccacccatctttcacgattatttgaggattaaatgagataagaaatgtaatctcctttgagatagtagatgcttcatgaatggtacctatagtattttattaaaagctgggcatggtatttgtagggatctttgaagcataaaattaactttgttttcttctcctgaaattaactttactgagcattcagtgccaagtggtttgttttcagagaacaaaggctgtcctccagaggggagtgcatactctgggggtggggggggggtggggggcggcgctagtccttcctgccttccccctccctcatactttgggtggaggcaggaacagtcctctgtccctatcttttggtgtccggacatggccttggcactgtagcatgtggacagccagtgccatggatttcagaacctgcattgccagttgactgcctgctttgtgtgagtactggctctctacaagccgcagaggcggacggctgggtcaggggatgggcctcagacttcctggagctcctttctggagatcttcaagtcagtagacacttgactgattatctttaattctgaaggagctgagatgggcagtgctggaagagggcccttgtgaagtccgaattctggcaaaacgttccttgctaagagacagcgttgaagttaggcctttttgcacgtgagggtcgtggtgtgtgaggcagatgtcggctagattcctggctttgctatgaactctgcctcacccaggccactagtactagttccttctgagcaaaaaagggagggtaataaatgtgaccccccccaccttttttaagaggagggagagttttaatgagaaacattacatttgaaagtgaaacaaatttgtctgtgaaattctcccagtatcttgtcagatttattctaaataaatgtgacacatattgtaatctgtttcttaatacagtttttacttggcattttacttgacaggataaagttcatgtagttttgctctactcttctatttttcagttctcttattccttgattcgcaattgtttccatgatctgttgtgggcactgtgttaactccgtgaataccaaggcaggtgtctgccctccaggaaccctgagggctggagagatgccttttaagcaatgatggacagttggggaaggatgcccagggcactgtgggtgaggcaggagatggggtccaacaatttaggggcaggatccatgaggacagcagcctctggggagacagcaaagagaggaagcctgagtcttagtttagtctgggttagggccacagccaatgtgaatgaaagcacatggttaggagaaaatcacctaggacacctgaagatgaaagcgctgcactgagacagacaaagaacaccaatgataacaactaacc

SEQ ID NO: 9808 - DNA, 6000 bp, Homo sapiens
gctctgagcttcccagcagcagggtcgaaaaaatgaaaattcagtggattacactgttatcatctaaaaggtagacagacacctaataattcttcaagaacagaaaatttttccttcatattaagttgtaaaacaaattctccatgtgaattccttacatgggagatatcattcaagataatggacaacacagaagcaatatgaatcttccttataataatttttaataaaagcaagaccacaacactcaatgatagttattcttctaaggggtattaggctaatgatatttagatagcatgtagctttctgatgatctcccttgacacaaggatagatttgagtgaacttataagaatgtttttccttagatgtttcttaaaaatcactttctcagataggcatttaatgggagctggacagagaaaaatggcagtattaataataatctgctgaggtctttgaatattgaaattcagttattgaccaaggctccatatactttggagtggaaatagggttaacattctgatatgaaagtggagaattctgaccagtattcccaactaggagacagattgttttccagattaattcacatcattttatacaaactacatctttatgtagaaaaatgtagctgctttttaaaaacaatgaatagagctcttgatcagctagcataactacctgaaggttcccctgatctgtttcagaaccccaaagatattccccaaccacctgaaggaaaatgacttggatgaacttccctttggaagttgggtcactaatagatatttttagaatttcctgaaaagattttgtattagtctgttttcacgctgatgataaaaacgtacctgagactgggcaatttacaaaagaaagaggtttaattggacttacagttccacatggctggggaaacctcgcaattatggtggaaggcaaggaagagcaagttatatcttacacggacggcagcaggcaaagagagagtgaggaagatgcaaaagtggaaacccctgataaaaccatcagatcttgtgagacctattcactaccatgagaacagtatggaggaactgcccccatgattcaattaccccccaccagatccctcccacaacacatggggattatgggattacaattcaagatgagatttgggtggggacacagagccaaaccatatcagatctgttcaagatttattataagcaaaataaagatgttgtattagttcctgtggttctgattcctggatctgcacagttgttgaaatttcccttgttgagagagtagcagggtctcaataacaaaataaaaccagctaccagtatcatttactgagtaacttctgtatgtaggtactgtgtgcaaatctttacatgtgttataatattactttaaccttcacacaataatataggctattataatccccattctaataatgagaaaactgaaactcaggtttacctgaatattcataactaataagtggcagaaataggatttgagcccagatctctttaccagcttttaaccactacacacttatctgtgaaggaaatttgagtctccacgtattagcatttgagatcactaaactctttctttttcctggtatttctgacaaaaattgcccatgggtcatgatactttggacttcgattctggcttaaatgagttgttttccttttttaaaaacacatttttttcctcaaaaaaaaaaaactccaaaacaagaatagcttatattttatagcagaattattgtaccttaatttctatatatagatttttatctaataatgagttttaaatatcttcttgcataatgagactagagtcattttccagttattactgaagtttgaggagattcatttggttcttaaaagagcttactcaccttgataatggctttgcagtcctccacacttagtatgcccatgtgctgcaattaaaaattacttataatgatgggacttggcttgatatctctagagttgcattgttgcataccatagccaccagctaaatgtgactattttggagttaaataaatttaaatcactttacattaaaaattcacttcctcaagaacactagccatctttcaaatctatggaatgctccataatcacagcaagttctcttgggctgtacttctctagagtgtacatttttcatgcctctatatcccttcctaccttctgcttctaaaatgataatgacttcctccaagactgacttctatatcttccataatttggtgagacagcttatctttccaatgatttcccatgatagttgacatggaggagtctttgttggcctagctgatgttcctgtggtacaggaagcatgctaactgaggccaagtttatcatcttactgaagtggcaagtccataaagcccccaagtttttattttccaggttatatattgagccaagaatcttaggtgactgttattagaagcatttatagaccctgttttgttgaattgcttcagagactactcccatccatagtggacttattagtaattttgttgctgtcaaaacttacagaaaaacttctacaacagctttagctttttttttttttttttttttttttgagagagggagtctcactctgtcaccaggctggagtgcagtggtgtgatctcagctcactgcaacctctgcctcccagattcaagcgattctcatgcctcagcttcccgagtagctgggattacagatgtgtgccaccatgcccagctaatttttgtatttttagtagagatggggtttcaccatgttggccaggcttgtctcaaactcctgacctcagattttatatgtatatgtgtatgtgtatatatatatatgtgtgtgtgtgtgtgtgtgtgtgtatacacacatatatacatatacatatatacagattttatatgtgtgtgtatatattatatatatatatacacacacacacaaattgatgtttcttggctattttattgacatagtccacaaaaagtttgcctctttccattagttagtctgtattgttttggaagaaaaaaatgttttccataaatctgattcttttaatgtatcctgattggctttggttgttgttaaatagagatgtatattcttcagctttccatttgttcgttttttgttttttttttttcttttttctttgagacggagtcttgctctgtcacccaggctggagtgcagtggcaagatctcggctcactgcaagctccgcctcccgggttcacgccattctcctgcctcagcctcccgagtagctggggctacaggcgcccaccatcacgcccggctaattttgtttttgtatttttagtagagacggggtttcaccatgttagccaggatggtctcgatccctgacctcgtgatccgcccaccttggcctcccaaagtgttgggattacaggcatgagccaccgtgccttgcatgttcgttcttaaataatgtggtacactgaggcctactgggcgtgtaccaatgccgtatttgccttgagcactcccatgttacatgtgtaaacttctttggtctatcttttttgtagtgatattccacaataagctcctttagagaagtttgttaactatgttgtttgccaacgatattctattgcttcaatatagacagtacactgaatatctttgctgtgtgtaaaattatcctgaaaagttttccttttccaaatgagctaagaagtgtgcaatacttactagtggtcaggtttagaccctccagaaccacttagaaacaggccaccactttccttctctcacagttgtataaataatctgattgagaaatagagcagatctctgttcagaatgttcttggtcactggacacctcataactgaggctttatattaaccacgatcgttctagtttcaaggattgaggccatttcccaagttcagaaaaatcatgatcagtatttgtcaagtattagtcattgtgaagtgtagtgatggggagtagggacaataaatatattcatctccaattttgtataactgaaaagtgtaaaaataaagaagaaagagatgcctcttgagtgaatttaatacagctgtttttgctgttaataataaaacatcttactgaaaccaaaatttgttcaaagtttcattaagtgcccttttggagctgtgtcttaatcgactgccagaagttgaataaaccaatgaggaaacactgtaccctacttaaaagtagcagtaaatttttcttccatatccacttttgatacatcatgaaggtcagcaagatgttactgctgtgcaaaacagctacattcgtgtaatattattttccatatgtctgttttcttagttactagattattgttcccatgcgttcttcccgacaattttgcttttacaagtcccgacaattttgcttttacaagtcgtggtgagcagggcatacatgtccactagtctgctagttttagaaatggttttcctgactttgatttgttttgatcgcatcaggcatattgctgaacagtaagaaaagggttgaagaaaagagttctaatgaataaaagatgggatttcttctatatgcatttttgttatccttgattccacagaaattctattttgattccttcattcaataacaataataatgtttttatgactatcacagcttgaaacacacacacacacacacacacacacgcacacacacacacacacacacacactcaagctgccagtctgtcttaaggcagtggcagatgcctgattggcgggctctgtttattctgtgaccagattccttctaaaagaaggaaggccatgtctgcctgaagcctattggctgggcctactctggacccgcccctcttttttttttcatgacacacaccacagcgaagtctgtgcggaatcctaaaccagcccaatttacatccattcatgaatctgtgacgtcagcaagcctttgggctcctttgcggtgggctggaggattgtgtgggtggaatccccctcccctttatttttccaattctgcaaggcttttaaaattcaccttacatcttttcaaagcaagaaaatggaacagcatgtgtaggaattcttcgttgttgtgagtattgcactctgtttttcctgtttcttcagtatttatttcacaaggacagacagagaatgtgtgatttgaggtgattagaaagctgatattattgagggcgacaccgtgagagagacagagagacagaggcggagagaaacccgaaaccccgttacagctaggagcctctgaaactgacagctggttttcctttgcttgtctgcctgctagacgtggacatttttcatttacggttctgcacgttacctcggatgcctgcttggctttccttaaagggagattcatttctctgagagatgatgtggatggtattagcagaaaagcccagaacaccagaaaggtgctgagaaaagcggggcccgcaagacagagcaggttctatcctgtggggcacttgtcttccttgcgaccgtcctttctgccgttcctcacccttcaccttgcctttgtttcatattgtgtaacagtcagtatcttgcgattgcaatttggtgaagatgaatacttgttcaaccatttttcaaaagctcttatgacgggagccatagtggtgtatttatatatattcatagctcttctttatgtcactctctacactttatagtgtcaaaaacttaaaaagctgcattcgagggaaagggggaattatccttaaacttgggtttttcaatatcctctaatgaaaactaagaagtggttacaatgttccacaattatattgcatagaaatgcacatgagtgttttcctaagatgaacttattagctgaaaatagtttattccactgtgttggggaaacatggaaaagttctgatatgttccatgtataaagttggttt

SEQ ID NO: 9809 - DNA, 6000 bp, Homo sapiens
tgaggtttctggagccagcaagtcacttcttgctgtacttggggctgtggggccagccatcctcccagtcttgtggctgtgatcctttcatgagacctgtttctagtttccagcccctgcattctagcactcttcttctctgcccccactctgctttatcagcccatctgtgcaggtctgcctcacagcaatcagcaggagccatccctgtgtgcttaaattagagatgctgttattctctctctctctcttttaataaagaaaaggaagtcatttcttatagttatggaggctgaggagtccaaggtcaatggactgtatctggtgagagctttcatgcaagtggggagtctgcagagttctatagtggcacagggcatcacacggcaagggggctgagcatgctgctattttctttctacttttaaacttgagttctacagacttagtagactagctgtgaacatatatatatatatatatatatatatatatatatatatatatatatatatatataaaatcatccataaggctggcagcactgaaagccaacatggtgggcacaggcaaaccacagttcttttaggccccgaacctatcctcatattagacaacatgtactgaagaggagacgtgatatgaagaggagagctgtgaggtttatttaaggaacttgatgaacatctgtagtgggtggggaagaaagatttgggaggaaattttcaactgcttattgtcttttttttttcccctcatgaaacatcacctccaattcaagagtgttatgaacatattatttgcaagtggattgttgtaaatgaaaattatgtgtattaatccgtaagatgtctgaaatgatgactgagcaatgcattacctaaaaatattatatattggctaaggttgaggtcaagggttgggggagggatggggaatgtgttagtctgtttgggctgctataacaaaaacaccataaatcgggtggcttgtaaacaacaggagtttattgcttatggttttagaggctggtaagtccaacattaaaataatggcagacttggtgttcagagaaggctcagtctcctggtcataagtggtaccttctagctgcagcctcacatgttggaaggggctagctagctctctggagtctcttttattttactttttaatatttatttatttatttacttatttttgagagagagtcttgctctgtttgcccaggctggagtgcagtggcgtgatcttggctcactgcaacctctgccttccgggttcaagcaattctcctgcctcagcctcccgagtacctgggactacaggtgactgccaccacgcccaactaattttttgtatttttagtagagatgaagtttcaccatgttgaccaggctagtctcgaactcccgacctcaggtgatctgcccgtctcaatctcccaaaatgctgggattacaggtgtgagccaccatgcctggtccgggtctcttttataagggcgctagttccatttgtgagggctctgccctcataacctaatcacctcctccagatgccccacctccaaataccatcatcttgggggttaggaattcattgtacgaattttggggggatacaacatgcagaccatagcaggaagctgtgggtggagggcccagaactgagatactgtccagagggaaagtgggtatctgtacttctcaaaaaaaccaaaaccaacctgtcaaggcagggaccccagagaaaatgggaggagaagcctcacatgtatagactgggaggacaggatcatctccaaagtaatgccccagcctctgcctctcacttataggtcagagggtcctaagtgataagagagaaccttggtggaggctgctccacaatggcccccatcctggaattttaccaggagcacccttgcttgcccactcatctgtctcagacgcccaggaaatttttgcacgtgtcatatcatctgtgcttatctcagtgttgagataaccttttcccttgttttctccttaatttggttttccagttctctgcaaaagagaactgcggagtggggactggacaacctctgaaagagcgccttctgcttttgtggagtgcagtggcgtgatctcggctcactgtaagctccgcctcctgggttcacaccattctccggcctcagcctcctgagtggctgggactacaggcgcccgtcatcgcgtgcccgcctaattttgtttttgtatttttagtagagatggagtttcaccatgttagccaggatggtcttgatctcctgacctgtgatccgcccgcctcggcctcccaaggtgctgggattacaggcgtgagccaccacgcccagccccggttaatttgttttgtgtttttagtagagacaaggttccactgtgctagccaagatggtcttggtctcctgacctcatgatccgcccgcctaggcctcccaaagtgctgggattacaggcgtgaaccaccgcaccaggctgttcttagttcttaagtaatgttgacatatgggtgatgatgaaggagatgattaaagctttcaaagaaagtggaagaatgtgtcaaattctctcttcacttcctagatgacttcagtttcctaatccataaaataggactaagaccattacttatctgatgaaaaggagagacaatgtaataaataaggtgctttgaatcctgtattagtccattgtcacactactgagaaaattataaattacctgagactgggtaatttataaacaaaagaggtttaattgactcacagttccatatggctggggaggcctcaggaaacttataatcatggtggaaggtgaaggggaagcagggcacatcttacatggcggcaggtgagagagagaatgcaggggaaatgccagacacttatcaaacaaccagatcccgtgagagctccctatcacaaaaacatcatgggggaaaccgccccccacgatccaatcacctcccaggaggtccctcccctgacacatgtggattacaattcaagatgagatttttgggtggggacacagagccaaaccatgtcagatctccaaatggtagctattatttagatgtccttttcttctgtcttgttacagtcactgacacagttcaggctcttattatatctccattgatgtcagcttccaatctagtctcttgcattctctgcttctgccatctattttccagtgtggtgccagaggaatccttgtaaaatacaaagatgcatgtcatgctactgcacagaatcttttaatagcctcctttttttttttccctttttcgaatagggcctaaaatcttcaatgtagcatccttccagaaatagtcttctgaacttggctgcttctattcattcacgcatacatacattttactgtcaggagcaccttctatatgccaaacactaagctacgtgtttcacgtaggtcatttcacaggatcctgaaaacaacgctttccttaatatctccattttgcagaagaggaaagggaggctcacaggatgtggaactcacccaagaaggcacagcgagttggtcataaagatttgaattcactctggctggcactcccttcaattggagctctttgtactgagcaaaaatgcctcaggggcagcagggaagggaatgacagtatcagcagaagggagccaggatcaggacagggaggaagcagtgtttggaagaagggtgctggggacagggtgcggatgtaacttccctttccaaggttggtgatgtggggtaggcacctcatttggagacagaactctgggcctgggcttcaggcactttaagtgtgcactggactttgtgttcccagaggacccccaaaccttccagtatctccttcctttcccctttcccacccagcacacagcctggtgcctagtgtgcactcagtagacaactgggatatgactattgcctctggtagtcacatcctctctttgggctatgggaggctggactggaggccttaaaggccccttccgccctcctgttgggcagtttttctttcttagggaaatcgccttggggctatcggggatggtcagtacgcagcttggttaatcctctttccttccccagcagccccaccgtcgtccgggtgaaaagaaagaacctcgctcccttcaccatccaggctgaggcttcagtctttcagcctgcagcttggggtggaagcctctgggtgcaggggttcgaggacgctcctctccttctgtatttgccatttgagagcgcccagtaggagtcatgcctcaatgttaggaggttaatgccaaacgcagtgaaagattttgttctttcctattctagataagagcaacacgagtcttcggagaggttaagcgacttcctcagggtctcgcagtcagccggtagcagagaccgggtgtacagcacccgcatgttaggaccaaaagccggacactgctggattgacccctcgcggccaagcggggaagaggcatttaggggtccttgcgcagccgcgtggcccctcccactcggccctcgatccaccctccttgagagcaggcaggattctagcatcacccagtgccttcatcaagagtctttaaccccaagcccgctcgctagcgacctccaggccggtttggggcgcggtgtggccggtggcgagaggtggagtgggggcggagaccgacccagtcttcgcaactctatttgcatacggaggcgactcgcttccttcccgcccctccgccgcgctcttcttccttccttctccagtcccttccactgtgcgtcttctgtcccccgttcttccccagcggacccctctttcgagactccctagtggggtccccagctcccgggcgatcctgcccttgccgagcgcgttttctggagtcacctgggggaggggagtcctgggcagggccgggctggggaagacgcctggggcactgcccggcgttaacaaagggagccgataccgaccggcgtgggcgcggagcgggcggccgccaccgagcgtgctgagcaaccgcagcctccgcggccgagagtgcagcgagtgagtagggggtgcggtgggcggcggcgcggcccgggctatcccgggaggagtgtgatgcaaaggggcgcgggaggatagcggaggcgcggggcccgcggcgcgcgtagggcgcagggaatctctctccagctccgcctcagctgccttggctccggggctggccgccttttggttgggggtgtgtgcatttttgtcagggccaaagggccaccctggcttctctctggctccgcgagcctgcggatccacaacaaacccacgtgcgcacagccccggggaacacggatttctccacggcaccgtcagtatggggtggggtggcgtgggggcattgcgccttgcagagtctgggtttacggatcgacaaattgaggcccgcggcagcggagggggcacaggcaccataacaaacgcacgtgcgccctgcccggagagctggacgcactgcatacccttaggggccgccctgcggtgccgggccattgtctcagcctcgggggagggagtggctctagaggcgccacttgctggaagagggcgagagagacatttaaaaggtaccgcttgggcatcagactaaactgccagacttaaaaagggaaaccaaaacaagaaagcagctacaaaaaggttactccaggctgagtcggtccccggccgtggcgcattcttttgggtgaagtggaccacccctcaccttcacctcctggaggtctcttagagatgtgggttgggttaagggtctaagggtgcccctcaaaaaaagagagtgctgggtgcactattgtccccgcactccggcgattgcctctgtggggatattttggtcgcctcctcagcctgcgggaagaatgtacgagtcgcccagtgcggtcttgctctttgcctctgaggcccgtg

SEQ ID NO: 9810 - DNA, 6000 bp, Homo sapiens
tttccagagcagttccccactccctttacttcacagatgcctcaccactgaattgtgggaggggaggacctgccaacacatccatttcgcagagaaagacactgatgaggccagggtgaccacagcaagggcgtggcaagaggtcagactccggagtccctcattcttcccactagtcacaccgcttcccaggaggcccacagacctggagccacagaggctgaacttccattccggaaccagtgcccacgcccacagcctcatatcgtgaaaaggagtcagtcctccagggaaggccagggaagctgtttctcagcttgaacttctaccagcgtggccaagactggggagaagggcaccttcccactggtggtcaaggacaagattagcatcccacacttcgatccaaggcaaagccgcacagcctctctttctcattgcctcaaattcctaactcatctcaaaccatctttgtgcttagcaagtctgtagcaggctccgtgtttatcagtggaagtcctgctctttcaaaccacccaagccaagagccagccccataagccaggtccaagccacattctggacgccgtaccttgctagacagataaggcacctcctgctcccacttcccctgcagattcctggttctgacgactcctagggcaaggagtttgcactgttagggggagaaatgaagacaacaaaaagggaagaaagctggacttctcattagcgttttggtaactaatttagtgcaaccttgggttggcgagaaaatggcttgctttgtggggggaaccctagacctctccactgtctgaatattccatgtgtttgtttccctagagggctagagaaccctggacacagagttcagcaagagagagtgaaattaaaagaggttgtgagtctttaaccttgagcctgaaatgaatgtgaatcaatcccagactcttggcttccttgaagccgggtaaacattcgagtatgtagaacccatctcagaccagggcctgtgcgttttctcagagccctctgacaacgggcatgggtctccctgttccctttgtgctgacgaaaccaaaacatctgaaaccccgctcaccaggtcccttcctctccttcccctcacccccacgcccaaatgcagcttatgccaaaaaaaaaaaaattcctacctttagggtaggcagggaggggagatggaagagccttttttttttttcccatagttttttccatttcagcctcggagagaaccgaagtggagacttgagatggccgtggcggggtgtcccaaaaagtctcgtccccacagtcttgtccagagcagttcattttttctgttgtctccatgccacggggagggcggaggggcctcatctcattgtgtgtcatcccctctgcgttgtcagtcacatgacagggtcctgccaccatccccctgccccacacatacactaggtgttccagtcagcatctgaattgcacttcaacctcagaacacactgagcaccaggctaggcagctacagccttgatgctattcccattctacaaacaagaaagctgaggcctgcagcgccttctttgttttcagttaatcaaggtgtaacggctcacttttcaggagatcagaatatgaaccatctctgcagagccacaaagagggactccagggggaaagagctcagagcagccacagtggccatgatggagcaccagcataaaggccgtgtctggctggctcttatttggcacttgttgcctcttatttaaagcacaattccagcaagtggggtaccctggagtcccagctcacagtatgcaaggtgaaaggacagaggtgcttttcagaaaacagaaaagtcagcactaactagtaagcgatgactgacagcaagggagaaaaaacaagacaatccatggggtcttacctaagaccaagaaggataattgacaaagcttatgttaaattcttctctgtgcactctaaattagaagtcagaggagcgtatgacatgctttagaaagaattccctctgcaacagtaaaacaaaccttcagcgatgacacttaaaatcatcaaccacagtcacctagaaactccacttccataaaagagggctttccccaccatggtttcacaaaggagctacccctgggttccgctgagagctcaagtcctgggacttcaggggcctccccacgaccgtctcgtccagtcccctgcctccccgcaggcctgtggtgcagggcagccactgctctgcaggtgggtgccacttggcctgcacacagcagccgactaaggctctgtcctggaggcgccaacgccgccttgttttctccacctctgactccactccgagttggggctgggacgagaggaggaggcacctttgtcccaagtcccatcagactcttgagatgacaggcactgctgcccctcccaggagtccagagaagggacacctctcttccaagtgagggtcccgtccctctgcaccctgtgaggcaggacagaggacaaccagagagctagtgtggcttgtccacagtcaaggcaccagatgtggcagagccaggatgcaagttgggtctttctgcctccaagtccagtgctctttccactagccttgaagactcaatgaccagcctcctcccattcttcagcggaggaaactgaggccccaggacgtgtggttcacaactgagacagaaaatgaaagaacttgctgttttgtgactcagttccacacaccccagaatcccactggggctgggtttggccatctgattccagcctcgttttttggttttgtgttttcaaagcacaaataaagaaataaacaaaatcccccaggaaataagagaccccaaagcaagctccaataactggccggccagggctttgagtctatactcgagtgtttacctcccaaatgcatgaaggaaagaaacgctgggtacaaacgacctccgttcacattgtccaggcttccaagtgtagccgtgtgtctgtctgtgtgtgccatgtggctcccggcctccccgtggcatgcagcccgcccccgaatgtcatctgtccgccagctcccatgtgctttctggctgcctctgctctgcacctcagaaagccctgggttggctttggtttgctttgctgcctttggtttgatgttcccgttctgtttggccctcatgtgtctctctcatcccaactcatccaaccgtctctcctttctgtgccttttctgtttgtgacacgtaacatgttccatgttgtatggtttcttaactgtgtgtggttttcctaagatgaatttttttaatagcctctcctctttcctacttgattcccacctggtcctcctccctgtctgcatggttgaacctctgctttaaagtgaacaaggctcagtctctcactaggtgtgggtgcccgcaggagtcgactgtgcttcctttaaccactgttccccatcatctctttgatggtgcttggtgattcctcctgtcctaacactagtttctaccaaaaccaaagagatttttaaaaaccagctcaaggatgcctataacctgagccccctttttcactctcccccatcctgtcaatgctaataacacccagcgactatggattccagccacctgctttgccctaacccttctcccacccgcccctcctgtgagccccccgagcctggctgtggtccctgggcagtgctcctgacccctgtgcttcccttgcagatccgcgtcgtgaaggcgttccgtagctctctctatgaaggtttagaaaagcctgaatctcgaacctccatccataacttcatggctcatcctgaattccggatcgaagattcccagccccacatccccctcattgatgacaccgacctggaagaagatgccgcgctcaagcagaactcgagcccgccgtcatccctcaacaagaacaacagcgccatcgacagtgggatcaacctgacgaccgacacaagcaaatcagctacctcttcaagtccagggagccccatccacagcctggagacgtcgctttagctgaggaccctctcgcctgcccgcccgccctcatggaccccgctgccacccgctttccgggcacccatccatccaggcacccaactcacccaagcagcaacgagcaacaatcggaaaccaaatactggagagaaaaccaacgtttccacccacagaccctttctctggctgcgatgctgtttgaactctttttcacttcaaggcaaggggcgggatctccactgggggcttacgggagtgagcggttttcccaaaacaagcccttcctggctcccacccagacatggaccagccatgcacccgcccagccaccacgtcccccgcatgaatgtactgtacactttcaatcctccccttgtttggtttttgggggttggggaggggtttttgtttgtttgtttgttttcttaggcgggaactgcaaacagactcttttctgagactatttatccaatccactggtctgtgagtttttgaaatgcttgcacagcatggtctcagttgtatagattaatttaataactttttgaaattgcagagcttaactcgcctagtagatttgcaccaatggaaccgaagaacttcatagacactcacaaggttatatccatttctttgtatctatatcaacgtatacttttccgagactgtatacgtccatatagataggtagatatatatatatatatataaatatatatacatggatatataaagtttctttgccggcatgttgccttgtttccgcttaaattgctctattttaacttatttatgtcctaaaagaagaatgtaatttgtttacaaacctgtagataacgtctttggctatttgtatggtttaagaacactggtggctgagatgctataaaaacagctcggcccaacagacacttcccctgggttgcatcctggatgttttatgatagccatgctctgatttttgcctgctatttccgttcaataatgtcactaccgtgagaggctcaggcagaagccaaatgctaccgagttgccatcctgaggggtttaacaacatgctccgtagacgaagggagaggaggagagaaggcttcctgggtttgcaacactaacggccatccggcccaaggatgccaggatctgcaaagcactgctcgaagacttttctctcaatgaaactcgcttgagtttactaagagcatttcaaaaataggttctctttggcactgtctgtacagagattgaggtagtgttgaaatattataaatggtattgtgttgatttttttttttatttagtaacttacaggtttgtttccttattaatggcagcatctgagctgttggcatattggatgaggatcagtatggcttgctgcttttatttttatttttgaagaagaatagcctttttctctgcactatttagatccgaatgaaccttatgatgtgtatattgagatgtactcagtgtgattttaaaccaaattgtcttcctgtagtcacaatatatactgtagccttttaacagcaagtcttgctttcccaaacagaaagccattctgaaaccctacagtatcacaggtgagaaaaggtggttattttttccccaagacaacagcactagtaatcccacttaataagagcttatttaattggatgtcagcctcttaactgctaagcactttgtgggtctcagcgtttttcataaaagaacttttgtatttaatacaaagtttgctttgagacttttcagcatatgatcttttttccataaacttgtacagtgcaaaagacattttgaataccatgatcgatgatgtcccatgcttcgaggaaaaccaaacactttccgcctctcttgcaaaatccattcctcatgctgaccctcctcacgatggctgtgtcagcccagccccttcccttctccaggcccagagaactcttcc

SEQ ID NO: 9811 - DNA, 6000 bp, Homo sapiens
gacactgggaagtgcttgtgcctgtccctttcctttggtgaaaccaggagttttcccttcctcgactgtcagggcaacctactcccgggagccccagtgggccgggggctgggggaggggccgccctgatacgccctctctgccctccagggaagatcgacatggtcaagtccaagtgggggctggccctggctgccgtggtcacagtgctcagctcgctgctcatgtctgtgggactctgcacactcttcggcctgacgcccaccctcaatggcgggtaggtccctagcaggctccactgggccacagggtgggctcaggccagagagccttgcacttctgggttcttggccttccctggactttgctgtgacctcacgtcttcacattgttgtttttgacatttaagaggtacattttcttcctcttctttgtctggcttgtattcatacttgtgtttgtatatagcatatctagctatagtgagtgtccatatgtacaaaagtgcatatttgtgggctgggtgtgtatataaggggtgtgtgttggtatgtttgtgtatacatgagtatgtattgcatgtgtgtagtcggatttgtgtgtctgtgtttatgtattctatatacacacaccacacacacactgcagcttgatggcttaagccactggaggtgtgagatagagaagagaacattttttttttcatgattagaacatttaaatgcctaatgaaataggtcattttagaggaagctctttggaagatatgagcacactgtaatttgtcgcctttttcactgatgtttactttccccttgccactcctctctgaaccttagtctggaagcccttccctcggcttgtcctcaggctttgatcttggctctggctaggcccgcctgcctgtctattaatggttattaatggattatggattggcctgtccaccactttggcccatcaggctggtcgtatgaaaagcgacgtcgtattttgtttctggtagtttcgttgctcttagatacctgctccctttcctgagcttgacactgttaaacaccaccctcccccataccgtctgccatacccttcacagggccctcccttccttcggctccaaagcagaggtcctgcaaggtataacttggctggcgttcctcgcacatagactttcttagggtttgctgcggggagtgtgggacagtgggctcagatagctggtagagctttgtgtaggaacagtcgttcttctccacacacagcttctcaacaaaggtgagtgggccttcaggatggtttcatctccttgcatttagctgtgatgggtccacccagagttactggtgtgggtcttggcagcagtcattgtctttagccagcagtcttctcctgggaagggccagcagaagtgtggtctagcagtggcgctgcacagctctccctgaggggcctcttccagccctcctgtgctggatggctagagacaggatggctgctggcccctctgcaaggctctggagcctgcctgaaagctgagtgctgtgtagatgcaggtcttgttgggtgaggtggacaagggagggtttctgcccagcacctgtgggagtcactcagcagcccccatgacaggctggaaaccccacagccttcctgagggccccagtctgttgggaaccaccacaacactgtcctcaccttctccttctctgtccccagcgagattttcccctaccttgtggtggttattgggttagagaatgtgttggtgctcaccaagtctgtggtctcaaccccggtagacctggaggtgaagctgcggatcgcccaaggtaacgcagtgggagagttgggcagagggctgcaggaggggctggaatggggcctgttcctcttgctgttaacgctctgtgagcaaacagagcccttgaaatgtcccttgctcttgcctccggcataatatgcagtgggccactgggccctggcagctcttgagtgtgtgccctggggagccatggggccattggactgtacttcgtcctggttcatgtgtcagtaagaaagtaaaccaggctgggtgccatggctcacacctgtaatcccagcactttgggaggctgaggcaggtggatcacttgagcccaggagttcaagaccagcctgggcaacatggtgaaaccccatgtctacaaaagatagaaaaattagcagggcatattggcatgcacctgtggtcccacctactcaagaggctgaggtgggaggattgcttgagcctgggaggtcaaagctgcagtgagccgtgatcacaccactgcacttcagtgtgggtggggcttgtgtttggtggtggctttctgtctggggagtttagcgcctagtattttctcttactgcctcactccagcacactaggcccaagccccgggggctggccatttcagagacgctgccttcacggctgccagaaaagctccctctggccctgctggtagaaactggggatctggggttctagggaaaatgagaaaagggagagcctggccttggaggcctggtcacttgagcctcttcttcctcgtcaccccatgtctgtgaggaatggggctgtaggcagccgtccattcatccagacctctgtgagcctctgtgataagccaggccctgtgctggatatggagttaggaagagatggggcgaaattgtccttacccagtaagagcacagagccttagacatgcgacagtgtgatagcgtgggatcagggctcactacaggaaggggcttgaggaagaacgcagccaggtcctctacccgccgagtgcttctgccatgtggttgatgggcacactgtcatgctggcccgtgcagaccagacaagaaccacatgcggaggttggatgtggttgttgtgggtggcacttggctttccttgtggattttctcatctccacactctgcttcttccctcttttgatgattatagctctcctctgcaccctccaggctgtgaacacccgttccccgtagcagctgtgtggtggtgatggccccttaaagtctgggcattagcaggaccctgagggttggggtgctttggtggaatggctccttcaaagggctggggggccttgccatgcctctgccactccgaggcccatgaggttgtgtgagtcatgtcgcagagtggccatgtgttgccctgtgccctgttgctgccctctgcaggcctaagcagcgagagctggtccatcatgaagaacatggccacggagctgggcatcatcctcatcggctacttcaccctagtgcccgccatccaggtaaggccccaaggcctgccacctggatgagcatggaagcaactgctgtgctccccagctgtgcagccatgggcagggtgctcccctcttcagcacaggcatccttgcttctgaggtgggacctctttgcctggcaagcagatcactacagcacccagatggcccctggcatgcctggctcagaagtgctcagcaaaccctggctgggttcccagattgagcacctagccaggcagactctgcccttgaccctgtcttcctacccctccctgcctgcttccctttcagccaagtggcaggaggaggctgcaagggcatggcaggagctggggactggctgtgcagtttgtcacacctgtttcccatttttgagggagaagcaccgtggggttcctagacccttcctccggtctcctcccttggccctggcctgtgccgcagtcgccagacgcatggccttgcctggcctgaccagtgggagggccaccacccattgcccagagtgaccctgctcttggcaaagtgccctcactcagctgtgggctgtgagcagaggtggaggtggccctgcactgagctggaaccccagactgatgccagccattccagaaggagttgcaggaaggggaggatgccatcttttctcgcccgtctttcccccagggctggcaggccagctgagggatgggggtgagcagagaacagatgggctgtgggctgcttctcctggaaaaacagtagtatctgcaggatagggtacagtcttgggacgttagagctgagacaaccactgtgccactatctgcactccatggtcttaccccagatcggagtagcactgtggtgatgtgctagaggtctcaacaccgacatctcagaaaattttgtctgctgacagagcttggggagcagagagctcaccctttttcagttttagagaattaatccctctctctctctcttcattgttccggggcagttgctggctgggaacctttctgagagcccctgaatcaggcctgggctctagctgggttggtgatgcatgagcagggcgggggctcagtggggaaggactttttggggagcaggctggtggggcttagaggtttccgggttggatcaggccttcagtcccctctagagggaccggaagattcagggaaggtacttccccttccctttcagccctttctgaagaaagtgtgagggtttcttctgccccctggtggagacggggtgagctgctgctggtatgtgagctgaggaccaaccagcatctctcatctctgctgtgccctgcctgctgctgccctgccggttatgaggtggctgcagtccgggtactgctcctcttgggctgggacagtgaggtcacggcacccccccatccccatgtgctctgattccaggagttctgtctctttgctgtcgtggggctggtgtctgacttcttccttcagatgctgtttttcaccactgtcctgtccattgacattcgccggatggaggtaggagtgggctgagccctgccctgcccgcctcctcagccctggctgtactgagggagtcctgggtgagaagggtgtagacctcgggcaggacagcggtcctgtgcgagcagcctctggatggtggactcaggccctgaccactgtgcccccaacagctagcagacctgaacaagcgactgccccctgaggcctgcctgccctcagccaagccagtgggacagccaacgcgctacgagcggcagctggctgtgaggccgtccacaccccacaccatcacgttgcagccgtcttccttccgaaacctgcggctccccaagaggctgcgtgttgtctacttcctggcccgcacccgcctggcacagcgcctcatcatggtacctgccacccctgccctgccctgccctcttctggagggccggtgctccaggccccttgtggtgctgcacttggccttagagtggcaaagggtattcctcaggccctggtggcccctggaagcctggctctggggagttgcccgttgtgtcctccctgcccagaccctagtggcttctgaggagataagcctgtgggagaagcagctccagggttctcaggtacaggagccatcctctccccagagtggcccaggacaggagcctgttagttgagtgctctgggatggacccacttgtggccaccacattgccctgggtcgggttcatcggccgctgcatggtgtgcagacactggaaagtgctgggcaaaatcattcaccagccgggctgggctggccttggggcagcagtgcctcttccagggagctgaactgagatgggaggaaggctgaggccccctgggactaggacctctgggggactctggagcaggtcaggttgctggccctctgaccgtaggaatggtagcagctttctggctccagctgaggtggagcttaggggtggggacattctgtgtcaaacctcagggtgcttcagtgtatttccaggccaagaaactcagcccctaactgtggaaaggcaagcaggcccctccagcagcaagtgttggcaggtgttagcaggaggacttggagaggcaggagaaaaggacgcagtggggcctgtgtcctctctccatccccaggcctgaggtccctgtgctgcttcctctcagcatgagggctg

SEQ ID NO: 9812 - DNA, 6000 bp, Homo sapiens
gttgccactgaagaccctgagcacccaccacacctgtaggttcctggcctgggctgctggggaatccttcctgggcccgtcactgcccagaactgactcgtggctctgcttcctgctctgctcacctggtcttctgagggactgtggatatattaatagctgtggcagcaggaccctcagatcagacagataagctcaggggctggccttctcaccagctcactcttccccaggcattgtcctgggctgccaggctcttcaggaaggtagacttggaaggcacacctcagaaaggcacactggccgagggccaggctccactgtcgtctctagggacccctgctgccttcctggggctcctgggttatggtaacctggccagcggttgcaggccccaaaggtacacacgcaggacattcctaaggagatgtccataagcagcagggcccaaacgtggctgaatatcagggtaacctgcagatcctgtcccaaaccaacacaaacatctggattcaggaggcccacggtggggcccccaaatctgtatttgaaacaaggaaccactctcctggagcacggagtgtcccctgaatgtgttatgaccgagaacttacggtgactatctagactgttagtgttccagaccataagactgctgtgatttatgaagcaattagcatatattctgtctggagcctcccctgggtggctcacacgtcacttgtgtcttcctagtgtttgcaacaactgtgacaatgtcactgagttgagccactgcaggcttaacactctggaagtttaatttgcccaagcttctattttctggctaagaaccagcattttcttagatggttcactttcccttcacctgtatttccctgtctgactagaggctttcagggactctttttcctgaataaatcaagtttctaccatgctttgagtgggtactgtgcatgtgacgtggcggaggacatgggcggctagctgtgcccactcacttgctcagcagctcgccccacaaccaggctgacagggcccctttgtaaatttatgccacagataaattcttccttattgggggcccctggggttgaacttaaatgattgaagccacaaatattaattctcagataccaaggccttctgatgtgtcataaagaattccctccaaagtgagagagggtctctgtcaatcttatggagcatgggaaggggaagaccacctgacagtagggcagggagaggggctgccaggtaagcttgaggggcccttgatgcagcctggcaccccctagcctgccctgtgcctacagcctcgtgtgcatcaccggggccagtggggaggaggtggccggcgccacagcggtggaggtgccgggaagaggacgtggtgtctcagaacacgactttgcctaccaggtacctgactgctgagccacccccagctgccagcgggccaacctctctggtggctcctctcaacccatctggttattccttggtggggctcccagtcctgggccagcctgtctctcaggctgtccctgcctccatgtgtctggtctgatgctcatctctctccctgtctgtcccacaggatccgaaggtccattccatcttcccggcccgcggccccagagctgggggcacccgtctcaccctgaatggctccaagctcctgactgggcggctggaggacatccgagtggtggttggagaccagccttgtcacttgtgagggccacttcctcatcctgcaaaaatccatctgctccaggggaaagatggaggggtctgagatcctggggagagcagaaaggggaagagggccagtctgctccttcagagagtggccagaccctccctagccagctgtggtgggagtgcacctccagggacacctggtggagactgcagtcagcgcttgagggaagccagttggggcctgagtggtccaagttttccctgcctgcgcccctgcattcattcccacctcccctcccaggctgccggagcagcagtcagaacaactgcggtgtgagaccagcccacgccccacgcctgccacgctccctgtggctgtgtggtttggggccacggagcggaggcttcaacgcggacagttcaagtataccttggaccccaacatcacctctgctggccccaccaagagcttcctcaggtgttgggccaggggtgtggctgcatggcaggtggcagggaggtctttgcagctccactatgtgggggtttgtagggctttatgttgaggcactgagaatcccatgctgctagtaggggcaaggggtcgtgtggtttggggctggggctgagctgacctagccgggactgggctgtgctttaggtccaggtaacataagccatcttacgttacgtaagctcacggtctgtttcagtggaggacgtgagatatgcgtccgtggccagaatctggacgtggtacagacgccaagaatccgggtgaccgtggtctcgagaatgctgcagcccagccaggggcttggacggaggcgtcgcgtggtcccggagacggcatgttcccttggaccctcctgcagtagccagcaagtaggacacccttgggtacccccacactctccccttgccccataccacaccctggggacagccagagcaggtgccagaggaggctcttcccatctttgcttggcccctcgtcaacctgcctgtcttccttccagtttgaggagccgtgccatgtcaactcctcccagctcatcacgtgccgcacacctgccctcccaggcctgcctgaggacccctgggtccgggtggaatttatccttgacaacctggtctttgactttgcaacactgaaccccacacctttctcctatgaggccgaccccaccctgcagccactcaaccctgaggaccccaccatgccattccggcacaagcctgggagtgtgttctccgtggaggtacagctcctacttggacctggcagggccccgagacccttcccttggctggacagcactgctgtgtgtggcggagaggccgagacagtagagcaagggccggtggatggacatggctcctcatccttgctgtggtgggggcagagggggctggtggggggtgcctagcctagcatctggcacgagctggactgcttggctggtggcccgggtcctgatgcactccatggcaggctctggaatgactgcatttgtatgttcggcctgtgcagtagctgggtggtgtggtccacataggccatcgggctgacccccgttggcagcctggctcacatggacatgcgctaggcatgtgtcttggacatacacagtgggcagcagatgggcatgcgggcagaccacaggttgatacagcatcatcacccccctggtgagtcatcagacacagattgggggctccagctttgttaggtagctgggcaggatttgggaggcagctttatgttctccagatttttcgttctggagaagaaagataggaaagggcaacaaagggtgatgaggagcagcttggaggacactgtgtgactggcctgcactcgggaagggtgctgagaggctgtcagctttgctgctgcggctgggtctcagggtccttcccacatttggggaggacaggatctgagggaagggtcctgagtgactgatcggtgaccctctgttccagggggagaacctggaccttgcaatgtccaaggaggaggtggtggctatgataggggatggcccctgtgtggtgaagacgctgacgcggcaccacctgtactgcgagccccccgtggagcagcccctgccacggcaccatgccctccgagaggcacctgactctttgcctgagttcacggtcagtgggcaggtccctggccgggctgggcattgacctgggccaaacccttgctcacaggtggctcctgacacaggtgcagatggggaacttgcgcttctccctgggtcacgtgcagtatgacggcgagagccctggggcttttcctgtggcagcccaggtgggcttgggggtgggcacctctcttctggctctgggtgtcatcatcattgtcctcatgtacaggtgggtgcagccagatgtggctgggctggggcaggtcgtgggatctggctggactgggaagggacagaccgggccaggagtcaggaaacattctctgtaaatggccagagagtaaatattttcgctttgcaggccaagtggtctctgttcaacaactcagctttgccactgtggcacaaaggcagccagggacgacatggaaacacatgaaagtggctgtgttctaacaaatctttataaaaataggttgtgggatggatttggcctggttgtggttggctgatctctaggctaaactgtgctgggctagacggggcatgggtgtgtgtgacttgcttgggacgggacaggctgaatcgtactgggctaggcttgagcttggctggcatggctgcattggactgtgctggatgaggccggggtgtgcctggggattgtcaggcaggcctgggcgagtaggactcatctggccatcctctcctgaccctggggctgagcaggaggaagagcaagcaggccctgagggactataagaaggttcagatccagctggagaatctggagagcagtgtgcgggaccgctgcaagaaggaattcacaggtgtggctgggagaatgggccccgccctccagaactctgcccaaacccactcccatcacacgggattggtgcttaacaggtgcttaacctggcctcttctgcttaacagacctcatgactgagatgaccgatctcaccagtgacctcctgggcagcggcatccccttcctcgactacaaggtgtatgcggagaggatcttcttccctgggcaccgcgagtcgcccttgcaccgggacctgggtgtgcctgagagcagacggcccactgtggagcaagggctggggcagctctctaacctgctcaacagcaagctcttcctcaccaaggtacccccagctgcatcttcctggcctgcccctggccctgccccttctccagggcatggtttctgagcccgcccctctgtccccctaaaccccttttcccatcccttctctttggctgcagttcatccacacgctggagagccagcgcaccttttcagctcgggaccgtgcctacgtggcatctctgctcaccgtggcactgcatgggaagcttgagtatttcactgacatcctccgcactctgctcagtgacctggttgcccagtatgtggccaagaaccccaagctgatgctgcgcaggtctgtgtggctgttggggctgggtgggccctggacagctggagctggggtggggcctcgggctggggggtctgcaggatagagaggcccgcagccccacctgctgaccctggcactcccctttcccatcatctcaggacagagactgtggtggagaagctgctcaccaactggatgtccatctgtctgtataccttcgtgagggtgagggggcagaggtggacagggctcctgtccagggagggtcaggccctccaaacttctaagccctcagccaccatgcagctcggacacttgtgccagagcagagactcctgctcagcctgtcctcagtccccttaagcccatgtcctgtccccttccccagtgtgcgtcatgtcccatacacctctgccacctgctggggggccctaactgcctgtgctctcctaggactccgtaggggagcctctgtacatgctctttcgagggattaagcaccaagtggataaggggccagtggacagtgtgacaggcaaggccaaatacaccttgaacgacaaccgcctgctcagagaggatgtggagtaccgtcccctggtgagggtgtgcaagtgtgtggcctgcagtctgagtgcggtgagggcgagggtggagagtgtgtgggtgtgtggggtctggacaccagcttctga

SEQ ID NO: 9813 - DNA, 6000 bp, Homo sapiens
gtggccagcaggtggctgtgtgttcacacagacctcactgcaggccccctgcagggtgggagggcactcatttatctgttgtgatccatgtggtggtgacccttggaatcagaaggccctgggatacttcactaaggattggccccacctgcctgatctaaggtgagagagtgtgacccaagatagttctggaatatctgtcttagctgtagcatcgccagctgatcctaagtggggtcatggcctgacccccatggacctcaaaggcccagctttaatggacagcagccagataggtgtccccacgcctttggcctactgccaggctcagcaacccaaactcatgtgcctcctctgaggcctgcctgcggacaccatgggagaatgagctcaggctgctgtttcagcaagcaaggctcggcccactagtattgcccctgctgtctgttgcccccatcttctcatcacctgcagcctgcccactgtggtcattctgcctgcacttctcaggggctgctataaggcagattctctactaggcttaggctttgactatcagtccaactcccagttaaagaggggagatttcagggacaggcttctgagtgtagggagctggtctgccagtctttcggaggtttgaacttgtcaaggctagggcaggatcaccatatccagcctggacttgcagttctgtggggtgcctccccatacccccataagatgccaaacatgaggccctgtcatcctccatggtccccctctactggctgttcaaggcccagggctctcccatgccagatagcatcctgtctcctaccaccactgtcccagcctgagggaactccctgtgctgggcctacccagctgaccccatcgctggaaacaatgggggtcaggcaacacttccccactctctcccgccgggctgtgctcacttccttcctgctggctgcctgaggaagtgtccctgccctgggacagtctggcctagcctttgtttccccgggggtccccacccatggagctttcaaggcttctggcccctgtgaagccagcacagtggtacagggacactgcaccttcccctaccatgtcttggactccttggtcctcagggccagactcctgggtattcacctacccctcacacagccttctgttgggggagaggctcctgggcattgggccattgggttgttgaggggttggctctgggtgatttgagggtaggtagatttgcacccctggagaggtctgctggaaccttgctgcagtcctccctagggccagccacaggaacacccctcccagaggagtatacccctttcctcatccatgttgtaaggagccccctactctgtatagtggactctgaaatccatccaggaatgaactccagcaggaaagcactctgcagaaccctcccagtccatcccctcctccccaacccacacagtcacactcactaacacattgtcctgtcacacaggatgcggaagctctcagtggaaaaaaacggactcagctactggaagtccccccgaccctccccccaaggctagttcccttcttgggcacctgctctgggggaccatcagctgaacgacccccaagtattttgactcccaaaagcaccaccacctgaccccatcctctcacaccctactggatttgaggatgggccccaatcctagggaaggagtgaagaggttccctagtgttggaagctgtgggtgtgggggagattggcacctgatcctgagcccatagccttcctgtcacctggcgcagctggcggggccagatcctactcgggaagggtggggagggcagccagccagcagggcattctggagggaaacagggtcaaggcgatctcctcccccacgcctgttcctggccctttcctctcagggggcagcaggaagtgaggagaaagggctgggatgggaggcgggagcggatgggagggaatggggtttatcaagtcctcggcgagctgcccaacgggcagcagctggcgcaagtagcctagctggagaggctcaccccaggaaggagggaggccaccgacctactgggccgacggactcccacacaggtgagcccagagcagacggctggtctgcacccccacagatgcgctcgcagttgcactccctccctctcctggcgcccgggagggttaggggctggtggtgcagacgcgggcccttttgggagttgagtctcgcacaagggagcggacctaggaagagccgaggtggtttcgcacggggctcgccagggtctaagcctgccccccaccgggagaggcctgtggagcgtagggggcgctggatacgggatggaggccctgggagacccctcttgctggctttctcggaggtccagccagaaactgctgcaaggaatggaggcctcctcggggttgagagggagccgggctcccaaaggacctcagagactgggcagaaaaggacgggatctcagggatgactgtcccgccctgatgcgagtcagggagaggggcggccaacctcctagacccctctgagcttccctgaccccaaccctgcggccacgccgcgacccagagccgggctgccaggataacgactgcctcggcccttcctgggccggctaagaagcggtgcttggccccttccctcagtctggcagggggcggggcctccctttagacggcggaccagagaagggggcccctgattcgtgggaggcggggcactactctccaggagaccagaggtcgcctcaggtcaaagtccctttttccacacaaaggggacccacggctggcgtctacgttagggggtgcagagccagatctggtgctgccccctgccaacctcggagtaccacagcacctcctgatggccgaacggggcaacgcctcctcctattcccccccccccccttcccgtccccctgccttgtccctcacactgtctctttaaagggctggcggcgccgcggagctgggaggactgaaccaccggcctcgggctgcaggggaaacatttcaggctgactggcgctcgtggctgagactcccatagaaagcccggctcagaggggcattagggtcctaaatgggcggccacgtccctctgcagaggacctggggctcttcgagcccgaaacgaggcaccggcaccgagaaaggtggaccacaccttcccgccccgtccgcaagtccaatcccgggcccacctccgcactggagtcttaaagggccagcgtgcctgggggcggagccagcagaggcgctgagccgggccgcgcctgggcgaacggccggagcgggctgggctgggcccgggatggcggtggccctggcgccggtcccggtggcgccccgcgcgaggtgagggcgggcggtgcaaacctggcggctctctccccttgggctggggtctgaatccccgggggtgctcgcggagaggcgtcccagaaaccccacccccacccgaccgggcgcaggccccacgtgtggggcgggggcggggtcccgcacaaagacccggcggagcgcgctctagccctgagcggccgggcgggggaggcgagcgcgcgcattcccggtggcggtggagggaagggccgggcggccggcgccgccgtgggaggtccgctgcccctttgtccctacggggcctcctccaagccgggagagtgtcagcgctcgagagaaagtccggagagcctcactcttctgccgggcgagtgttacacggatagaagcctcccggcagcgttccttccagtttcgtagcctcttgacgagctgttccctgctttacccaaatgctgtcgtttctctggatcaagggttcttcacggtgtacagggtgggcatcagctgttcagggttctctgaaaccatgtactggatggtatgcaggcatatatgtgactctggtgagcccaaattatctagttcttagaagggtcacagacctaatagagatttgtgccgagccacaggctacctgctccagaaaagagccctgtgcttctggcagtgagttcccagggtgccttgtctgccctgcagtggcctgtggtctctcaaacctattacagccatgagcacagtgcccccacacagcatgggctttgggagcatagatgggcttgaggtgggcacttccagtattccctagactgacttgttctccccaacccttcttccagttcctgagctggtgccaggcaggtgacacctcctgcagcccccagcatgcgggcaggcccaggccccaccgttacattggccctggtgctggcggtgtcatgggccatggagctcaagcccacagcaccacccatcttcactggccggccctttgtggtagcgtgggacgtgcccacacaggactgtggcccacgcctcaaggtgccactggacctgaatgcctttgatgtgcaggcctcacctaatgagggttttgtgaaccagaatattaccatcttctaccgcgaccgtctaggcctgtatccacgcttcgattctgccggaaggtctgtgcatggtggtgtgccacagaatgtcagcctttgggcacaccggaagatgctgcagaaacgtgtggagcactacattcggacacaggagtctgcggggctggcggtcatcgactgggaggactggcgacctgtgtgggtgcgcaactggcaggacaaagatgtgtatcgccggttatcacgccagctagtggccagtcgtcaccctgactggcctccagaccgcatagtcaaacaggcacaatatgagtttgagttcgcagcacagcagttcatgctggagacactgcgttatgtcaaggcagtgcggccccggcacctctggggcttctacctctttcctgactgctacaatcatgattatgtgcagaactgggagagctacacaggccgctgccctgatgttgaggtggcccgcaatgaccagctggcctggctgtgggctgagagcacggccctcttcccgtctgtctacctggacgagacacttgcttcctcccgccatggccgcaactttgtgagcttccgtgttcaggaggcccttcgtgtggctcgcacccaccatgccaaccatgcactcccagtctacgtcttcacacgacccacctacagccgcaggctcacggggcttagtgaggtatgtgtctccagggccctgccttttttctccttccttgaggatccactgcacatttgggttatcaggggccactataggactatacctgtagtttattggctgctccacatcccctcaaatcattctgtctataacctgaaagggtgacatcattatccccatttttcagatgagaacaattgaggcacagcgatgctgagaagtttgcccaaagcttcccagcaaatccagagcagagctgggactggggcccaggccttctaactttggaatccatcctgatagctgcacctaggctcaagtgtgcccttggcttgggaaactgagccccaaaagtggggtggaaatggacttaaatgtttaaaaaggaagcaaaacaaatgagcctctgcctggacgtgaaatgggggttgagctgggagttcagcaggttgaatcaggctggggtctgccctccttgtctgttcctgtcaccctgtggtctcagtcttccccagtgaccatcccttttcctgcatagatggacctcatctctaccattggcgagagtgcggccctgggcgcagctggtgtcatcctctggggtgacgcggggtacaccacaagcacggtaagcgagacccagcctgccagagctcagtctatgggacagacagagagttagggcctttggctaccaacctcaggtgggcaatcctagtctggtccccttgtctgtctcccacccgaggcatccctggtggcaacaggaggaggtcaccccggccctgctctcaggaaagaggaaatgctgtcctgaacagctgttg

SEQ ID NO: 9814 - DNA, 6000 bp, Homo sapiens
tcatttcatacatgtttaccagcttgtcctgtataatgactgaaccagtttactgggaggaattgtgttttgagaaaagaataggtttgtttcacgaatcccagctccaccatttgctaccatttattgagaccttgggcaaatttttccctgaggctatttcttcatctgtaaaatgtgttattaatagttcatctcccagggttgttgtttgttttaagatgtaagcaagatactgtttttaaaacatccagctctgtgcctggccacatggtaactgcttagtgactggctgcagtctttttatcagcagtatacatgtactcattcttctccatcctaataatattgacatttatcagccaggtgggttaagcctatgatcccatcagtttgggaggccaaggtggacgaatcacctgaggtcaggagtttgagaccagcttggccaatgtggtgaaaccctgtctctactaaaaatacaaaaaaaaaaaaaaaaaaattagccgggcatggttgttgggcacctgtaatcccagctgctcgggaagctgaggcaggataattgcttgaacccaggaggcatagataggttgcagtgagtcaagattgtgccattgcactccagtctgggcgacagagactccatctaaaaaaaaaaaaaaaaaaaagaatacctctcacacacacacgaaatattgacgtttatataattttttttctttcttttttttttttttttgagatgcagtctcactctgttgcccaggctggagtgcagtggcgtaatcttggctcaccgcaacctctgcctcctgggttcaagcgattctcctgcttcagcctcctgagtagctgggattacaggcatgcaccatcacgctcagctaattttgtatttttagtagagatggggtttctccatgttgatcaggctggtctcgaactcccaaccacaggtgatctgcccaccttggccttccaacgtgctgggattacaggcatgagccaccgcgcccagccccaagtataatttttctttacctttgttattttggtggtagcttatacttgtttgattttggattttttagagaaggactaaatctttcacctggtgatttaccttctgagtatgttttagtgcctttaagtctagaaatattaaagctaggtgtgggcgaaatgtcgcttagtagagagtgttagggaagatgttttaagtgaataaataagaatttaaagtaagaatttaaaataattattgattagtaagtctaagaattattgattagtgagtcttcctgacttaccagcatattatgaaaataattgaatctgaatattatcatggaaattctatttgtactgccaatttagccagcaaacctttgttcctttgtatgtgtgtgtgtgcacgtgcatgcatcagtgtgtgtgtgtgtgcgcgcgcgcgcgcgtgagtgtgtgtgtgcgcgcacgctttccccaaagtctttggattgatcgcacattacccataaagagaatatatattaattctgttttattggagtttaaaaaaaatcccgatcttgggctagaagccaccctggttaggctgtctcattgaggtcactgtgacatgtgtgatgagagcatctcaggctgactgcttgtgactatggacagggcaggtgacccataaggctgtcagtttccttactacctgtaaagtgggacagttacactagaattattctcaagattttaactattatttttattgaggtgatttgaacctttaattcagagggtgtaattgtcctgtcctacccactccgtgtccttattgagttgcccacctcttttgctacctagacacttgccccttgcacctgggtgtctgtttttcatctcacttgggaaagaacacccaacctctgaccattgttgcagatctttctctaatacaagaaaagcatttgtcctacatatagtttttattttttaaattgagacacagctttatttttgcaaaatgtggcctgtcggctctgctggtcacttttgatgtgcctgtgttgcttgcgtacatggagggtgcccacgtctccatctgccttcatccttcacaatttcatgtgtgatcacccagcttatccacatggccaaagacccggtgcatctcccaatttttaacatcaacactattgttaatgattgattacaacccatttagtcttctgggccaggagcttttagggcccaatcaatcagtgaatccataaacaaggggactgcctcagactccctgggagctctgaatcacactggggtgttgacagtcccagaggcctttctgtcagcaactgtctgggttggagaggatttgggtactgtgctaggtgttggcgagggcagaagaaaggcagtcacagatacagaaatagtttgtttgacagttgatctgcatatgggtaattgcagaactgagtcgttcattttttaccctctttactcccatttacaccaagctgtcttcttgtcaggaaagctggaagtcagaatagtgatacacacatacacacacacctacaccttcctcacctgtttttaaaaatgactccttcctgggaaccccaacatgaagcagataagagtgcagcagctctggttgaagagagtggggagaaggaccctggctgagccccgccccacccacaggtccttgcctctcatgcaggcattgctgttctgtgggtttccctctcagtccaagaacttatcctgagtgattgtccacctgccctggttgacgtggcattgttttagtaggtcctctgggatgatccctggatatgataagaacatttctggaagagccctgtaaaagcaattccttcccctccacaagggtgagtttgggactacccttaatacaccagagtgaagatcctggacttagagtacatgggtgggtggacttaaagggaccagggagacagagaagataaaaacagagataagctttaagaagataaggttatagcttgcactggcatcctgtcgtgggcaggagaggaaccaagaatgcctgataggctgtcaggaagatggactcctccacagggtctgtgacacaagccagaggaggaagagatggtgaacggctagggaaaggaagagatggtgagcggctagggaagaggtcactcattcagagaccaaaagggcaactgtgtgtgataacaggccctagagtatgagggcaccaacaaggctgacttgatgaaataccttatctccaggggtcacaccccctggaagcacactgagcttagacagaagtgatgacaagttgttttgggaagggaccgtggttgaaaccagtgcctccacctgcagcagtttactaggggctctttgccctcattctgccctgggctgattgaagcttcagccacctttgcagaaagctcttggcttctggtgagaacatcttgaaatgggcctaatatctgtggaaactgaaaaatgagaccaatggtgtggactatttccacagttctgatatgcctcttgcccctgtaggtacagaaatatttaattccaaataattgacttgagttgtaacgctgtgttctaatttggaaacgtgaagctgaccacttccagaaggtgcccccctcgccttcactcagaaaagccgggtgtgtctcttccacccgaacatcactgccctaggcacattgcactcattttcctagggcctggccctggactctgcacatcctgggagctctatgaagaagggcaggattaccctattgagtacagatattcctctcacacacattgagggctttgcattaaagtggtttatgtggggccagcgtttttgggtgcatatgaagcctaggggatttgtgacttggcagatttgtgtgtaagcacagctccccagcctcctgcctacttctgataggggtactggcagccttcagggactgaggctgtagaccctggagatgttccttgcactctagggaggcagtagcagggcaccttcaggactggctcctctgagggagtccctgtttttacctcatcactgatgagaatgacgtagcctttgttgagattgtcgtagcctttgttgagattgtcaaggtagagtggagataggtccctccagcactgagacagttttgtgcctgtgcaaacaaaatacttcaaaaaggatactgcccctgcctccatcctggtgtaaggtggcagaaggaagcagtggctgacagcggagttaaacacactttaaggtaggtcaaatttttgacataccgttttcctctgccgtaccagcagctgctctctactttgaaagggggcttagctgctcacataaactttggtttgtgataatgtaaactattattaggattatctttttattcataatatatgcctgattctctgtctactttatttatgctccgtttgaaacactcatttaccttcaatactcagagccagcatcaacccctctgaaaatgaagggaaactttataacagattatttaaatctctctgtggttaaaaaggactctgggaatgaaatcattgggttgaggaagcttcaaatctcagcaaagcttccaggttaaaactgggatgcgatgttgacaaaacattccagtttaaagtttttttttttaaatgaagctttatccccagggtggtggttttcataaagaaatgcttgattctcagttgagaatttttggccttcaaagtctcctcttccctcccaccaacctcccccccgccccgcccaacttttcatcaccacctggtggaaccatttgtcaatgaggacgttctggaagttagagaagttcctgaggctcaggttggcgacaccaacacagcggtcagccaggccctatctccctgccaggaggccggagtgggggaggtcagacggggcggttggagggggagggatgccacgcgcttctgcctcaggtgttcctgcgttgtttgtcagtggagagcaggttagtgggtgagccaagaaaaaccaataagtgtttcaatttttaataaaatgtctctcctaccctttgtttctccctccacttctccacaaaagaaagaacagagtgaatttttaagcacatctggacactgtttttgtaaaacttttaccctgaattcccagaaggaatgtattggctcccatttttccaagcaaaaactgaaatgattcctttgtttataagtactgtgcttgcatagtttaataaaacagtaaagaaaggaattgcactgatttgaaaacctttagctagtccgaagctttgccctttatgcctctcttgaagtctttgagaggtgctaaaagtttatggttggttatttttggtgtcagtgggaaagggagagttaggaaggctccgtgtgtccctttttgaattttttttttcctgtggctataagagcgtttaggcaatggggcaggggctgctcttggtccttgttcctctgttctgcttcctctaccatgcagtgccctctggtgaaaaccgtgcagatacaatcagataacagtgttccagatctgagagcccaaggcctgcggtggaagacaaaatccatcttttccttatcagatagtgtttgtttttttcttaggtgattcttctgtaagcctattgttgccaagaaaatgaagttgatctttcattaataccagtcttattaggatgttggcatggtgttctagtatggggagaattgcaaaagaaacttagagtgtcaagctttttttttcctcccagaaatgtttattataacaaatattaataacatttagcagtttgtgtatacagataatgtacaaaaaatagaccttcaaaaatttctaatctgaagtgacaaataattaatgtttaataatcactagttgttctgctcaggattatattcaattgtatatagtatttttaattcaaacaa

SEQ ID NO: 9815 - DNA, 6000 bp, Homo sapiens
ttagttgcttctctagactggtaagccccggactaatccatgtgggtttagctagtcactttactttttttcagagggagggaggaaaatgtaaagctcccgctccagcaacagaatctgaatcagtaaatttgcgtgtgcattctctctttctgcaaagcagtggctatggcttgaaaaaatagcaaacagattttattttctagtacctttctgtttttcctggtcagctccatgtgccagcatgttgttttgattctgatggggatacagcattgagcagtgaacaattaaacataaacaccagcctcacttccatcctcttctttcctctttaggtgaaggcagcttccaaatatgtggatgtacctgtgagtatttgaaaattgtttctcatggggtttttttgttttttttttttttcatttttactttttgttttcatgagaattttgatagtgctactcatattaattgctgctagctaaactgtgtgttgctgacttggatcatcagaaagaagccaagaatattttgtagtagaatttttttttcagataagaagacggtatggtttctttcatcaggaagaaaggtcctgtttgagggtaaacccacttcactttcactttcattttcattggtttctctgttgtttcattctgttttcatcatgttcaccaaccctcctgtgtgcacaccttcagaggaaagccatgaagctagaaacttgcacaagggtgatagtattttttgttaggttgatgaaaaacttaattgtggttttgcaattaaaaatgtggaaaacataatttctttgcaccaacctaataaaaaaaacaaataaattctaaatttgttcattttggggtcaattctgcaattgttttaaggaaacctcataaaactgcttataatttagtgcaggcctcattaatgaagagagctctcaaagttcacagataaagcactcgaagtttcccaaaatttacatttaaattgaggttaagtacaacacatgaatgctaaagtgtgggattacctgtgataaatcaggatacatttatggacagactttgccctgcctattagcaaaataaaattggagagattttaatatattccagtaaagtgaaaaagaaaatgattttgtttctccatttctaacaaaagaggtgtgagtctattataaaatattaaatttagagagcttatctcaacagccaccaagggtcttgtactaagcatttctcattctgaacgtggttaagtaccccccttgttcaaatacttatttgttaaaatttgtttttttctaaaaggatttgtattaacatttaaattcatttccccaggaagctaagtgtgtaatggtttactggcttatttctcaaaggaagacaaaatagaaaattggagtgaatttagcattagcatatattgtgtttgtttaatgaaagaatgtacaatcaataattatgctttgaatttatatgatacttcctatccacaaacctcagattccttcaggtagacagttcttataatggagaatagaaaaagctcacataactgcagcagggagagaacttaagtaatttactttctcaagcctccaaagtataaactttcccttcgtggggagctaactactcaaattttctggccctgtttctccatctttaaaatggagatgacgataatacctaagtcatgggtttgctgtgcaaattaaatgacacaacatacatagaacatccagcaccatacctggcacttattaggaatttcagtccaggagaaggacacacgtggtggtggtagtgtgatgtccacactctattgcatatagatggatgggggatgaatttgcagacatcagcgttgggctccactggtcttcaacagtgatagaaattgaaattctcggctttcgacccaaagatttggtagctgtggtctattctctgtaggatccagagcagagggggtatctcagccaggtttgaacaggtggcctgtagacaaggcccaaacacctagagaaacttgatccagccattggtactaacatcaggttatgttagattgaaccacatgaaattggcatattggtgaggtcaaagaagtcaaatatcagccatttcatatgattcgatctaataattcctgcaagctaggttcagatttattataaagatgggagggcagtaagtggactctatatcaaaatgcagggtgccctgatctgtactcattaagtgtttatggattaattatgctaaattagaagactcgttaggtgcattagtccattttcatgctactatgaagacataccagagactggataatttataaaggaaagaggtttaattcactcacagttcggcatgcctggggaggcctcaggaaacttacaatcatggcggaaggggaagcaaacacgtccttcttcacaagacagcagaggtaagaagaatgagtgaaaggaaaaaagcccccgtaaaaccatgacatctcctgagaactcactcagtatcacaagaacagcctggaggtaaccacccccatgattcaattacctcctactgggtccctcccatgatacttggggattgtgggagctataattcaagatgagatttgggtggggacacagccaaaccatatgtcattaggctatgaggaaacaaattgaattagtagagttttcacactctggagggcagaagaagttgatgcagcatgttccaaaatgtggtacatttaccactgattatacaaaatataataactactattactgctactacaaccaagcgttataaagtactcactagaacagtttacattttatcttcacaataacctcactttaaatatgaggaaactaaggcacagagaagttaatttgctcaggatcccacatcgggttagtagaagagctgagatttaagccaatgcccttacaaattctgccatactgcaagataattccagttagtgcataaacaaacaccttgatttggatagtggtaattattttagtgcatattagaaaaagtatttttttaccagctattaatgacttaggacaaagctaaatgttaagttgattaacatacgctttaatagctaataatattatagtaaaccttttagtaaataaataacaattttatagaaaacaatagtacataatacacgtatattctatatgtacattgtttatatatggtagataatagtaatcatttgcttctgaaatcaatcctaggaggggttaatattatcattctgttttatagctgaggaaactgaggcacaaagaggttaattagcatgcccaaggtcacctggtgaataagcagagtgtgactatcaggtgctgtcagttggaccataaagcctgcacttccaggggtgtggtagagtagctagcactggttcccaaggtcaattatgtgcatctctctccaactccgccttcaatgagagcacattggtagctcaaaattagccttgatgggagtatttacaccatgcaaattggtaaacactacaaatcagggtgttttgttttgttttgttgttggttttgaagagtcagtttatgccgggcgaagcagctcacgcctataataccagcactttgggaggccaaggtgggtggatcacctgagttcaggagttcaagaccagcctggccaacatagtgaaactccgcctctactaaaaatacaaaatattagccgggtgtggtggcgtgcacctgtaatcccagctacctcctccagagaggctgaggcaggagaatcacttgaacctgggaggcagagattgcagtgagccgagattgtgccattgtactccagcctgggcaacaagagcgaaactccatctcaaaaaaaaaaaaagagtcagtttaccagcataccactaactattacctattaagtcagcagtccccaaactagaatgtacagcagcaatacttggcaaaaaaaaaaaaaatttctggtttgtttttgttttttattaattaatatattcagcttttattattattttttaatgggcacataattgtttttgttttgttaatacagagtcccaggccctcacctccagagattctgattcagtcattctggggtggagcctggatattgctttccattaagttcttcacataattctgataagtagtacaagttgggaaaccaatggactaaatcagtgattcttgaccttggctacatattggaaactagggagcttttgcaagcattaatgcccaggtcacttgccagacaaaattgaaacagcatctttggggttcagggcccagacatcagtatttttaaagctccccaggtccttcagatttgcagccaggcttaagaaccatcagataaaatcatttctcaactcatttctatctctgaagcctctgagatcacctgtgtttccctgtgaggtttttgttagaacatttaatggtttagttccatgtgggcactagcagttagtcacctttgagatttgtctcttaactatccacactactggagggaagttctagtaccagtcacctaaaacattacatgatccccaaagcatatgtctttgttttagatgtagtttttgacccattggtatatgtaggagatttgcattcataagtagggctgacttaggatgctggaagtttgagctcatttttctcaagctcagaagtattccggtaggggcaagttcagattaaaatgttcttctttttctgagccacagggtagcttattcacaaattatgtcttccacacatggatgcagttaactatacagatatttgtttaagtgttttctaaaatctgtgtcatattcaatcagtctgtccaagccacatttaaaatacacaatgtcattatgagatattaaaaaacatctaaaagtttgtcccagtgtgtgcgggtagcacaatgatataaaagcataatttaatagtatcagctgtctggtcaagtatattttccagctataactaagggttagcttgtttgtgaacagtttttcttttaattgttttgattggaaatctacttgaaatgcattacacaaccttcttgcctttttaaacagggtactgactataatcttttctcaatgactcaggatcaccattgtgaccatgtctttccccagtggctgcatagtgacccactcccctccagggcctcccaagatataggggaggcttgcccctgccctcgatagtcccaaaccccagcggttggtgagtctgcatgtctggtgttgcagttgggcagcctcctccctcaccgtcaggcataaggaaaaatgatagctctctcttatctgcacagttttttcaaacaatccccctcttccctatttctgctccatcaagggatggaaaccaaacttgttggaattggttgggagtgggagcttgaggactccattatgagaaaactacacatgttttgtgctgaggctttatcatttttattttgacgttggctcctctgaggcccccttttcttcttggttctagagtagattctaaaggtaggtaaggctgtggaatggtataatattatgggggggggggggaatcatagtaattcatgtttgtattacaatatatggctttcaaaacatttttacatacattattctagctgatgaccataacagtccgtggaggtaagtaggggagctgttagtaatcccattttatagatagcataactaaggcccagagaagtttttttttaactcttcttttacagaaaagtttaagtgatattcacaaattccaatttgtgggagatccagtaaaaatccatgcagtgtgactgaagagcttgaaaaaggaggagatggagaaaggatttgctcattcattcttgaatttgtccattcagcaaatatttactgggcccctactatatgctaggtaccattttgtat

SEQ ID NO: 9816 - DNA, 6000 bp, Homo sapiens
ttcagtgaaccagtaaacatttcacattcacaaggcaaggacaagtgtcaaggttctagtttgtgttagaaagtggactctaaaggtttttggcccctgtcgatggtgctctgtggaggagggcagatcctgtgaagggtcacagctgagctgcaggcaacaaccattcttgctgtggaactgcagcagctgcagcttggcactgtctgggcattaaccaatattccaatagccagagattgcacaagaaaactacctccaccaaaggcaaatgttggaatgggggatggggagatctcaaaatctttctctttttatattctattcccagactcattagcctcctctcttaccttctccacccatccatctccttgacaagattattgcgacgaaggagttaatgagtacacagttttattttccttggaagagagatagaaaacaggctcaaagcagggctgtcatcaccctgcaagtcttcaggggtttcatagctaattattaaccctttgtcacattcctggacaagaaactttcctgctgaaacaacctgctaagattttccatctacattatacatatgggctctcagtttttcagagttaacaaatcaataacaccttgaaaacaatgagatgtaaacagtttataatgcccctttggtcctttatcaaaatgatccttctttactcactcagcacccaggtcaagtaccattatccttgttttctatttttcttttatatatatattttttttgagatggagttttgctcttgtcacccaggctggagtgcaatggtgcgatctcgactcactgcaacctccgcctcccgggttcaagcgattctcctgccttagcctcccaagtagctgggactataggtgtgtgccaccatacccggctaatttttgtatttttagtagagatgaggtttcaccatgttggccaggctggtcttgaactcctgatctcaggtgatccccccacctcggcctcccaaagtgctgggatcacaggcgtgagccaccgtgcccagccccttgttttctatttgagaaaactgaggctccaagacagaaaatgactggtcaaaggtttcacccataacaaggcctggctggaacccagctctcctgaatggtgacctggtgcttttttaatgtattgaacacagtgtaaaatctcacctaacattaagaaagcccctctgaatctcagcattctttaaaaccactaaagaccaccacctagaactatagcaaactggcacaaattcagtccccaggaagttgtgttaaaaaaaaaaattcctatggttaaccttctttcttgttattttgttatttgcttctctccccaatagatttcaggctatttagattttgggttcctctctcaagcatgattaacttaggatgattaactgctagggcttctggagtcaagagagacctgcagagattctcactggggtttgattccatgctatccctggggtagatgaaaatgaactggaaaatctaaaatccccggatgactcatttaaggaataagcatttagaaagatcaaagttgcagtgtgaggaaaataaggacctacagcacccaaatcaactgttgctctgtgctgaatggaccaagacttgcacttttatgagcagagacatagattcccttagacatttgctgttgttgttgttgagatctccttcatcttaggtggtggctgcagatgaattcccccctgagctggatatcactgctctccaagttcacactctcattgcaatcacaagcaggttgctagtatgtgggcaaacttccatacatggtatggggagcagacatgacttcatgctttgctgtagacgagaggaactgccaaggcttaggcgccctgtccccccaagtgtgccccggctttggaatccttttctctggctgcatggtaaccagaccacaagggatgctttagatttgtgggcactccctcaccttgcagattcttaaattctatcctccagaaaactaagattccaaaaaggcatctcacaagtacacccatacacatttgaaaaaacattttacaagaattacccacttttatagtactagaaatgagacaaacctgaaagataattttaggtcagcatctcaagtagttcaatcagttcaattcattttttgctgcatatgctgttttattgtggggtggggacagggaggatctgacagtttcatttcaggaaacggctgtgggtattctgcatcaaattactgttttgtgttctttgtgtaaaacttaaacactgactgagaggacttcataaatttagggtctttttaattccattcccactgcttattattattatatttaccaaaagggatagaacaaaaggacatatttcttctcgtccagatggaaggtgtatgtttatttggattacatatgaaacataaaagctggttaaagctctgggtgggatgggtcaggtgcagcatttttctgataatatttcttgggaattagatttgaattgatttacccacatatttgagcactgctttgggcatcactgctgagatcatgcaaaattaaacaagaaaaaaatgaggcgcaatgaattcagaaggggaagaaggaaaaaggggaggaagggataggaagatcacattttggctaaagaaaagaggtgatcttatggctgagggaaagtttaacacatttagtgcatctcaattaaagcaaacctcttagattgtgtcgaaaatggaataaaccctttaattttttttttttttttgccttttttccctaaggttcaacttctcctctttacctcccaccccaccccacttccataaaacacaactcagatttaatgttctggagcaaatgtttttcaacagacttgacctgcttaatcttcctgacaatgtgcgcagttatgttagtaatttgcatactcttgggaagggatatgagacactagcaaaccaaaacgcccagagggcagctatatgttacagtggtaatctttttctttttttctcaatgtgtgtatgtctgcttaatgttaccacgtactatcgtaacacactactactatggtctgatctttaagagcaaaagttagaagctttgttaactattatttctcctttaactctgtctcttacgaatacacaatggcttcttgaaaattatcttaaaaagactctgattaaaacaaaaacccaatgacaacaacaaagcaacccctttatcaaaggctgcagcatttctagaagtacccttcaactcactagctgggaaggagagtgcacttttttttttttttgagacggagtttcgctctgtcacccaggctggaattcagtgacaattcagtgacaagtctctgctcattgcagcctccgcctccggggttcaagcagctctcctgtcccagcctcccgtagctggtattacaggtgtgcaccaccacacctggctaatttttttatttttcatttttagtacagacggggttttaccatgttggccaggctggtctcgaattcctgacctcaggtgatccgcccgccttggcctgccaaactgctgggattacaggcgtgagccaccactcctggccgagggtgcacctttgagactaggtttctgcagcacacattcattttagtaatcaaggacatattgctggatttaggacgtgaagaacaagtcaggagcagatgctccaggctgctcgaggaggaaggggaccacgcctaatgaaataaccaaggatgtcccagtcaggaagaaatgtgttaagttttaaacctgtgtcttcgcttttggaaggaacctggaaaacggacgcgggtttgcttctaatctgcagtcctgcttgcagcctgaggaggacgtaaaaagccttggggccagacagccccaaaacgggggcgttttaccctcttaactttctctccccttcttgacgcagagggcgtatcttcacgcctcctttccccagcccgcgttcccgttctccaacaacaacctgcgtgtctcctttaagaggcgggggccgtccctccctttctcctcccagtctcccgcccttcacaccttgggtgggaaaagagtgtgggggcggggtagccggtgaagcgggaggggcgggatcacagcgagcgctccaatggccctcgaggctggccacggtggactccggcagccaatgagcagcaggcggggaggcgtggcggggcgctgttgcaaagcatccaacgtgggccagcaggcggccgcggagcgcggagcctagggggtgtgtgcgggcgagcggccgggggcggggcttgggggaccggccggggctgggccgcggggaggcgaacagcaagcggctgattgttcggctgcgaggtcggcgggactcttgctgcgcggaggagccgtgcggaacccgaggctgcgcgcgcgcgcgcgctctctggccgcggcgtggggacagcgaggcgcactggggcctcccagcgcggggccggccgcgccgtccagcccgaggtctacggctttgcgctccgagcccagaggaagatgcctgccggcaccgagctcgggctgcggggctgaacgcctgtcttccaggcgcagcggcagcactgccctcggccggtgtcggtagcggcactcggcgtgccccgggcggacgaagagcgcaggctgggtacaccttgcccgaatcggcggagttcgcagctagcgcgggcgggccggccggcccggatgggcgcggggtttgcggcccccgccgggtgctccggagcggcccgggcaccgggggcacgctgagtgccggagccgcggccgcagagagaacttggggcgggggccatgccccggtgcggagtctagagccgagcggagcgccccgcgggcccgcccgcgtctgcggccgttcgggtcctcacagtccccgcgcccggagttcgcagcgcgctccagacaagatggcgcggccggtccggggagggctcggggccccgcgccgctcgccttgccttctccttctctggctgcttttgcttcggctggagccggtgaccgccgcggccggcccgcgggcgccctgcgcggccgcctgcacttgcgctggggactcgctggactgcggtgggcgcgggctggctgcgttgcccggggacctgccctcctggacgcggagcctgtgagtgccgccctttccgccctctctgcgccccggggctctgtcacttggggatggagcggcgggggttcgtactcagggagggggtgcggactgggttgtgtgtgtggagttgtgcgtgcttgtgcgtgttggaagactgtcaggttggagtggcggaagggagattctgcgtggaggtccgggggagtaggcgtgcgagagagcctggagaagaagagcgtgcctcgtggggtctggagacgagcgagcgtgggtcgtagagatttgggggttagccagcacgcgtcgtgcgggccatctgggggtgagtgagtgggagtctggagctgagtgtgtttgcgggtgggtgggtgggaaacgtctggagaagagtgtgaagaagtctgtgggggtatgtgggtgcgtttccttttcctctcctgtaatccaactatttggtgtctgagctccttggtcttccagtgggtaatgaatgaaggtgactgttgggtccagtctttcgtttacattatttattagttgatagtgtgtgtagccgtctcctgatccccgaagaccgtggtggcctgacttgcctctctgtgcggggcagaaggcagtcttcccccgaggacccctgagttagagggctttgacagttcctggcgacctgtgagtgctgggagtttgtccttttacgcctgtttggcattttacggaactgtgttccagacccttcctgtgtgttccctggggccccattgggcttgatgatccagtggggtg

SEQ ID NO: 9817 - DNA, 6000 bp, Homo sapiens
ttattgcattttaacatagaaaataaaaccaccaagaaaatctttgcagagtctgtaatgccagtctgtttattgtgaatgggacgtcacctcttttgctgaatggaggtaagtatgaagtcggtgctggaaaaggaaatgaagaatcccactcttcaactccagtttgagtccctggctctgttggtccaaggctcccattaataatcgctgatgtacttggcattcccaatgcacagtaaaagaggaatagcatcttctgccaaaaaataacaaaatgaacactaatattctttttagtggacatctctgttttatcagatttaattcatcagctttcctttgcttatgttgggatttatgacattttacattgtcaccatcagaaaatgttgacaagcttacagaactatgctctgaaacattgatgaggatctgtgtaaaatgtcacagagccccaaactcattaagtatgaaacatggttttggagaaaaatacgccagtacatttaatttgaagaatctattgtctgagtaaagaggcttgtttcattttttaatgaagttgtaaggagtcacaattttttaatgggtcaaaatgaagaagtgccaactatctgaactagggtatttttttaaaccactaaaagactcaaaaatatgttcatattccatgtttgatttttaaccattatgactaaaggcagagtagaacattgcaaatgatacgagattttaggtctgatgcataactcttcccgtgtacagttatggctatgtaaatggaggcacatcccagaaccttatattacagttgcctgtgtgtagaataaaagggataataatgtcattcagcatagttcatcagatgatttgtgagcataacaagatgaggaatttattggaattttaaatagaaaatattactctctattcatataacatttgctttaatattttttttttatttaggcctggacttctcaacatcagtgaacctgccgcgcagccatggctggcagacacgtggcctaatactggcaacaaccacaatgactgctccatcagctgctgcacggcaggcaatggaaacagcgacagcaacctcactacctacagtcgcccaggttagggacacagagagagcctgatatgtataagctttttaaggaactagccagaagatcttttctttccctctccctacatgggaaagataaaatttgacccgtattttatccaatgctgactattgtttagcaaaatagcctgatttaagtattttctccatcccttaacctccatactttgctaaagtccaccaaaaaagttttgcccagagaattgggaagataaattctacaatcaatagcaagtaggaaaaataaaatcatgtgaaagtatttatttatttatttattatttattggagacagaatctcactctgatgctcaggctggagtgtagtggcatccacttcctgagttccagtgattctcatgcctcagcctcccgagtagctgggactacaggcctgcaccatcaggctcagctaatttttatatattttttttaagtagagatggggttttgccatgttgcccaggctggcctcgaactcctggcctcacgtgatccattcacctcggcttcccaaagtgctgggagtacaggcgtgagccactgtgcccagccataaaagtatttaactttttttatttttttgacaagagtctcactctgtaggccaggctggagctcagaggcgcaatctcagctcactgcaacctccgcctcctgggttcaagtgattctcctgcctcagcctcccaagtagctgggattgtagtcacacaacaccacacccagctaatttttatatttttagtagagatagggttttaccatgttggccaggctggtcaaatgtatttatgttgataagaatgtatgtgattacaatttcttttaccttttttgcttgtttgttgttttttgagatagaatctcgctcttcacctaggctggagtgcagtggcattaacacagctcactgcaacctccacctcctgggctcaactaatcctctcacctcagcctcccaagtagctgagatcacaggcacgcaccaccatgcctggctaatttaaaaaattttttttgtagagatgcaggtcttgctatgttgctcaggctggtctcaaattcctgggctcaggcagccctcctgcctcagcctcccaaagtgttgggattacaggggtgagctactgtgcctggcatataatttttaattgtaattaaataatctttaatcatatttaatcatttttgagattttgggagtaacacagatcaaaaggtaaataaattcatagttataatgaaccaaattctttaatagcaaaaataataataatctacaacagtaataacaaaaaaatttaaataaaaattaactgaaatttaaaatcagattttatggtatagtagcaaatcctgaggacacgatatatatatatatgtacatattaagtgtgtgtgtatatatatacacacatatatgtatgtatatacacctatatgtaagtatatatatacacatatacatatatgtatgtgtgtatacacacatacatatatgtatataagtgtatatatatacacacatacacacatatatatacacacacacacactgcaggtgtgcatgcatacatttattttctattgtttgttttttgagtcagatgtatgtgtgagtaaattatcttgctaaaatttcatgccaaaacataatagtaaaaaatcagatgtacagtctgcaagatttaaaggaataaaaattaccaaagatttcttaccaaacaacccctcccccccccaaaaaaaaacccaatattgccaatataggaaatattaaaattattgtatggaatctctatgatgatagaagtaaaataacctgtggaattacggaaaggcgagagagaagttggatttaagtaaagatgctatgcactataaagaacaaatcatagagcagtctgcatgtctgcccttaaagcgaatcctgagtgtccactggacgtggatgtgacgtatccatgtgaccaagtctctgtcctctagaggcccatattctgaatgtctagacagatagatactcatgtaatcataagtacaagaaaaactgggttgagacctataggagagaaaaaatggcgatacccatttaataggtagagctgtgttgtccaatatggtagccattggcaacagatggctatttacattgaatttaataaaatatagtttaaaactcagtccctcttttgcactagctacatttctagtgctcagtggccacgtgtgactggtggctgctgtatcagacaaagtggagtagaccatgtccaatatctccaaagttctgttggataacacaaatatagacagattggcgaaacaaaatgagaatgcaaaaaccacatgatctttatagtatttcttaaccactgttaaacaaaactagaaattagaaataagaatcacaaagtccagatgaatcaaatatttctgttccctgacggttcatggttgaaatgcagaatagttgaattcagtaggatagagaaattacacatttttcttaagattatattcacatttacatctttagtaacaaacatgttaatttataatttttaaacatatccagttaaaaaccaatgctacaggtgacttgttaatgttggtaccacttttggacaacatgcataaaataatgacatttttaccattgtaatttaactaatttttctatttaaaatctattttaatttaaaaatatgatttcagttcttcctaccattttaatattttcaactgcaggccatatatatatatatatatatatatatatatatatataaaatgaatgtatatattatgtatgtatattcagttatttaatgtccaaatatttcaatagagagaaaactggagtggaaatgagatattagatatttaagtattatttcaggcttatttgattcaattacccaggttactatgattccttttgttattattattattgtcattttatatttctttggttgtcattatgaaaccatgagaaaataattatatagcatgttttccggataatgattatccaacaggactacaacaagaactaatagaattctccttagtaccatttactatcattttacccctgttcccatatcttttaaatgtaggtattttataaaataccaaaatctcaagttctttgatctatgaatagttttttcctttggatttttcatttatgtgctttgtctgttgcttcagcagctaaccagtagcttcaaataattcagtaaccaaagactagaaaataaaaagttgacacataaagatatacatgtatatattattttagtggaattcctattaatgaggttattaaatgaaaattattttaaattggatgaattgtttacttcagcactatcagaaattcaaatttatttagtctctacaaattctgtgtaccctcttttattttttcaattattaattttctttagaaagcacatgtggatatttggccgtttttattgatcttatttaagcccacttgtactttacataacgattttctgatgactcgcaaagctacgtaaaaagaaatttaaaaggaataaccacgcagaatgattttttccttttcctctccattgcacatagctgattgtatagcaaattataacaaccaactggataacaaacaaacaaatctgatgctccctgagtcaactgtttatggtgatgtggaccttagtaacaaaatcaatgagatgaaaaccttcaatagcccaaatctgaaggatgggcgttttgtcaatccatcagggcagcctactccttacgccaccactcagctcatccagtcaaacctcagcaacaacatgaacaatggcagcggggactctggcgagaagcactggaaaccactgggacagcagaaacaagaagtggcaccagttcagtacaacatcgtggagcaaaacaagctgaacaaaggtgaagaggcttgcatgtattcccatctgtttctgtatgatactctcagcacctcgactagatgttgaaacttgtctgcgactagcaagtaaaatcttttcttctgtcgctgagattttcttatttctttggtttcaaaatttccagtgtcaaagagttaattagcacaacaataaccttggaaaatttattttataataatatataagtattttcaaatggttttgagattaatttaaatttaatagcaggtgagggattgggacggacaatcttttattcatgaggcagatgtacaactgtcacaatacctcgcattttcaataaatagactatcccattctttccactagaggatggaagataattgcttctatgtggttatataaaccaatggcatttttatatcaacctgaaataaaataattaaattaaacttgaactggagaagtggttcaatttgttgtatgtctcccacctcgtgtggttattaagactgctacagtgtataattttagaacctaaatttccttggttgacctgattgaagtctgtccgtatagaacctaaaataaattgagtttagtattaacttgaagccgcagaatagtattctgtggcctgaaggaaatgtttctgtattgtaatgtgtatgagttggaaaagataggtgtttggtttctttgtagtcctttaggctactgctataatatcatgatttgcaaagttatacctctaggaaaaccaggattgctctaatgtgaatagatgggggcaatgcatccccacctattccaggtaaagaatacactggagataattggagacatagacattttctttaggtttgggttgggaacattttctttgaaaatgcgatttatcacagttgaagatgacaa

SEQ ID NO: 9818 - DNA, 6000 bp, Homo sapiens
gtttctgctcaaaataaagaaaaagatacggtcttaggaaggttagctcttcttcaagaagaaagagacaaactcattacagaaatggacaggtctttattggaaaatcagagtctcagcagctcctgtgaaagtctaaaactagctctagagggtcttactgaagacaaggaaaagttagtgaaggaaattgaatctttgaaatcttctaagattgcagaaagtactgagtggcaagagaaacacaaggagctacaaaaagagtatgaaattcttctgcagtcctatgagaatgttagtaatgaagcagaaaggattcagcatgtggtggaagctgtgaggcaagagaaacaagaactgtatggcaagttaagaagcacagaggcaaacaagaaggagacagaaaagcagttgcaggaagctgagcaagaaatggaggaaatgaaagaaaagatgagaaagtttgctaaatctaaacagcagaaaatcctagagctggaagaagagaatgaccggcttagggcagaggtgcaccctgcaggagatacagctaaagagtgtatggaaacacttctttcttccaatgccagcatgaaggaagaacttgaaagggtcaaaatggagtatgaaaccctttctaagaagtttcagtctttaatgtctgagaaagactctctaagtgaagaggttcaagatttaaagcatcagatagaaggtaatgtatctaaacaagctaacctagaggccaccgagaaacatgataaccaaacgaatgtcactgaagagggaacacagtctataccaggtgagactgaagagcaagactctctgagtatgagcacaagacctacatgttcagaatcggttccatcagcgaagagtgccaaccctgctgtaagtaaggatttcagctcacatgatgaaattaataactacctacagcagattgatcagctcaaagaaagaattgctggattagaggaggagaagcagaaaaacaaggaatttagccagactttagaaaatgagaaaaataccttactgagtcagatatcaacaaaggatggtgaactaaaaatgcttcaggaggaagtaaccaaaatgaacctgttaaatcagcaaatccaagaagaactctccagagttaccaaactaaaggagacagcagaagaagagaaagatgatttggaagagaggcttatgaatcaattagcagaacttaatggaagcattgggaattactgtcaggatgttacagatgcccaaataaaaaatgagctattggaatctgaaatgaagaaccttaaaaagtgtgtgagtgaattggaagaagaaaagcagcagttagtcaaggaaaaaactaaggtggaatcagaaatacgaaaggaatatttggagaaaatacaaggtgctcagaaagaacccggaaataaaagccatgcaaaggaacttcaggaactgttaaaagaaaaacaacaagaagtaaagcagctacagaaggactgcatcaggtatcaagagaaaattagtgctctggagagaactgttaaagctctagaatttgttcaaactgaatctcaaaaagatttggaaataaccaaagaaaatctggctcaagcagttgaacaccgcaaaaaggcacaagcagaattagctagcttcaaagtcctgctagatgacactcaaagtgaagcagcaagggtcctagcagacaatctcaagttgaaaaaggaacttcagtcaaataaagaatcagttaaaagccagatgaaacaaaaggatgaagatcttgagcgaagactggaacaggcagaagagaagcacctgaaagagaagaagaatatgcaagagaaactggatgctttgcgcagagaaaaagtccacttggaagagacaattggagagattcaggttactttgaacaagaaagacaaggaagttcagcaacttcaggaaaacttggacagtactgtgacccagcttgcagcctttactaagagcatgtcttccctccaggatgatcgtgacagggtgatagatgaagctaagaaatgggagaggaagtttagtgatgcgattcaaagcaaagaagaagaaattagactcaaagaagataattgcagtgttctaaaggatcaacttagacagatgtccatccatatggaagaattaaagattaacatttccaggtaaatgagtagtgaatttttcctcctccagaggtaacttcaagcaaagaaagtctctaaactatttctgtttccttttagacaatgggactaattttggcataaatgtccatggaagatatattctctctcacttctgacttttttttggcaaacaacaatcctgctacaactgcatgaacatgaaaagttcgcatcttctcttcccatctttctattgagagatttctgtacttctgttttgttttgtttaagatggagtcttgctcttgtcacccaggctggaatgcaatggcacgattttggctcactgcaacctctgcctcctgggttcaagcaattctcctgcctcagcctcccgagtagctgggattacaggagcctaccaacacgcccagctaattttttgtatttttagtagagagggggtttcaccatgttggccaggctggtctcgaactcctgacctcaggtgatccacccacctcggcctcccaaagtgctgggattacaggcatgagccattgcacctggcctctgtatttcttttcatttccatttcaactactcttgcctggatttttaccacagtactctcaaattaattgtctagtctcgtcttttcttcttcctttagtccacattaattcatactgcatatacctcttagagttattttttctcaaatttcaattttctgtcactttttaatctatagaactaataatgtctctcatcctttgtattccttacttccaataggacccttctgttctaaaacagattttctcactgtctttcatatcaagattatcccttagagaagccaaacgttagcttgtctggagcaaagtagaataaaataggagaaaatgttacttttcagtgttgaaaaccatgtcactaaaataagtgacatattttggagtttatgacttaaatatatgaacccttaagtatgatatacctttaatacatagcactcagtagataaacatgtaggtgcagagaattaatacctcttcagtaaaatatttaacacctgttatgaatgttaattcatttgtaaatctattgagtacatgttatagtatttgttccttgggaaacacagtttttttcttgaaatctgtaactaatgaccttctctctgtttcaggcttgaacatgacaagcagatttgggagtccaaggcccagacagaggtccagcttcagcagaaggtctgtgatactctacagggggaaaacaaagaacttttgtcccagctagaagagacacgccacctataccacagttctcagaatgaattagctaagttggaatcagaacttaagagtctcaaagaccagttgactgatttaagtaactctttagaaaaatgtaaggaacaaaaaggaaacttggaagggatcataaggcagcaagaggctgatattcaaaattctaagttcagttatgaacaactggagactgatcttcaggcctccagagaactgaccagtaggctgcatgaagaaataaatatgaaagagcaaaagattataagcctgctttctggcaaggaagaggcaatccaagtagctattgctgaactgcgtcagcaacatgataaagaaattaaagagctggaaaacctgctgtcccaggaggaagaggagaatattgttttagaagaggagaacaaaaaggctgttgataaaaccaatcagcttatggaaacactgaaaaccatcaaaaaggaaaacattcagcaaaaggcacagttggattcctttgttaaatccatgtcttctctccaaaatgatcgagaccgcatagtgggtgactatcaacagctggaagagcgacatctctctataatcttggaaaaagaccaactcatccaagaggctgctgcagagaataataagcttaaagaagaaatacgaggcttgagaagtcatatggatgatctcaattctgagaatgccaagctagatgcagaactgatccaatatagagaagacctgaaccaagtgataacaataaaggacagccaacaaaagcagcttcttgaagttcaacttcagcaaaataaggagctggaaaataaatatgctaaattagaagaaaagctgaaggaatctgaggaagcaaatgaggatctgcggaggtcctttaatgccctacaagaagagaaacaagatttatctaaagagattgagagtttgaaagtatctatatcccagctaacaagacaagtaacagccttgcaagaagaaggtactttaggactctatcatgcccagttaaaagtaaaagaagaagaggtacacaggttaagtgctttgttttcctcctctcaaaagagaattgcagaactggaagaagaattggtttgtgttcaaaaggaagctgccaagaaggtaggtgaaattgaagataaactgaagaaagaattaaagcatcttcatcatgatgcagggataatgagaaatgaaactgaaacagcagaagagagagtggcagagctagcaagagatttggtggagatggaacagaaattactcatggtcaccaaagaaaataaaggtctcacagcacaaattcagtcttttggaaggtctatgagttccttgcaaaatagtagagatcatgccaatgaggaacttgatgaactgaaaaggaaatatgatgccagtctgaaggaattggcacagttgaaagaacagggactcttaaacagagagagagatgctcttctttctgaaaccgccttttcaatgaactccactgaggagaatagcttgtctcaccttgagaaacttaaccaacagctcctatccaaagatgagcaattgcttcacttgtcctcacaactagaagattcttataaccaagtgcagtccttttccaaggctatggccagtctgcagaatgagagagatcacctgtggaatgagctggagaaatttcgaaagtcagaggaagggaagcagaggtctgcagctcagccttccaccagcccagctgaagtacagagtttaaaaaaagctatgtcttcactccaaaatgacagagacagactagtgagtagctagttctttctttctgatctgtttaagagtttttgaacctttctttaaatttatttttatagaaaaggataaacacattcttatacatattatctgggaacgcagggaaagtattatgtatcccacaggttctgtttggtcttagagaagcacagaaacatgatttaaattgctaaacctgccaataccattagaaaaaaaatcagaaatttccttggcacaaaactctccattggttataaaaggactaagaggtggagaactgttttatatattttatatacacaaagacatgtgtaaatgtttccagaatttgtcatagcttaactgaaagaaagtaaaaggatcacttagtgccttcttacagtgaagtataaggatcatttagtgtcttgtttacaatttagcaatagattatctggtagaatttggagcagaaaggactcagttcatctcatgggtaactcaaccctaatttgtcaaaaataaaaaaaagtgacgtaaaaagagttcctttaaataagttgaaatgactttttagtaaagttttatttgcaggctgaaccatttacccacttccttttaatacccaacatttccaatgggagaaaaagctaaagaggcttcctaatgctgacatttgacagcttttagtaggagtcaggagtttaatccaggtctcccaagattcaggggcaaaactggaactgtatgagccaagccaggttgtc

SEQ ID NO: 9819 - DNA, 6000 bp, Homo sapiens
cagagctctcccagagggtttgccaaggctccctgggccttggctttgtggatgggccctgggagaaggaaagatcaggttggtataagaggtggggatgcctggtctgtggtaagaaggccccaagggaggctcctgtgaggctcctcagcatcttgacaggctgtggccttgctgctgagagctgcctcagccaggtacatcactgtcaccgagctcaccatggcggtcgtcgggcagtgtttgctgcctgaggttgcatcaagctgggaatgccctaaagtgggggcgtgaggaagagaaggggtgatacctagaggctggggtatctctgtcccaaggagacaaactataacaagacccagcgaggagagaggcccactctgggtggtgtggggcaggggcagggtctcctggcctgagggtagaggcctcaggccgatgagcttccctcaaagactctggctgctggtgactttggctgcagaaacacagaccttgacttttcccttctgagtgaaacagggcacaggcattatgcagagatgcagcatctttgctgcagagggagggaggagggaaggaagggagggagcaagcatttgtctgggtcctgccctagaaatgcttcaagtaataaaatcaggatgacttaagaaatccattacccctcttggcctcccacggccaccaacatgccctggtggagacgggggggggagaggcctggggaccagccaggtagcgtggcctcagtctcctggcctgtgaaccaggggatggggtaaggtccccatcagctctgacctcaggcgggtctggagtagagaaaatcttctggagaggggcagaggagggattgagaggagatgcaagaaggataggcgagaagaggaggagctagaggagaggagaggaaactgaaggaggctgaggagaggggaggtgaagaaagacatgagaaagagagcagaacacaggtgttcgagtctctgccttgccacggaaaagtctgtgacctgggtccggtcaggcacgctgagcctcggcttccacacctaaagaggagatggcagtgcccactgcactgttgtgaaggggtaaagggcagtttacaaaccatagtgccacacaaaatgatatgttgaattcacaagaaaaaagcaagaaaggaggtagggaaggtggagccagggcaacaggagagagccttttcggggcttcccttccctggggtgtggacacaggacagcgtgtgggaatggcaagtaaagaacccaagggtggaccagagagggaactaatcctcccttggcgaggctgtttgcaccccttccaggagacagaaaccaggggctccctgcatctctagctgaaggatctttgcctgtgcaagaacattcctcatgggggctgggcaggtcgaacgctactcgggctgccttcccagaggcccagggcaaggacagggcagtcttgggctttggggtctcacggaacgtcccaatttctgtcagacttaaactcttgaagggctgaggaggctggtgtgaggggtgcacggttataaaagaaagcccttgacagaatcctgcacaggaaggctagaaagacaaaaagagaaaaatatggctgaagaacattctggaaagccccaaaccaagacagtgctctcagtccatgtgggcccagccccacagtccctccttccactgctcgtgcctggatcttggcatgtgtgaggccaaggcggggaagcacggggccggggtcagggcagccagctcccctggcaggctagatttatgatttggctgagctggggagagagggagcctgcgacaatccagggtatgaaaggcagcccagtgtttcctagagcagccgtggtgccaaaggcagggacgtccatctggcctttttatgtagtacatttgtcacccagatcccggggcccagacggcctcccttctgccacccgtagccgccaaggccagttcccaccttcggcagcctctgttgtgggacctgcaaccccagtagatgctgagtgtgtgtgttggagaagagctgccccctcccttgggaccctcttaggcttcgccctccagctggcgcccatccaagttggtgtctactcagtgttccatggggatgaaaagccctggagtcagagaggggaaaggccctcagactagtgctgtgatctcaggctgtgttctgaggtgttcggagcacctccaagccatcttaagagctgctgaatgaggctgacagccaggctccagcccttgacccatcaacgtagctctgcttctgtctgatctggatatatacagatattttaggtaagatgtcacttgaataatgagaaatggaggctcagagtggtgagaatgggttctgctgctgaaaagtaaacagtttgaagaccacaaatctggtctcatttcaaagaggaagatacagtgggccagagaagaccagcagcccagccaattgttggcagaatagggacgagaacccaaacctcctggccccccagccatgatctccccatgatactgggctgtctcatgaggtgctggcctgagcatttatggccatcccttcttttcaaccccagggcctccctctcaagcttgggtgctgtgtcctctcagctttacctatgctggggggtgcttcaggatgtaaaccatgtgtggcccaggccagccgctttcaggtatgaatcaagacctctgtggctgacccatgattacagcttcttctgcccagagcctgtctctagtgtggcagggtgtggccaccctgtcatcccaggggctgttggtggttatcgagggttttctggtagagtgtaggccattcccttttcttaccttttggtctctggagaaacttgtcctgttctactcaggcctccatttgttcatttgggattctgatggttgttgctgacccagccaccctctgccatggtccctgggttctgttccagaaaaccccagactaacatttttcccaggcaagcagctctctccacccccaccacccgatgtcctgcttctcacagggtccctccagccctggccatggtcctggtttccagcttggcttgccctgggttacgttctgcctctttggctggactcacttttccaacctgacatgttgcccctctgcctcttctctctgggtttacaccccggcttccctcctgctaaacacccctctcagctccttccagctaggcccttcccctttaagcagctcacctggaggcctccttcccactgcaagagccactacctccgtttcccaggattcagtagaagaagaaataaaggatccagcatctctgagggccaggcatcgtgggtggcacagtacccatttcatccaatttgatttctcacaacagccctatgaagtagatattaatattcccacttgtcacacagggaaaccgagtctcagagatttagcagcttgctcaaggtcacacaattgatacatttacactcctggtcctgcctaacccctgagccaaggcagtcaaccacaatagtaagctgcctaggcggtcacctctcatggtcaagccaataacccttaggactagggtggcacagcctgtggtgatctgtctccaaagagctcctcccagtaccaaatccctcactgtttaccttgttctccatttctccctacagacccatcagcacacacccatcatggcagggaaacgtaggaaggagaagcaggggcctccccactttcacaggccaagaaagagtaatcacttttgtactcgttgagaaccactataattgtttgcaaagaaggaggtaaatatgaaagccatagatggggtcctggcctcctctgtggtagccaagatatgaaacagagaggtgttcagacctacaggtggctaatcttacaggagagggagagacgagaggctgtggaatatcctctactccccactatactctctgcagtcctggtttccctccaaatgaattgtgcaggcagcctggagttaccactcgctcttgttatctgtggggtgtcttggtgggcagcacagaggagggaaggttgaggaagtcgggctgtagtggtgccgggctgatggcacactccagaagggcttgctgtcctcccagcccaggacccgcaggaagcctggtgaagaggatatggctctgagatggggccaggtggggagaggcttctgaggcttatggagaatgggtgtggggacaggtgggcttgaggtgggggggccaatgaccaaaatgggagcatgaaaggacctgggctgggaaaaggaggggcgatgccgctgactatttcgtgaaatgcttcttccaaagttgttccccaagagtattcagcagggggagctgactgctgacagcagcagctgtgggggaggcaggagcgggaggggtggcattatcaccctcccagagcgggtggcaagggggcggggaggaagggatggtgtctcctgcctgttctggattctgtgtctctcaccgcccatccccctgtctccaaacccaggaggagagagggattgcatgaaattagagagggaccgatagatactctgggaagatgcacacactgcttctcaccctcctctcttgctcacatgcacacatacagtctctcacacactcttacacacactctttctcttcctcgctgtctcactctctaagccagggcattacaccactgctctctggtccagccaaagttggagtattcctgggacaaataatccaccccacgaggataaatcatcctaaaccatcctcaggcagctttgaggaaacacgggagagggagccagcccttgtggggtggccagggcttggccagctgggaggacagtctggcactggtgattggtgtgtcacagccgtgctgcgagctgcttccagtgcttttgtctggtgctgggagtgaggctcagcagtgtgagggacaattggagatgctcgggggcaggctgccgcgttgtgtcctgcttttctgcggccagaccaagccgtctggagctgctggtcaggttttcttgctgacctcacctgaccacagtggcctgggtggactctacagggaaatgttgttttctccctgggagcagtagcagcagtcctggctcccctggactgagaactcctcatcagccccaggaagcccggaccccctttcagggatctggaaccggtgtgcctgtggccccaggtctgctcccaggcgtgggctgaagtcctgacttctgtcgctgggggcaaggagtgggagagcccagctgctgcctgggctttggcagacagcaggctgatggtgctggcttccccgagactgcttctcctgcctgctgtctgatttccctgcatggtgcccgcagctgagctgctacgggtgagtacttggacacatgtccctttctgcgtttgctgggatgtacctaagcgagtcacagtggaccagctctgaagctgtattttcagagagactagacattagtttgcctcacctcatgccaactggatggggtgggagatctagggagcagggccaatagggggtgaggaggtggggcatcagggagctggggctgcaggtatttttctcaggagtcaggagaccctggaaggagaagtttctcctactgcttccctctcctggttgggtagagatgtgtctaaaagcatgtggagggatggtgtctccgaaatgccccacacccacaggtgctccaggctttcacttgtactcttgctgcataacccctgctaggtgaagggcacagaatgcagagtgagatctgccctttcctttccctggccatgtggcttatccctcctcccacgctgtcatcatcgtcctggagccattgaaaagtctctgtgatccttctgcttttgccctggagcccctgacccgtgggctgctgggcttcacaga

SEQ ID NO: 9820 - DNA, 6000 bp, Homo sapiens
tgcccaccattccatctcagagcaaatgcccaccccttggcccccacagtcccacgtgcgtgtgcacagtgcagacacttgagtgccatgggataatcctcatgctggcttccagtctccttgtctcaggcccagccatctgctctaggacggtggcctcaccatgtttctcccacacctggcaccgggatgctcaaaggccagcatggaaccacagggaggacagaatgaaaagcgagaccttctgccataggctgcccaaggcctctcactgggcgttggcctgtgtgtggaagagatgggaacggtgctccctgccactccaaggacatcaggggctgagcaggtgctgtgtcagggctgagtcctggggtggccacctatgctctcccactgagctggccaccctcccctgcccttctttcctcatacccgagaacccttcttggcctcaggaagacagtgtgctcctgggactggattcttactgcagagggactgccagccgccgggccctgtcctctggggcccttctgccttggggcttggtgacgggccttcttagaatagtgtcagggagctcttgagggcaggggcttgtctgtcctcagcagattgggaactctgaggacagaaacgggtattgcaccttagtctgagagccccttgaggatggcattgcaccccctcttccctcccatcaggacccagtttctggctgtgagatgcagaagctgcccagtcctcggcgcctaaagatctgggaaggaggctgtgggatgtggaggcctcaaggctgtagctggggatgcgggaaaaagagaaacttcccacctcccacggcgcagaatcacatccccttagtggcttccctccgcttccccttctccgcaggggtggggcggggatgggttttatagccaggggtcaggattccacaagcctgatagccagtggagcttgtgcccagcttgggctcgtgcccagcgtgggcatgagtaaggaggaggcggatgtgagtgtgggatgggccggcaattggggcgggctgggctggtgcctcttggtgggctcaagagtgaggccagacctcctgtatcctcttgggctgctgccttgtctgacccactcctgagcccggggccagggtggctccagtaactggtctgtcctctcactgcaaggtgcagggaagtctctcctgtctgtgaagtcagccctgatgctccttcccaggagggaaacagggaagtttctgtaccacgtgtccagattctgctatacaaaattcctcgctcctatcgggtggtatctctgtgtctgtatctcccctacttgagaaaggaccatctcattaattggcatgcttgccccctcccctgaaatggccacaggccttggattcttctggagccttatggcctctaaaagcttgatgagaagagagaccaagcctgctgctgatgggcccagcctggaagctgttatcctatgatctgggaggaggcgagtccttacagctgggcattctggctggggttgaggagggggattcgcagcgccccctgccaccagacatgagctgagctcactgcctctgccctgcagttgtgactcagtggctgtgtggtttaatggtaggtgccggggcattccagtcaggcggctctgcatttgaaacccagctccaccacctacctgtatataagagccttggagaagtgatggcaactgtctgaccctcagtgtctccatctagcacttggagctattgctatccactccacagggctgttgtgagaatttgtttactaatctgtataaaacaccctaacctaccaccctgcccatgggacttccgtgggcagcccgagaggaggtacgtctactaaatgactagctcctctggccactgtgcctaccctcagtttttcaagatcttgttcattttagcttctggctgctttaactgctcatccaaatctagactcagctttggtgccactttgccgagagaaaggggagaaagcctggcagcattaggagctgagcagaacccttcaagtgcccctctgcccaggaggaagctgacagtcccagtgcctgcacagttttttgcttcctagtaaagactgcattattatgagctaatgtctgtgctgtccctggagtggccaggggagaaacaccgggtaatgtgattattacaacagtgacaataacaacaacagcacaccaacatgcacacacatttacggagaaggccgtgagttgaggggctggctccaggccagggctgtggttagcacaccagggatggctgtggcgcttgaacacagtgagtttcaggcttttcatgctcaactctctctcccacagtcctcccccattgaataaaaagccaacaggacatatcaataaatcctttccactatagcatagcagtgggtttgatataatgtggtcttgtgcctgcctgggaggccagtgggggagctctcaaaaaggaaggcagtgggctccatctgtcctgtgcccccatgccctttactctttacttgcccactcagaactcctcccacccagtcattgcctaccacccacccttgggtgacaatgtgagccagggtacagggagcaattgccctgtgagaactccccatggctcaatctgatggtcatagtggaccacacccaggtactagatttaggactaggtgtcatgatgagataatgtctgtgctgctcagaaccggcacaagtgctaacagtatgacgtgattattgtactgtagtggctaaagaccacctgagtttgaatcctgggtttgtcattcatgtactgtacaaccttgaggcagttacctaacctgtctgggtctctgctttctcagtaggaagtggagataataaaagtaacctacttctcagtgctggtaaacatgcttataatagtgtgtagcacctggtaaaccctacgaagatttactcttttatagtcattctttcaacagaacaataagcacctggagtgattcccatccttggggtctgttatatgttaaactgtctcccaaaaaggatattgaaatcccaacccacagtacctatgacttatttgaaaatagggtctttgcaaatgacaatgttaagatgtcatcagggtgggccctaatccagtgtgactggtgtccttataaaaaggggaaatttggacacagagacagacatacgcagaggcaagatgacctgaagacagggagagaacaccatctacaagccaaggaacacctgaggctaccacaagccaggagagaggcagggaacagatttttccttctggggaaacagccctcagaaggaaccaactctgccaacgttttgattttggacttctggccttcagaactgtgagacaatagatttccgttgtttatgccactgagttggggaattttgctgcagtagccctagcagactagtgcaggatctgaagggggtatggtgtggccactgcccctcaccgctgccctgagctgcttgttaccccccagggacaaacagtgtcagaactgagcagaccggggtggcgaggctttggctggcctcaagcctctggcatctgtctcagatggtccaggctcttggccgtgtaggagaatggagatgcggccatctgtagggcctggggcacagatcactcacccctcacctcccaccctaccttcctgcctctcacctctttcttagcgcacttcctacctgctccaggcaggaggaaaaggagaaaggaggtaacaaatctctggagaggacaacccaaagcagggttttggcctgagcatctctacccgtcttctcgccatctcctggaggcttaactgtgatctctaagcgggaaatgatatgcctatctagggtgtatctgtgtgtctgtgcatgcatgtgagtgtggatagagaatgtccttcattaagctgctgtggcctcatgaccatgactcataaacttacaatcaagctctgctggacagaggagacctgtccccagggtgggtgatgccagcttctgatgtagcagccagtgccaaggccctccgcagcgcaccttggcagtctgccccgcctgctccctctaaagaacggtttgttcagtttcatttgaggaaacagatatgtcttgagcatctctgtatgtatagcccagggatacagtgatgaggatggtgcaggcttcacccacagggagctcatcatttgtgctgggtggaggggtgggggggtgtctacaacaactgcgcaaataatacaaggtagaataaaatgagcacgggggaagtgcaaggtgagagtcggagtgggaagagcgactcggaggaggaggggagctgagcagcagctggggagagctggatgggggagagcccagggaaggtttcatgaaggaggtcacttttgagaggggccgcgcagcaagagcctcgctggcagggggagcagtggaagcaaaggattggaagctggaatgtgccacgtatgtccgggtacacagagtcttccccggtgacccaagcacagggtcctccctggagcaggcaggagttgaggctggaatgtgacacatcatggttgccctcacatgctggggtgaggagtatctacagaaccgaagtgtaaaaggggatccactgaggtctgcaggcaggagtgcacggtcggttggacagggagcatttacaggattgaggaggctgatgcaagtctggcaacgtgggtatggggcctgaggtgggagtaggaaggaaacggtgaagggagagacatttctgttggaaaagtgacaggatttggcaagcgaggaagaggaggcgtggaagatgagccagagtgatggaatagtgctgccattcaaagagaagtgggtgggcggacggcacttccctggcctgtgggggcgcgtggaggggagggccttgagtgccacctgactgtgtgctcgtcagatgcatggagggcctggaatcatgatgaggggaggggatgcggtgctctctcgggcaccggctgcactatcagcgttccctggagaaacagaacccttaggatttatatagacatatagaaagatttactgtgggggattggctcatgccgttacggagactgagaagacccatgagctgttgtctgtaagctggaggaccagaaaagccagtgacgtggtttcagtccaagcctgaaggcctgaaacccaggagagacaatgttgtaagtcccagcctaagtcagaggcctgagaaccaggagcccgctttccaagggcaggggaagatggatgtctcagctcaagaagagagtgaattctcccctcctctacctttttgctctattcaagccttcagtggatttgataacgcccacctgaatttggtgagggcgattgctatggtttgagtttgtttccaccgaaactcacgttgaaatttgatctccgatgtggtggtgttggaaggtggggcctagtggaaggtgtgtgggtcatggggtcagatccctcaggaatgacttggtgctgttcttctggtagtgagtgagttctcactctgctgaggctggattcgttcctgggagagtgagttgttgtaaagccagggcgcccataggttttgttccttcacacgtatctgcttcccctttgatctttgccatgttgtgacacagcatgaaaagccttctgcagaagcagagcagatgctggtgctatgcttcttgaacttttcagcctgcagaagcatgagctaaatatacctcttttctttctaaattacccagtctcaggtattctgttatagcaacacaaaatgtactaaggcagcgattttctttactcagttggctgattccaatgctaatctcttctggatgtacccttgcagatacacccagatataatgttttacagctatgtgggcatcccttagcctagtcaagttcacatgta

SEQ ID NO: 9821 - DNA, 6000 bp, Homo sapiens
atttttatgtttcccttctttctttcagtttccagcacagaatagtacttctagggaatcaaaaaccatttgcatttattttgggatggcaaaggtctttatttgctgaggtactactttgtcttaacactttgaacaaaatcagtcttaagagtttttgactcaaaggcaggaaacctgagggaaaagaagaaagaagaaaaaataaataaaaattaaaaaaagtttttgaggctgggcatgtggctcacacctataatcccagcactttgggaggctgaaggggaggatcacttgagctcaggagtttgaggccagcctgggcaacatggcaggactttgtctctactaataattttaaaattagccaggcatgatggcacatgcttatagtcccagctacttgggaggctgaggtgggaggattgcttgagcctgggaggttgaggctgcagtgagctgtggttgtgccactgtactctagcctgggtgacagaacaagaccgtgtctcaaaaaacaaaaaagtttttgctggaattctcaactcattctctagaagtgtttgtcatttgatatatatccctaaggaaaatgccaacttttcactttttattaaagggaaggcaaagagaagaaagctttaaaaatacatttcagatagaatgctagttgatacccgattacagtggaagaacctgtacttacaaactgagcagtgcagaaattctgtgcaaaatgcagttggagctggctactctggaaccaggaacaagcagaaggacatgaggggggctgcctggggtagcatttcacaggtgccaggtgatcagcttctgttttgagtttgccatttctctggtcctgcccctggtcctgaggctggcaggaattacgtggaacagccccagagagaagggatatagctacagggatacatgagcctgtagagaccctaagtggagagggaaggagcagagaaggatgaatcctgacacatgggccgggatggtgtcaccagagacgggcacagaccaagacaggcaaattaaaggcgagaagcgcttcccactctgccgggcagcgggaggtggcgattggcttaaagtctcgggtgtttttaaaggaaagcagcgtggccgggaaggagttggaagggaggagagtgcttaagcgtgcatggttctggaagtgtacccaaagttggaaaacatacccaagaccttctctcagcagaaagtgcacttcacatgcattaatggcttcaccttcaggctgttaacgttagaggcctccctttttggggagttgttggtacactggaagcttaatgcccacaccatggatctgaccaggaatgtcagtccctccaggatctgctgacagaacattctgtcattgccacggcctattcaggagtctgtggcatttaaaatcaagtatattagaggcagcaataaaccctcattctgaacatcagtggtgttaccatctttcttacatccctctctttctggaaaaatggcacactatttctttttaacaactgcagccttcctttgggaagggatgtgtgcgtgtgtgtgtgtgtgtgtgtgtgtgtgtgtgtgttttcttactgatcaatttctcttagaatgtaatgccaagaagtttcttgcttcagaatagatagcctcttaggatacaaagggacctatatatcatgccttctttccctcagccctcatgtctggaaaatttagggttaaatttgtatgcccaaggctgtagctgttgaaattcaagttgctggcaggattttctgtctctctttttatcctcacaggaaattgcttcagtaattgacttttgggaaaaccgaggccaaagttttctttgtgtaggaacatttgtgtggtgtttatctcttttaatccctataatagttaatatcctccccacttgactgatgcagaaaccgagcagtgagttgaagagagcctgagttctccctagtccttggtgacagggtctggattcaaacccagctttcctgcttccaagcctctatcccatagatgcctctcagcctcccggaatccaagccaattatttgtttcctggttttaaagtgcccatctgttaatttcttataattcgtaaaaaagtagaagtagattttggataaaataagttgtaggtgggaacttggggggacaggtggcagaaaatgcagaagacctgtgaaaagatcatggcatcaggcagaggaaataggattgcaggctctgtccatttggggtctgttgtctgcccatgcaagggccaaggagggagctcccttcccccaactcccccctcttccctgcccctccctcactgtgatgtggcacccaaggagccctctggcgggacaagctgtgtctgtctgaccaaaggcagacactgcagcagcctggaattcattctggaagaaaaccttgaacattcctctgtttgagtcagactctgatggtttttttttttgtttttttaaattattattattatactttaattttagggtacatgggcacaatgtgcgggttagttacatatgtatacatgtgccatgctggtgcgctgcacccactaactcgtcatctagcattaggtatatctcccaatgctatccctcccccctccccccaccccatggttttaaaaaataggcttataccaataggcaactcaaactccatcaatcctgaggcgcctagaacagtacacgcaaagacaagtcaggggaagcaggctcagagctgccactctgactgcaagcagtaatgatcataatcatacttcatccgtgcaagcctgtactgctcataaaacactgctctccctcatgagcgcatcataggcttaattgatgctgtgagcattgttacttccattttatatttcaagaaaccgtggcccaggttgcactcctattcaagggacagagctggaacttgaactaaaatcttttgatcattggattcttcgtgatctagttagtgaaatatgccttgttgtcacggtgggaggaggagaggaagcatagaggattgagttccctgcaagttaaagaaggcttcagcttgctagttgtcagcttgagatgaaagactggttgctctgagatgtggctgccggcaagtcaggtgtagacccgctgggcaggagtgaggccacctttgctgttgtgcctctacacacacaaagaatctatccaaatttcaagtatgtgtagacagttctactgcaggataaatagggcatctcttggcactcctgaaaggttaataagcccaaggcagatagaatgatctggtatgagttgagccttaaagttggttctaagtgatttgtttttagaaattatgaaatgatttcaagatcattatcgtggcctgggtcttccagttattgccctgacttgagcctctctttgaactctatagggtgagacagaaaaggccacacctgccagacactagcttttctctttgttcttttcctctgaattaattccccttttctctgcctgttggctatcttattgtagctggtagacaaatctagtgctgtcttttctctttcttcttgttttcttttttcgatagagctaaaatttggaatctgtcttcctgtatttatatatgtagtttccaatgataatgagttgtgcctgtgatgtcccaaaacatcaaatatgccccccaaataaatactagtctggtaaatggcgagagaaatagaaacaaacacaggtgatgtggcataagcatgcatatttttgcccattggggtattttaaacaacgatctttgtttctctgccctcccttgccttgcacatctctctccccaacttggttcttccccactcaggcccacacccctcttttgttcatttcttccctgctttttgtttcaaacgcacattcccatcgtgactgggtctttctctggagttggtatgtggttggtgggctactctccacccagtttgtgttcatgaaattgtctggttcactgtccactgattactcaagggtctttgttgctgagaagacagaacactaccaaggagcctggttgttaaggagtttccttagaaatgctaagcccaggccaggcgtggtggctcacacctgtaatcccagcactttgggaggctgaggtaggtggatcacttgaggccaggagttggataccagcctggtcaacatagtgaaaccccgtctctactaaaaatgcaaaaattagccaggcatggtggtgggcacctgtaatcccagctactcaggaggctgaggcatgagaatcgcttgaacctggtaggcagaggttgcagtgagccaagatcgcaccactgcactccagcctgggcgacagagcaacactgtctcaaaaaaaataaaataaaataaaaaaagaagtgctaagccgaatgtttaggaaggagaacccaggcctccattctcagcaccgtattcccttcaggcactttacttccaagaaaaatcttctgtgaggcacacaatcactaaagaaaagtaagaggcaaactagctttgaaagcaaatcccatccctcagccctcagcaggttgcacaacctctaacacacgtggcctctctgttggtgcaggtgacaagaccaccttccagctacaggttcgccaggtggaggactatcctgtggacctgtactacctgatggacctctccctgtccatgaaggatgacttggacaatatccggagcctgggcaccaaactcgcggaggagatgaggaagctcaccagcaacttccggttgggatttgggtcttttgttgataaggacatctctcctttctcctacacggcaccgaggtaccagaccaatccgtgcattgggtaagtgaccagttgcccttctgttgggtacttaagggtgggagaatggagaagcaggaaaatttagctcaaagaaagaattaaggaaggcatggttaggaggggtggccaggcttaggcgtttaatttgattaatgataagcatacattctctcctttcctgacgtgtgaagaagtgagtgaactgtcacaaggttgtaaagataaaatgatcacaaccccttgattttcctgcctgccatgcacagcaccatttgctcacattaatagaattcagaaaatgtcctcagggagtgatggatccagattatcagggaggcagcaggcagggcaacttaaactttccccttgcttgtagtaactgaggtgctttgggagaaatgaattcaaaatttgtccctgttgtttttctataaataactataacttattttcacataattagattaaaatcctattttaaatgtaagaatttttttttcaacataaacacctgaactagaaaagatttgacatattattagaaaacaggtgtctctaactgctgccagattctataataacaaagtgtataatggctcaaacttgctggaagtttatttcctgctcctcaagtccaactgggtctcttcatccatggaacttctcctgcaagcagtgactcagggactcaggtgctttccatcttccaggctttaccatcttccacacatggctcctaaggtcatgctgcctagagggtcatgcataggaggataggcctttgccatgcccgctcccacatgctattagacggaacaggactgagccaggaggctgggaactagtgtagctgtaggcccaggaatcagaagaaataggattagtgagcaggtctctgccatgggacgtttgtatgcatgctggggtgggtggttgtatgaggggattgcattcttcagcccatgcaacacaacctctactaggttggtttcttttctttttagtctttcaggagtttctttaaatgtcaagattatgcaagtgactgcagtgagtggtaacttccaactcttgctttcctcatctccacatttaactttagtgagggt

SEQ ID NO: 9822 - DNA, 6000 bp, Homo sapiens
tttgcacggtttctagcgtgctttgtatttttagtccttttccacacatggcctctcccattggatggcacactccctcatcacagcactacagctcagccacatgccccgtgagagcatgatgaggcagccggctggggtctctgcctggcccggggcctggattatctctgtatgtggccaccatttgcatgtgaaaatcacgtctggctcacaagtctgtgacccaaacaatagtctctttcaccctgagcatacggtctagggatgtgaagggaaatttcccttgcttctctgagaatatgtgccacttttctgaaaaattaaaaataattggagttacgaagttgggttttttttttttttttggcaagagtaagcaataatgattaagaaaagtggttcatcaactgttaccctgctcttagtcctttcaaacttccttctttttttttttttttttttgagacagagtctcgctgtgtcacccaggctggagtgcagtggcgtgatcttggctcactgcaagctccgcctcccaggttcatgccatcctcctgtctcagcctcccgagtagctgggactacagctacttttttgtatttttagtagagacagggtttcaccgtgttagccaggatggtctcgatctcctgaccttgtgatccacccgcctcagccttccaaagtgctgggattacaggcgtgagccaccgcgcccggctcaaacttatttctaataagccatcagaaaattatgtcagatgtctacatcaattcctgcatcagaatctcacagtgtccttatcagacattctttaccaaacagcctcgccgaaattaatactttttgaaacactgagtatatttctgcttgtaagcagagaagaaagtaaggtggaataatttattaagatgagaaaaaagtcctgggtcaattcacattgctgtacatttcttgaatttaagatttgaaggtggtgcggtgagcaagggaagtaacacagtagcttccaccccgccacccacggtttcactttccatggtttccatttcccgtagtcaaccacagtccgaaaatactaaatggaaaataccagaaacaaacagttcatacgttttaaattgcccgccattctgagtagcatgatgaaatcttgcaccgtctcacccgggacatgaaccctgctttgtccagtgtggccacaccgtacacaccgcctgccatcagtcacttagtacctggcttggttatcaggtcaactgtcaagtagcagagggcttgagctcgaggccaataatagccaagtgctatgtcacgatgcctgcatcatccgcctcacttctcgtcacgtaggcgttttatcatcttacatcatcacaagaagaagggtgcatacagcatggtaagctattttgagagagagacgttcacataacttttattatagtatattgttagagttgttctattttattattaattattgtggttgatatcttcttgtgcctaatttataaattaaactttaccataggtatgcatatataggaaaaaacgtggtgtatatagggttaggtactatccttggtttcaggcatcccctgggggtcatgggatgtacccctaatggataagggaggggggatactgtaatagctaatgtttattgagcattctgtttgtgccaggtgctatactaagcattatacatctcactatatcctatctatggagtccctgtgtgttattgtccccatgataaagatgagataactgatgttcagagaggttagattgcccagcagttatccagctggtaagcaatggagccagaatttgagccctggcttctgacctcagggtccatgtccttaaccatcaagctcacattgtttccagctgctggggccgcctgctcttcactgactgaattagaaaacaagcaggacacataagtcccatgtagggcatggcattgaaaatgcagtttgcgaagctgctgactagtgaagtgaaaggggacggtagttaaagtattttgcactgggagacttgaagccagcattctctctaccactgtctgtgggaccctaggccagcaccccaatatctgtgggtcttcagtttccccataataaaacttgattttaaaattcatcatctggccgggcatggtgactcatgcctgcagtcccagcactttgggaggccaaggtgggtgggtcacctgaggtcaggagttcgagaccagcctggccaacatggtaaaaccctgtctctactaaaaatacaaaaattagctgggtgtggtgtcacgcgcctgtaaccccagctagtccagagctcaaggccaataatagccaagtgctatgtcacgatgcctgcgtcatccgccccacattgtctcgtcacataggcattttatcatcttacagcatcacaagattctcctggtgaggcaggagaatcgcttgaacctgggaggtggaggttgcagtgagccaaggtcacaccactgcactccagcctggatgagacagtgagactccatctcaaaaaatatataaataaataaataaatacataaatttcattatctcttagaagtcagtgggctgcccagccaggggcagaacttagtgcgacacttgcccaactcctcgtatttgtcttgtacttcccagcatgggagatgtgtcctaaatgaagaagcacaagaacatgctattgagaagagtccctcaattgcggccatcctttggtgtttctgaaagtaacaaaacaaggcatcagatatagcagaaagaagcactggtggtagctgagagagtttgataggcagctacagaaaatccccataccttggatgttgatggcacgcggtgctgagtaggaaatgcagaggtcattgtttttcaggctgtaaaaacctcaagcacaggaatcccatattattgccgttttatcctggcatcttggaaagtaccgggcacatggttggctctcggttgcactttgctgagtgactgactgggaaacacaccagagtggatcagcatccagtgaggcagatggatggacacagtcctaggaaacgtaatctgcgcagcttgtgaaagtgtgatgagagttgcaggagaatggagttgatggaacagattgtcagagcactgtctccaaagaagaggagtggcagggtggacggagcgcctggctgcacacacacctgttccgcctccctttctttcttcctcccatcctcccaccctataggtagtcatcaaagcctacggggtgccaggaggtaggctttgggatacagcggagaataggatagcgatggtccctgccctcatgaaacagggaatccatgtcagcaatatatgcttttctgattaatgctatcagaacacatgcttcttgttagccgtgtggctgtgggcaagtcaccgaaaccctttgagtttgtccatctgtctaatggaaagaaataccctcctggaagagtgttttttaaaggattagaaataatatgtccaaagtagttattttttctttgagtttggggggaggggtggttccttctctctctccccctgccaactgttttctagaaaatcagcacttactggatattgtagagaataattttggggttttattattttgaagacggtttcttctgttaaacttcttcctgcatcctcttgaactggcagaaataaaaatgctagacttttaaagatatgacactctagaatcctgattgctaaaaatgaaaagcattctaaagtaaataaaataacaaattcaaacagtaaatctgtaatgaccgaatgagcaccattttaaactcacacgtaccagaggtgatcgtggtatgaggaatgagcatggtacattctgaagctcctgaagtaatcaagggacttctgttatggcctaaagcaaacaaacagccaccatacaaacctatatacatttctatttcttttccctcaaatttctacttgaagcaaaaggaaagtcacttcttgctttctctgccccagtaactgtgggtggcagccagtttttggagcagttctggagcaattactctgcaatcccaaattcctagtgtatgaacaaatctgctcagacattatcagggaagaaatactggaacctggattttagtcctggctctgccactttctcaatccttgaccttggggaaatcacctaagcgtcagtttcctcctctagaaaatagagaataataatatctgcctcacagattatttagagattaaatgatgtaataaaacgtatttcctcaattccaagtcaccatcaattttaattcacaccaaattttcaggtggaaaaaagccttacattaagtcctcatgttgcttgtaagacatccaaatttcagaaaatcaaaatgtttttaaaaagttatactcaaaatgagcaactactataaatacgattgccttggcaaaggaagattctaaataaacgtaagacagtcttgttatcgtggtcatcctccctgggcggaggatctgcaatctgtgcctgggtttccctgtcgccaccactctgctaagcagccggaagcagggctgccccttcagcatttctcttgagacctaccgcaccccctcacaatcccagatcagatgccaaagccagtggggactggacaacatgatgagcccaaaccaatccacgctgagcttggcatctgatttgggattctccaccttgcagagaatcggaaagtatctccacaatttcttttggaccgagctgttcttccctttccatgagtttcttttacacctgacctagagcctctcaaccatttttatgtcactgcacagccagaaaatgataatatttgtacagcactccagggaaaagggaggaacagttgggccaagaggccaatgacttcaccatctggaacccattcagggcattccagcgtggcccaccttctccaattagcctcctcaatgaaaaagaaagagggggaggaagaggaagagaaaagaagaagaaaaccctggtaatgttcactgttttttgctttagaattataagggcactttagtttttcgaagcgtctttatgataatggtctggtatagtgatcaaaatacccttgggcttgaagtgccataaacaaacaagttgtgatacttgcgtgtgtatcagaatccctgaggaaacttggtgtgtgtgtgtgagcgcgtttcctaatagcctgaggcccgggaatctggattgtaagaagtgctccaggtagttttttatcatgatttttaagtcagctctgggaactactgtcttcgaggcccttggaaggtttctcctggcactctacctttcatgttctgcattgctcattctattttcccctgtaaaggtagcctttttgatgcagtagtccaaacctcgtcttgcggtgcccttgtatatgtgctcagtcctaccccctagtgtacaagaatcgcactgcaaggagtagataatcagctgacctgtgggaccagaagctcagcctctcaggcttgcaatgttctctgagaacagtgtgtctcagcgtttggtttggagatttcctgtatcggaattatctagaaactcattagaaaaacagtctgatccatactctcaaattttggactagtaatctacattttaggtaagcatactggaaattcttatgtacattcagatttggaaactactacgtatatgggatttactaatcctattgatctgtaaagggttaatttgactcacacattgttacctgtctttgacaggccccttactgcgaaataaccatccatgtacacaatggaccccttggagtaaccagccttgcttccaatatgactgttggggtagtaaccaggagaaggtgcttaggccctaaattctgtcactgaagccaatggtatgattaaagctcaatgtgaagacttgaatacaa

SEQ ID NO: 9823 - DNA, 6000 bp, Homo sapiens
tattgcccaggctagtctcaaactcctgggcccaggtgatcttcctgcctttgtctcccaaagtgctgggattacaggcatgagccatggtccctggcctttttgctagaggattttaaagcaaatctcagcagtcatgtctttttacctacttctataccatctctaaaaaatatgggtattttagacgtttaagatttctttgcactgggtgcagtggctcatgcctataatcctagcactttgggaggccaatatgggaggattatttgtgcccaggaattcaagaccagtctgggcaacatagtgagacctcatttttacaaaaaataataagctgggcatggtgacacactcctgtagtctcagctacttgggaggctgaggtgggaggattacttgagcccaggaggttaatgctgcagttagctatgattgcaccaccccactctaaaaaaaagatgtctttgcatctctctgtgtgtttagaacatgtgtcaccaaggatgtgcaatcaaaatactttgttctaatgctacttgaaataattgtttctttttttttttttgtctttattttattttattttttttgagaaggagtcttgatctgtcattcagactggagtgcagtggggcgatctcagctaaccgcaacctctgcctcctgggttcaagcaattctcctacctcagcctcctgagtagctgggattacaggtgcccgctaccacacctggctaatttttgtattttttgtagagacggggtttctccatgttggccaggctggtcttgaactcctgagctcaggtgatccgcctgcctcggcctcccaaagtgctgtgatagcaggtgtgagtcactgcgcccagcctgttttttatgtttcaaatgtcagtttgatacatagttagggctgttcgttttgggttgttttaaacttttaagaactttttattaacataattttttgaatatgaaaacaacatgatttcgtagtcaaaattacatataacaagttatgtgtaacaaaatcatataacaagttatatgtaacaaaatcatatataacaagttatgtgtaacaaaatcatatataacaagttgtatgtaacaaaatcatatataacaagttgtatgtaacaaaatcatacataacaagttgtatgtaacaaaattatacataacaagttttatataacaagttaaaaggccaggtgcatatatatatatgtatatatggccttatatatataagtgcacttatatatttatatatatacacacacgtatatatataaggccaggtgtaccattttgttttttatatatacacgtgtgtgtgtgtgtgtgtgtgtgtgtatatctatagatatctatagatatctatatatatatatatatatatatatctatatatatatatatatatatatatatctcaagttataggggcaggcgcactggctcacgcctgtaatcccagcactttgggaggctgaggcgggcagatcacttgaagctaggagttcaagaccagcctggccaacgtggtgaaaccccatctctactaaaaatacaaaaattagctgggtgtagttgcactcaactctagtcccatctactagggaggttgaggtacgagaactgcttgaacccaggaggtaggggttgcggtagccaaggttgtgccactgcactccagcctgggcaacagagcaagactctgtctccaaaaaaaaaaaataatagagaattcttgcttccaattctcccattcatttgttctccttggtaaccatttatgttagctttaggtttattcttctagtgtttccttctaaatgtatgaggatttgtagtaaacatacttatattcctccatgtctcaaaacatagctccctatgtatattgttgcacggtggggttgtttttggggagagagagggtctctgtgcctcctgttgtggttgcagagtgcccagggcccacgtgcccactgtgaagatgacagccttgccactctgagctgtgctttctctaactgcatgatttcttttacttacttcaaactgagtgagagttcatgttgggacactgatttgattttcctctacgcaggcttttaaaaatataaatatttggggttttccactttcctccattttaagttaatagaacgttcatgagaggctgggtgcggtggctcaggtctgtaaccctggcactttaggaggccaaggttggcggatcacgaggtcaggagttcgagaccagcctggccaacatggtgaaaccccgtctctactaaagataaaaaaattagctgagcatgctggcgtgcacctgtaattctaactacttgagaggccgaggcaggagaatcacttgaacctgggaggtggaagttgcagtgagccaagatcgcgtcattgcactccaatctgggcgacagggtgagagtttgtctcaaaaaaaaaaaaaaaaaggtttatggagaccatttggcaaaaaggaagatttgaggtcagttcacaaccactatcgacactatggacattttagtacctgagtcgtgtctaagcatagggctttttaatgtacttattatgcttattgtcatattatgtataaagtattgtgtaatacctttgccacttagaatattctctaaacattttacatattactacattacctttgtcaacctttttttttttttccttaagacagggtcttactctcgcccaggctggagtgtagtggtgcaatctcagctcactgcaacctctgcctcttgagtttaagtgattctcccacctcagcctccccagtagctgggacttacaggcatgtgcgaccatgcctggctaatttttgtattttttgttagagacagggtttcaccatgttggccaggctggtctcaaactcctgacctcaagtgatctacccactttggcctcccaaagtgctgggattacaagtgtgagccactgtgcccggctggcctgtaaacagtttttttgttttgttgtttttgtttttgtttgtttatttgttttttttgagagacagtctcgctctgttgcccaggctggagtgcagtggcacaatctcggctcactgcagcctccgcctcccgggttcaagcgattctcctacctcagcctccttagtatctgggactacaggcgcccatcaccacacctggctaatttttctatttttagtagagacggggtttcaccatattggccaggctggtctcaaacttctgaccttgtgatctgcccgccttggcctcccaaagtttcactgtgcccagcctgtaaaccgtttttaagtggctgactcactgatttgatgtcctagagcttatttgccaagtttctatagttaaacagtttttttctatttaatattataatatacatctctgcatattatacaaaagttatgaatttttgtattctcaggattttctgaagtaatgtttttcaaattgaaggatatgaacattttaaaatctcttgctggttgggcacagtggcttatgcttgtaatcccagcactttgggaggtcaaggtgggtagattgcttgagaccagcttggggaacatggtgaaattccatgtctacaaaaaatacaaaaaattagctgggcgtggtggcatgcacctggaatcccagccactcatggggcttgaggtgggaggattgcttgagcccaggaggttgagactgcattgagccaagattgtgccactgtactccagcctgggtgacagagtgagaccgtttataatttaaaaaaaaaaagaaaaaaaaagaaaaacctcttgctgtattttgccaagtagtttttcaaaagatttaatcaattttttaggattccagtgtgtgaaactgccggtttccttatgcccttgcttgtactggcattaaatgctatcaaatatgattatgagtgaattgtagttttaaaaatctagtcatagaatgagtgaataaactagcgaataaactagttgtaagagctaacaaaatagatcttgtccttttcatggacttttgggaagcaaggtgtgttgggccttattgagaggtagtatttaccacatagaagagtgaaatcgggctgggcacgatggcttgctgggcacggtggctcatgcctgtaatcccagcactttggtaggccaaggtgggcagatcacctgaggtcaggggttcgagaccagcttggccaacatggtgaaaccccatctctactaaaaatacaaaaattagccagatgtggtggcacacgcctgtaatcccagctactagggaggctaaggcaggagaatcgcttgaacccaggaggcggaggttgcagtgagctgaggttgtaccattgtactccagcctgggtgacagagcaagactctgtctcaaaaagaaagaaaaaaaagtgaagtcagaacttagcagaccttgtattgccacttaggtttatgaccttgaacaagatattggaaactgccagggcttgaaatttttatttgtcaaatggggataagtagttcttatttcatcatattgtcttgagaatgagatgagataatgcacttatttagaactcttacaaaactgcctaatacaatcagctccagacacattatttttttgtgtcctattttttgagttaataatatatcatgaatatttattcccatatgttagcaagaagtcctagtaaacataattttaaaatgttgcatacgttagatacatcataatttacccgttctgttgctgatatataggttgtctccaatcaatctgatttaaactaatggtgcattctctgttgccaaaactttgaactatttgtttccttccttccaggatacttttaaagtacattatgagaacaacagccctttcctgaccatcaccagcatgacccgagtcattgaagtctctcactggggtaatattgctgtggaagaaaatgtggacttaaagcacacaggagctgtgcttaaggggcctttctcacgctatgattaccagagacagccagatagtggaatatcctccatccgttcttttaaggtatggaatgttcaacttggacattgtgagaaatgaggactttatcacagctacctattctttgcttttcgaaactagctaaatatttaggcagttgtttagggttgactgatgttcatcttgttgattggcagtgttagaaaccaacagaatcttaaaaaatacccccccatatatatagataagccattttcttttttttctttgagacagagtctcactctgccacccaggctggagcatagtggcgtgatctctgctcattgcagcctccgcctcctgggttcaagtgattcttctgcctcagactcctgaatagctgggattacacgcatgcaccactacacctggctaatttttgtatttttagtagagacaggatttcaccatgttggccaggctggtcttgaactcctggcctcaagtgatccacctgccttggcttctctttcttttttttttttttcttgagacggagttttgctcttgttgcccaggctggagggcaatggcgcgatctcggctcgccacaacctccgcctcccaggttcaagcaattctcccgcctcagcctcccgagtagctgggattacaggcatgcaccaccaagcctggctaatttttttttgtatttttagtagagacagggtttctccatgttggacaggctggtctcgaactcctgacttcaggtgatccgcccacttcggcctcccaaagtgctgggattacaggcatgagccaccgcgcccggccgccttggcctctcaaagtgctgggattacaggcgtgagccaccatgcccagcctaaaccatatattttttttttttttggagacagagtctcgctctattgcccaggctggagtgtagtggcacgatctcggctcacg

SEQ ID NO: 9824 - DNA, 6000 bp, Homo sapiens
attacaggcacccgccatcatgcctggctaatttttgtgtttttgtagagacggtttcaccatgttggtcaggccggtcttgaactcctgacctcaggtgatcctttttctacttcaacacctgaccccaaagctttgttctgcagtgattgctttgacacctttgctttgacaaattcattttcctcaggaagacttggcaaaagttttcttcttttgccagtttgggacaacctgaccaattcattgaaacctattgttgtttttcagatttcttgaaaacaaggaacattctttgctgtagcttatttatttacttatttatgtagaaacagggtctcactttgtcacccaggctggagtgcagtggtgcaatcaaagctcactgcagcctggacctcccgggttcaagcaatcctcctgcctcagctccccgagtagctgggactgcaggtgtgtcccaccgtctctggctaatttttgcattttttgtagagatgaggtttcaccatgttgcccaggctggttttgaatcctgcgctcaagcaacctgcctgcctcagcctcccaaaatgctaggattacaggtatgagccactacgccctgcctgctgtagctcatttgtaaatgactttcgagttccattgagacagtgaaaaaaatcgataaattatatattgaccaccatttttttttatctcaaagaatttctctgtaggcaagcccttcaaagattttgaaaaccactgtttatgtagtagaatactaagctggaaacaaggaggttttagttttaattttatttcttcaaaagactctgttatcagacaaatagcttgtactttagagcttcattttataaagaagaaataatattgactgtgatttgtaggaaagtgtgatgggaactgagttctaattctaataatcagggtactttgaagtttgtggaagacaagcatgttggaagatatgtataaattctttttttattttattttgtagaaatggggttgcactatgttgcccaggctggtctccaattcctgggctcaagtgatcctcccgtctcagcctcccaaagtactgggattacaggtgtgagccaccatgcccagcctgaaaattcttgatattgcttttttctttattttaataatgtaaatgattctgctcatactattataaaagtctttgtccagtatgcgtgtatattttgtttattcatatattttacctttttttggtgctctttgttcttttgtatagttctagatttctgtgtggtatgattttccttctgattgaaggatttctaatgtttcttgtagtgcacatttgctgacaatgaatccttttagtatttggacatctgaagactttaatttgtttttagttttcgaaactgttttcacaggatatgtaattactgttgacgtttctttatgatgctgtttcaccatcttctggcctgcattgtatccaatgagaaatctgctttcattgggtttatttttctgtatgtaatgtgtggttgtttccttctggctgcttttatttttctttcaaaaatatattttttctttttttaatttaatttttttatttctaaaataaaataaaatagacgcgaggtttcaccatcttgtttcaccatgttggtgaaaccaagttggtcaggctagtcttgaactcctggcctcaagtgattgatccctcttggcttcccaaagtgttgggattacaagtgtgagccactgctcccagcccaaaaaatatattttttttattgtggtaaaatacatataattaaaaatttaccattttaaccattttttgtttgtgtgtttttgagacagcgtctcgctctgtcacccagggtggagtgcagtggtgtaaacatgaattactgcagccttgacctcctaggttcaagtgatccttccacttcagcctcctgaatagctgggaccacaggtgcctgtcaccattcctggcaaatttttacagttttttgtagaaatggggcctcaccatgttgcccggactgatctcaaactcctggggtcaaataatcctcccatgttggtctcccaaagtgctgggattacaggcatgagtcaacacacccggcccattttaaccttattgattgattgattgtctcgctctgtcacccagagtagagtgcagtggtgcgatctcagctcactgcaacctccgcctcccgggttcaagcgattctcctgcctcagcctcccaagtagctgggattacaggcatgtgccaccatacctggctaattttgtgtgtgtgtgtgtgtgtgtgtgtgtgtttttagtagaggcagggtttcaccacgttggccaggctggtctcgaactcctgacctcaggtgatctgcccactttggcctcccaaagtgctgggattacaggcataaaccaccacgcctggctgattttaaccatttttaagtgtggtgttcagtaatgttaaatacattcataatgttgtgcaaccatcactatcatccatctccattactcctttcatcttgcaaactgaaagtcttttaaacactaactccccagaccccctcctctggcctctggaagccactattctactgtctttgaatttgactaccctaggtacctcatataagtggaatcatacagtacttgtctttttgtgactgtctcctgtcacttaatataatgtcctgaaggttcatccatgttgtagtatttttcagaatgttctttctttttaagactgcatagtattccattgtatatgatataccacattttgcttatctatgcatctgttcatggacatatgacacttgagttgcttccactttttggctatcatgaataatgctgctgtgaacatgactgtacagatatctcttacagaccacactttaaatcttttttgctataaacccagaagtggaattgctggatcatatggtaattctattttcatttttttaggacttccatactgttttccccagtggctgtagcatcgtacattcctatcagcagtgcacaagggttccactttctccatatccttgccagcacttgttgttttctgttttttttttttaatcatagctatccctaatgggtatgagtggtatctgattgtagttttgatttgcatttccctaattatttgtgatattgagcatctttttatgtgtttatcagccattcatgtatctccttcgtagaaatatcctttgcccatttttatcaggttgtttttgttttgagttttaagagttctctgtatattctggatgatagatgatctgtaaatattttctctcattccatattcctctggctccttttaagatttttctttatgtctggtttcaaggaatttgattttgttgtgccctggtggagtataagctttcttttgagttttttgctcttgttgttaagcttttggagtttgtgggtttatacttttcatcagatttggaacatctttggctattatttctccaaatagtcacacatcgctcctcggattccagttacatatatattattaggttcttgaagttgtcccataccttactgatgctctgctctttttctttggtcttatattttgggtttcattttggatagtttttatttctgtgtctttacattcactcgtctttccttctgctgtgtcttgactgctgctagttccatccaatgtatttcattttatatattctataatttgtggtttgatagaaatgcagtgatgtagcaggtatcaataaatactgccttaatttgttgcgaaaatataacagatttcttgttctgtatgttagctaaaaaggtatgcaaaccaccctgtatgtcatattaacatttatgtccctttgttttcatgtcaacttttagtttctctgccaaaacctacatatgttttttttatatgattattctacattttctgctgagagtggacatctgcattagtagttctatgatatttgttttataagttgccagaatggttgctctgtttggcagactgcagacaaatatttatctatgattcgttgcatgatatgaccatgattttgctacaaaaaacttgaaatagattttaatattttctttactattatcagagagagagctggattacctgcaaaagtgtacttttgcttattgctgtcattgataactcagtgccagctgggcgtggtcactggtattacctccatgtgatcactttttgttcactaatgttaatttaaaaaattttaggctgggcgcaggtggctcacacctgtaatcccagcactttgggaggccgaggcagggggatcatgaggtcaggagatcaagaccagcctggccaacatggtgaaacccagtctctactgaaaatacaaaaattagcctggcatggtggtaagcgcctgttatgccagctacttgggaggatgaggcaggagaatcgcttgaacctgggaggtggaggttgcagtgagccaagattgcaccattgcactccagcctgggcaacaagagcaaaactctgtctcaaaaaaaaaaaaaaaagaaaaaaaatttgcagcctgagaactgatatacttcagaccagaagtatttcagattttttttagattttggaatatttgtattatacttatcagttgagcatccctagttggaaagtctgaactctgaaatgctccaatgagtgtgtcttttgagcatcatgttgggactcaaaagttttcagattttggggcattttgggttttggcctttcaaagttgggatgctcagcctgtcattgcttgtcagacagtcatttgcattcagtagttctttctccttttcttgcttctctgtcccagcaggtattaatctctggagaagacacatccacagttagcactttcttcagatgctgacgctcggtgaacagttgcctttggtcacaagatttagaagacacagtgtccatcctcccagattggatctctttttcatatggatcttctgtttctatgtctttttaaaaaataactttttgggaaaccttttggattacaactgttcatcctcacctatgcaaagaaagggaagctattgctgggattttgaggaggtatgtcgttttttcttctactgcaaaatcacatcacccaggcactcagaacagtataaaataattatactttcctctctataactcagttctcattcatttacttgttccatcttcctttctcccattttctctttttttctagcacctgtagctcaacaagaactttcttaatgtatataatgaaacagctcatttcctacattcttcctgaatgttattagacacgggattagacttacaagtaacggggagcagcttgaatttttttcttttaaattaaatctttattttttataatagagacagagtcttgctgtattgcccaggctggtctcaaactcctgggctcaagtgatcccccacctcagcttcccaaagtgctgggattacaggtgtgagccactgtgcccagctgtagcttgcattcttatttctcaaattgaaattgtgacttgggtaaactgaatttgttctcattctgcatagacactggatggtttaggaaagcttagtaacgttagcataatattatggctgtatgatttcatagtctggttcagtttcattggcaagaggaggtgtgatattgtagagttttgaactaaaaattgagacttcagtcccaggtttgacattattacttccatgctttgagagttaaagtatgtttgttttctcacctttaaaatgggcttatcattacttgctttacacagctcatggggttattgagaatcagataagaaaatttgcatgaaagatttttatcaatgtaaaggattgttattgcgttgtagacagttataggtatatctgttgttttcactcaaagactcaat

SEQ ID NO: 9825 - DNA, 6000 bp, Homo sapiens
ttacaataaacataacccaatggtagcctttgaaggaaaattgatacttacagaagtttgaaattttggtgttcaaaactgtgatcaatcatgactcagcttttatcagaacatactggatgtactagtagaaaatggctattcacatatgtacaaacatacaaaactattgcacaaacagacttctaagaaaagtcatgacttatgcaaccagaatgcagggagaggtggtagtattgctaaatggtttttatagctatttgactgtttgcccctcccattatccactctggattctacaagaaaccttcctcctcttctatgtcattcttcatttaaaactgtccaaggatttcaatatgggaaataactaacagtcacaagccacaggttagttgcctgggagccaggtggagccaaaaatttttttttacattgagacctgaaaatatagatttttgttctgctgacatgcagaaagacagggccacaaaaacagaactttttttgaaatgaacaactataatctctgattggctcaatgaactattctaaagttaggtctcaaattccaagcccctttgttctgttgtggaaggaagtcgtgataagaaaagaattataccaggcctctttgtggaattaagtcaaaccttgattttcccacatgattgtattatattttgttaagaatccaaatactctgtagcaaaggctgaaattctaggagagctatcagaagtagaatttttcagactggaagaatatccaggtatttataaaatcgactaaatcctagaatctatagtcagatatcacctcagtatggtttgctgacatttcacaaagcaacttcatattgttatttatcattcaactgcttttaaaatgtgctgagtggctattgtgtgtcagatactgttctagcggctggatatacaatgatgaataggtctggctcctaccttcatggagctcagccttattgaatagatacataagcagctgttctccctggactaggttagatgcccttcctctgtggctcttccatattttgtttaccgatcagcatatctgttgcattgagattacttgtgacttgtctcttcctttagaagctatgctctttcaggacagagcccgtgccctgtgctccattatatccccagctctggctcagtgtcagactcacactgactgctcaataatctttgttgaatgagcaaatgcagtgtgctacatgctattatcaactcttgggcacagcatcatgaaagtgaagagctatcagccgggcgtggtggttcacgcctgtaatcccagcactttgggaggctgaggcaggagaatggcttgaacctgggacgtagaggttgcaatgagccaagattgcgccattgcactccagcctgggcaacagagtcagactccgtctcagaaaaaagtaaagagctatcaaattagttgggtttaatcccatgaatttgcttcctgttgcaaattaatttattccttaaaaacaaaaaatagctttgttccaaaggtctcagttgaaaaattccagcatattaaatatccaaacttgccagaatttggataattttcagcagtaacaaattgagatgtaataaaatgatctaaattaatattttaaagttcaaaaaaaaaactagcctaaagagattgtattttctaaatattcactcaatattgaatacaaatacccatcttttataccaataacaacaataaaattggaaaacagttttaaaaaacacctacacatactctactttagcacatgaattattttcatttttccgcatttgctcgtagtttacttcctacacatacatgaatcttacctagctttaaacacagcacaaatacagttctgcatttttatttttgtttataagaattcagatgcctgttagggaatataaatatcattataaggtgagaatttctgaccatgtaatcctagattggggtcaaaaattataaattataattttatgtttatcattacagtaggatctgggctaaattcctccattttgtggaatgacatgcagtggaagaaacttacacaggatattgaataattcattccttttttctgaatgaaaaaccaccaaacaaaagtagtttatgaagtatcccctcaagtatgaccgtgtgtcagaagtttctctttttacccacaggtaccttctggatacctccacatggtccgagtgcactgaacccaagcacattgtggaatggaatgtatctctgttttctatcctcttggctcttggtggaattgaattcatcttgtgtcttattcaagtaataaatggagtgcttggaggcatatgtggcttttgctgctctcaccaacaggtaagaacctgcatgaaaatgtcgtagtctggccctggtgttaatataccattgttttcatcataaagaaaaaggcaaaaccaaacatgctcgacctaccagcatttattctgatatcatctttgtagcaacacaattatagcattcactttagctgtcagtaacaagcttcctcgagtctcacagtcacaggattgtcttagttctttgcagttggctctatgtacacaagaacatgctgcccatagacacagcgctcccttcaggatctaattcactgcctctgctctcgctgcagagacagaaaaaaaagtgatgtctgctctttgtttgctgttatattcccaactagtatacataagtaatagccaaccattcaatgcatcaggcactatgctaaacccatatgactcaaatattaagcaataggcttaagatcacctactcaggaaataacaggcttcaaaccttgagtcgctctgtgcaaaagctcctacttttaacctgtattccacacttgctgtttggttggattttctgcaattccttcctaataaggagtcataaaaatgcctaagcagtaagtatggagaatcactagcaatctttgaacagcagctcatgaaaagcctttcgttgtgaaagaaaaccaggaagcacttgtttcctggggatatgatttaggagaaaaaaatgcatttgtttgtagcagtgaaagttcttgtttctatatcctcctaaaatatatatattattgaattaatgaaagtccagctttgatcctatctttgagagggttattttatgtcttatatttttcaaaccatttactcctctggtgccagatctgttaactttcttttaaaaataagacaaaaacctaatgaaaactgaaagcccattgctaccatgaaaaactttgctgaaaataaaaggaaactttctgtaattttgggggaaggttaaaatgaaaatctagttttccttatcaggcaagtatagcaagattaataatttctttggcaaatttccaagaaaataagggaatgggaaaccttcaatatggagcttctttcaagcagtacggttggggaagggcagagaagtatcctctagggattgctgtcatgcagcttacctttagccttgaatttcatacaaggcagagttcaaagtaagtgattacttgtactaaatgtactcacttagtacgttttggggacaggcataaagagccaatgaccaaaatggctgaagtgatttggcagggaatgatactctcctctgatttggggtagtaaatacaccaggtttcccagctgagtcactgtagggatggcttcttcccagatactacagggaagatctgttacctttgtttataagacaaaagacactttcaaagggcaggtcttttcatgtagaagagtcaggtccataactcggtagcatttaatttgaaaggttacccacattgagctcataccagtgtgaaacttccatggcattatcttttaaatccctaagattaaaaccccacacaaatgcactcaaagcaacccaatatcagtatcctgcagtttctatgggccctttctgcagcctttactcatggaagacaagggatctgggtttgtttaggaaacattttgtgagcattgtccaagccctaagtatggttggcctaagctttgctgaagctaagatcagtctgtttatgtttgcttaaaataggaacttaaaggactaaaatgtcatcattatttatcctgattatagcctaatggtattttattttctctacagcaatatgactgctaaaagaaccaacccaggacagagccacaatcttcctctatttcattgtaatttatatatttcacttgtattcatttgtaaaactttgtattagtgtaacatactccccacagtctacttttacaaacgcctgtaaagactggcatcttcacaggatgtcagtgtttaaatttagtaaacttcttttttgtttgtttatttgtttttgtttttttttaaggaatgaggaaacaaaccaccctctgggggtaatttacagactgagtgacagtactcagtatatctgagataaactctataatgttttggataaaaataacattccaatcactattgtatatatgtgcatgtattttttaaattaaagatgtctagttgctttttataagaccaagaaggagaaaatccgacaacctggaaagatttttgttttcactgcttgtatgatgtttcccattcatacacctataaatctctaacaagaggccctttgaactgccttgtgttctgtgagaaacaaatatttacttagagtggaaggactgattgagaatgttccaatccaaatgaatgcatcacaacttacaatgctgctcattgttgtgagtactatgagattcaaatttttctaacatatggaaagccttttgtcctccaaagatgagtactagggatcatgtgtttaaaaaaagaaaggctacgatgactgggcaagaagaaagatgggaaactgaataaagcagttgatcagcatcattggaacatggggacgagtgacggcaggaggaccacgaggaaataccctcaaaactaacttgtttacaacaaaataaagtattcactaccatgttgttgttgtttagtttcattatccttaaaagttctcttttttctcccccccccccttttttttttccagtttgcaagttatgtggcccctattgctaacggcttcctgtctttttgtttctttatcctactctctcatcctctttctcctcttctttctctgctgtctgtaaattgccattgctgtacctgtgggatcatcaccccagttaggcactggtcctttctaccaggtgctgcaagtatcagcctccctggaagggtaacaggcatttttctccttactgtacagggttaggctctttcaagtgacaggattcctggacttattgggaattttctatagaaatgttccgtttttggtgttcattggtctggacaacagataagcaaatttataaagaagcataaccagctattagacagcagagctcctcctatgggcaagctgccctgcagtgggcggctcctgactgaaggtttcagcctattctgtaccatagtccctctggcaggctggtgaaacctacagacaccttcgaagaataatgttcataaattcataaaatgcatagaattatgaagaaaaccaatacactagaatattttatgaaaatgtttttttaaacatatagtgtagttgtcttgacagccagctctgtcacgtcaacacctgtggatagcaataacgtgtgtcctaacagccttctaaggagtcggtctaagaactatcctacttttttttttttcactgagcagagttagccaatatgctaagcacatttattatttatttatttttatttttattattttttattttctttaagttctgggacggaacgtgcaggtttgttacataggtatacacgtgccatggaggtttgctgcacccatcaacccatcatcaaccacatgcattaggtatttgccctccct

SEQ ID NO: 9826 - DNA, 6000 bp, Homo sapiens
tagttacagcaactgagcactgaacttagttgtgggtttccaggtgtcaggggaagcatctgaggtcacatagctttcattgtctgacgagaagcagcatgcaagtccttctgaaaagaaactttcctggcactggatcttggaaatactttatcaagtggatccttatttaagggacactgagtaacttaatgaacaatgtcttctatagtggttttggaaaggtaccaaaacattattaaaatgattatcttctatggctcctttataaaactgaaggcacagtattatgacaatggaggcctttctgcatggagcagctttaatgaggtcgggctgcatagctttccaattgcttgttttttgcatagggatcaaggttagaaaatctaggtaactgttttagaaaaaactttttgttgtatttttcattacagtggtgtttcttaaactagggtatgcatagttacctaaatttcaaaatgtttgttacagcttttaaaggttttcagtgattaattatgtcagggatagtaaatgggtttcctctgcccactgcagtcttgggcagatttggtctggcacttgttcttgatcctgggttatgtctcggaatctttctcagtttagtgttcaggtagtcactactagtgactcagttgaaattgggaatgaaacctttgccatttgctggattaggtatttcaaagtggggtgaggtggaggtttcatggatatatataagtgcagagtgtcagaacattataaaatttctcttcttttcattggtagaaatttggctgtttttatttccaccataaaagccatacgggatacagtttgtactgtattgattgaccttgataactgggaccagagcctctcattaagatctagcttgtttctctctgaaagaattccaggagatttgatgtaagaagaaggcttatcagcatttctttgcttagatgtgtatctctcaaagctctgtctacattcatttggaatatatactccatgccgcttaaaagtactttaaaatgttcatttatccaaggatggaaataagcagaggagaatgtgagattcattaacattcattccagagtgggagtgtggtttcttcttgatttacaggtgatctatcatttaacagttgcttggtctcaacatttctcttgtaggaagctcttcctgaaaacatccttaagatattgagaagtgctctcccaaaccacgttccctactaggaagaaaatgtcttctactaggcagaaccgttggcaatgagggcatttgggggtcctaaatttaaaacagaaacaaaaacaggatatgggtggactcagtaaaagttctaaaggctgtcaggcagtcctgactttatacactgatgtaactaacacgtggtcatattgggatctagggaaatctaaaggattgggccacttctttcattaaaagctttttgaaaatggttcttgtattagtcgattttcacagtgctataaagatactaccagagactgggtaatttataaagaaaagtttaattgactcacagttctgcatgactggggatgcctcaaaaaacttacaatcatggtggaaggtaaagaagcaagtgccttctacacaaggtggcaggagagtgagtgagcacaggggaaagtgccatttttaaaccatcagattttgtgacaactccctcactgtcacgagagtggcatgggggaaaccacacccatgatccagtcacctcccaccaggtccctccctcaacatgtggggattacaattcaagatgagatttgggtggggacacagagccaaaccatatcacttcttatttagggcttgacagaaaagaagttaaggagaagcactgtgatgcaagtgagataattttatcatctagagtaaagtcagcctaataacctacgtaagcaacctgacttcactgggtctcatgccggagtcttaaaaatggaggcagttgtcctgagtgttcattctagtgttaaaccatgttgagactatgcatcttactaggctggtatcattgatcagtgttagaatgacatgtttcctggaactccaactcttgtgttttaaaaatttacatttaaacttctatgaaattagaaggtgttttatagttgatggctgcacttaatgtccttcccttcctccaaacttacagtaaatggaagagttattaagtcgatggtgtctgtagaattgaggaaatatggcatctgttagagactacagatttcttaagatgagcataagatgttaattagccttcatttagctcctttccggcaaaacttgttttctttggattagtatacttaatgaatataatgtgtcagttaccaatgacttacttaaagtgctgtccttagggttgaggggatgtgtcatctgactccagagtaggtttatctttttgggagacaaagtgtctacaaagtggccttcaacctttttgataatgacctacagtaaaaaatatgtattttaccttttgaccagataaactcacacgtggacacatgcacatgtttcataaaacgataattatcctactctgtgcgatgtgctgctgatgtttttctattctttcctatttcatttttttaaaatgctggtctcaactcaattaatttctatgggcattcgatccacttgattgagttcacatcccactaatgggtcacaacctacccttttaaaaactgctttacaaagttaattaaccaacaagaatgaaggctcccttattcacaggcatcctataacttccttttgcatgtgtgaaggggtaaaagaaaagatggatgaaataccagtaaattaataagataaactatcagaacaagtaaaatagaataaaaagtagaaggattttacaggcattaaaaagtcctcctaatgattaagcgctctttttttgtttgaattaataaagatggctaacaatagcctacttctgtgagaccacaggtaatttttgtcattgggattgtcttctgaaggtgtgatattgaagtctgaaatccgtaggctgtagaaagcctcaagcccaaggtatagccaaggaaactccacaggctgctaatcatggagtttgagttttaggtaagggccaagagaaagatatttgacttagctgctgatgaaaccgtgcgggttgccattaatgagtcctttcttccataaccctggttgcctgggaaaaatggtaacataaccagcatgatgttttcttcactatcatagagtgacatattttttttcagtggaagaaaggggacaattctgactaaatctaatattacaaacacattcttaccctagaacactcaaggaaaaacttgttttatgatgaactagagccatatggtacttaaaagtttttttaaatcatatttataagcttgtttgacttgtttctgtgtctgtagaatcttgtggaagaagaatgaagttgctgattatgaagctacaacattttccatcttctataacaacactctgttcctggtcgtggtcattgttgcttccttcttcatattgaagaacttcaaccccacagtgtatccttttcaaggttgattatcttttttagaagtcaagaaacagtagttcattttggttttgacttgtctggatattttagtggaaagaaaaactgctctgggagtcagtccattaaatagtgctgactttagataactttctggacatttaaaataacagctattggtttaagattcttttaagtttatgaattatgactgtatgataaagtattacaaagtagtctatgggaatctgtgtccttgcctccttaaaaaaaagctccaaagagccaaagcaaacctgtcatttttgatagcttctgaaataataagcccctgtacctgttatttttgggctctgggggttgggtggatggccaatgcagttaaataggttcattccagtgtatcttaatagtgtttcaagctgctgttaagttgagcttttgggcaagaatcagtcttctcttattaatttattaaagatgttatccaggaatgtgcagccaagattttaacaattggtgattatgatgtaataaaatatcagataccctccaacgtgtaccttctgggaatgctggagtgatttgctgaaaattgtagagttctgaggctaggagtagcttcgaacttttagaacctccttgctgttgcaagccaactgcagcaaaacactgatttgcagggaagacttatttttccattgctcttaggggaagaaaaggaaaacaaatctcttttctctccatgttctttgatcagctcttcgtgaaggttaaatggaattcagattattctttgtgatcatgtgttctaggtttctgtctaaagtgttttttttaaattggaacacatttcctgtgaatgttttccatttttttttggtcttctgtcttgcaaattgtgtttgcagacaatggggctgcacatcattatgattacaccaagtgtcaggaaggaagcagtacattccaaagagatgggctctttattttctcaaaaaaccaatttggagttactcatttttccataacattaaatttcttacaggaactacatattgtccataagtgcttcatcaggactcatcgccctcctgtctactggctccaaatagaccatgtcagcttcaccccctggctttgtgtctatgggtggcctgtggtatatggaaaagtagcagggtggtcagggtgggagacacaagatgtttttatagtctagagcctttaaaaaacccagcagaatgtaattcagtatttgtttattggctgttttttgacagattgttgaaattaaatgaattgaaagggaaactcagagtactaggacgtttattaaaaggaaaaaaatgtcttgcaatgtgctgtaatcacaagaggagaaaataacttgtttccttgatctgtcagaggtcacagtaacctgggccgagctgttattatttattatataatagtagtaggaagttaataactggttctctgtgttccaagcacaatattacaacttcttttgaaccgtaaatatcagaatgaatcctcttcccaggggattgaacagaagcttaatgtttacaagtgtttgaatttgtgatctgaaataacacaaaattaaaaacatgatttctctaattttccaactagaggaagagaaacttgtggaaaagttctttttttttcttttttttttcttaaagaagggcagccaaggtagtaacctaaaaatagtgcccaggcatatgagagttgtcctacgaggttaaagaacacactgttccactgtatggctttggccctgagtggccagggaggtcaacttgaccctgccatgttggtttgacttactaagacacaggaatcactgttttccttgaccagggtctcacaccctggaggaatgttaagtaagagaaagaacctctttcctgaatattgacatgtaaaagaccaaagtaatttttctgaacttctgcaattctgagaactctccaaggaatttacagtgattttagtgcttgtcagcatttttccatgaggactttcatacatttgactctttagttcacaggttcccattgattgtgagcaagatatttatctctttagcccttggggatccagctgagagcaatctcttgcatttttttacccgtgtatgtacagatatcatttcttgtgtatgccatgacttgaaaaagtttgggaagctctttagcaatatcagctaaaaggatatgaaatcacaggtgatagcagttgtcattcagtaatttcctacaagcagcaccccaaaggaaatatagtcctaatctttactatccacttctaaatttaatgtgaatttcatacatgttattagttgttttctttataattttataaaaattattcatcgggagtttaac

SEQ ID NO: 9827 - DNA, 6000 bp, Homo sapiens
gaacaaatatgtaataaaaaactttaggctgggtgtggtggctcacgcctgtaatcccagcactctgggaggccgaggcgggtggatcacctgaggtcaggagttcaagaccagcctggccaacatggtgaaaccccatctctactaaaaatacaaaaactagccgggcaaggtggcgggcgcctgtagtcccagctacttgggaggctgaggcaggagaattgcttgaacccagagggcggaggttgcagtgagccaagattgtgccactgcactccagcctgggcgagagggcaagactctgtctcaaaaaaaaagcactttatttgggagattccaggaaacattagtagaggcagaggaaatgagaaaggagggaaaatcatgtggtattgagcggaaaactgctggatgacagggctcagtcctgttggagaactctgggtggtgctgtagaacagggccactcacagtggggtgcacagaccagcacggctctgtgacctgtttgttacaggtccatgatgaggtaaacaatacactgagtataagggttggtttagaaactcttacagcaatttgacaaagtaatcttctgtgcagtgaatctaagaaaaaaattggggctgtatttgtatgttcctttttttcatttcatgttctgagttacctatttttattgcattttacaaaagcatccttccatgaaggaccggaagttaaaaacaaagcaggtcctttatcacagcactgtcgtagaacacagttcagagttatccacccaaggagccagggagctgggctaaaccaaagaattttgcttttggttaatcatcaggtacttgagttggaattgttttaatcccatcattaccaggctggaggtgaggttagtggtgcaggagttgctgaggcaggtggaaatcttgtaataaatgcctaaaaatgttttaagcaatttgactgggctctggaaagcattttgtgattctgaactaaaagatggacaagtaaattttatcaattaagaacaaacacccagagactatttctcttatccagaatttatgacaaggtcctgttgttcttattatcagtgatacttataatatggtttcttgggatgagtaatggagtttactccaagaaactcaaagcatttcatacattatttctgtgataaatcaggaaatatgtgaataattattttatgaatatgtattacctaaagttcattagttcacattttatttttgcattcagaaaatctaattctttacccatcctaaccttttagcaagcaattttgtagtcaccctcaggcaagcaatagtgtagctatactctggaaacccttcacttcttgaagaaggaaaaagtcttcctgattgaaaattggtggctgggtgaggtggctcacgcctatgatcccagcacttttggagaccaacatgggtggattgcttgatcccaggagttcaagaacagcctgggcaacatagtgagacctcatctttacaaaaaataaacaaaattagcctggtatggtggcaggcacctgtggtcctagctactctggaggctgaggtagaaggattgcctgagtgtaggaggtcgaggctgcagtgagctgagatcacaccactgcactccagcctgggtgatagagtgacaccctgtctcaaaaaagaaaaaaaaaattggaaagatctgagatggtgttagtttcagttgcctgtgctgctctcattccctctttagtactaacattctggatgtgtgtgtgtgttgtatttattttttaggacagtttattctgcgttgtagcagcatttggctgtttctactactgaatgaatctttgaaaagctggtaaaagacatgaccatgaagaaatctgaactttttaatattgttaaatatcttgacaaaataaagatgttagtagtttgacaactgaatctgttgtgttttaggccttatatttttaatgttttgattttgttacactatgttctgtttctttctttccttccttctttctttccttccttcctctctctctctctgtctctctctctctctccctctctctctctttctctctttctttctttttttttttgagacagagtctctctctgtcgcccaggctggagtgcagtggcacaatctcggcccactgcaacctccgcctcttgggttcaagtgattcttctgcctcagcctcccaagtagctgggactacaggcaagtgccaccacgcttggctaatttttgtatttttactagagacggggtttcaccatattggccagactggtctcaaactcctgacctcatgatccatccatttcagcctcccaaagtgttgggattacaggtgtgaactactgcgcccggccctactatattcttgttacactggaacacagagaaaaaagtaggggaaaagccatttcaattgttcaaacataaccaatggtaaaaattttggtatattttctaccaatgttttttatttccaaggtttaaaaaacatataattttgtaccctcatttttcatttctcatgatgttatgaacagtttttatgtcattttatttgcattatgattttaagatgcatgacttaatagcggcatttatttcaataggttataccatattgttatttttgccagttccttattgagggtctgcttatttctgatttttcactattataaaaaataaagacatggctttatttgtgcataaagctttttcctacatctttaaaataacttttgaatttatttatttttattttcagagaatgggccttgttctgttgcccaggctggggcacagtagcgggactgtaacttgctgcagccttgaactcttaggctcaagtgatcctgccacctcagcctcctgagtagctgggactacaggcatgccaacacacatggctatttttaaaaaatgtttatttttatttttttatttattgagacagagtgttgctctgttgcccaggctggagtgcagtggtacgatctcggctcactaacctctgccttctgggttcaagagattctcctgcctcccgagtagctgggattacaagcaggcaccaccatgcccacctaatttttgtatttttttttgtacagatggggttttgccacattggccaggctggtctcaaacttgtggcttcaagtgatctgcctgccttggcctcccaaagtgctggaattacaggtgtgagccaccacacctggccagtaattttattttatttatttagtttttgagacagagtcttgctttgtcacccaggctggagtgcagtggcgccatcttggctcactgaaacctcagcctcccaggttcaagagattctcctgcctcagcctcccaagtagctgggattacaggcatgcgcccccacgcctggctaattttgtatttttagtagaggcagggtttcaccatgttggccaggctggtctcgaactcctgaccttgtgatccgcccatgttgccctcccaacagtaattttattttttatagagatgaggccttgctatgttgcccaggctagtgttgaactcctggcctcaagtgatcctcctgctttagcctcccaatatgctgggagtacaggcatgaaacaccatgcctggctgctttttcctacattttgaattgttgccttcatctttctcacacagtgtttttgctcagctcttgccatcctatgtcttacatagcttattagcctaaacacccatccattttctttgtccacagtgtcagggtcttatgaaattcatcctcccttaagactgagattctgatgttggttactatctcaactctatttttgtagtgatgttccccttagaggccgcggtgtcttctccagctaactgtccttatttggggtaccttagtctaaccgccatgttcaaagacatatttgaaattcaggtttaaatcctttttccccctggaaactcctcagcagatgcagttatacccatcctctttcttctcagccactttcaagttaagcatgtagaccaagcttgtccaagccgcggcccagaacagctttgcatgcggcccaacacacatttgtaaacttctaaaacacatgaggttttttttttttttgcgatttttttttttaagtcatcagctattgttactgttagtgtactttatgtgtggcccaagacaattcctcttctaccaatgtgccccagggaagccaaaagattggatacccttgatgtagacaaaaaaagcaaaataaaataaaaaaagcaaagcaacaacaatagcaacaaaaagttgactgggcgcggtggcctgtgatcccaacacttcgggaggctgaggcgggcagatcacttgaggtcacgagttcgagaccagcctgaccatcatggtgaaaccccgactctactaaaaatacaaaaattagccgggcgtggtggcgcatgcctgtaatcccagctactcgggatgaggcacgagaatcccttgaaccctggaggcggaggctgcagtgagctgagatcgcgccactgcactccagcccgggcgacagagcgaggctccgtcttttaaaaaaataaaagaataagtaaataagtttaaaaggtcttttacttcagtccagttggtaactaaaaaataataatacattttttttacatccttcttccataatattgtgtagcctcttacatctacggaatcaaaagggatccttcccaaggttcattctagcaaaggaaaacgtttctttccaccatacaccctgcgacacgtgtcttaatccactcctgctcaactggctcccagtggatccctagggatttttttttttggagccaacgtgggtcagaaaaaggaagagggtgggtcagccacaggttttcagcggactgggctggcggtcgcaaattccccttacttccccacgtaggtaaaagctaacgctgcggcgaggcagccgcggtcggggcgtctccgctgaaggcgcccgggcctcctgcacgttggctgcccgggtgcgggggtgcgggctgcggtaggcgcggaggtgcagcggtaggacctccgcgcacaggcccgcctgggcggacacagcccgagttggacacgggagcagccgggcagcgcgtcttgacggaccggcgagcacttgggccggttcacatccgtatcccacttcaaggagacgtcttcgctgcatcctccggttccgggtggaggctgaccctgggccattccgtctccggtctctggtatttctgctgggtcacttcatcccgggggcctctgaggaggcggaactactgtgtcaggagtcgtggttttcaaggagaagtcgtggtcggattgacagaggtaggggaagtaggcggaacttccggctggctcttccatcagctgccttccccgggcgtctccccgcaacctcctcaacttccctagtcagtgacgcggcgccggccagaaatccgaccggaccgggctcgggggagcgtgagttgcaggtgtgtgcctatctttgcgtctctgtttgagaggacaaactgtggggctgggaccgcgaggtgactgtgactgaggaagagtggtaagtgacagcgagggcagtgggagccaggggctgggaggctactgtgaccgagggccagtgacagcgaggggactgtgacccaggagcagtgaatgcgaaacacggtgacctcggagagcgcgaggccggggctgcgacggcacttggaccgaggaagtatgaggcagtgactgcaagggactatgatcaaggggcaaggactccaaggagactctgatcgattggtagtgactgtgggggatccggacctaagggaacacgagcagcggccgcgaggggactccgacccagagcagtgacttcgaggggctgacttggagaagaggatggcatccgtgatgggcgatgg

SEQ ID NO: 9828 - DNA, 6000 bp, Homo sapiens
gaacaaagaaaggtggcatatatgagttttttaaaatcccactggatgccaggagtaaggagaaaatagcatcaaatcagatgtggtcagaaaagaggtatttcttttcctgtgatgcttttcctctttcctcctcttacagtaaatccccacttatcaaatcttcagatgtgtagagaaggaataaggcaggggtaatgggggagtgggacagagagatgccctttctggagtttgcacaacggttgcatgctgagtaaaacctgatgatgtattccattcatgtctccaaaaagtcaaaagcggtttcagcgttgatttcccttaagagttatcagtcctcattcaattggtttaatgagtgtaagaggtgaccttgtgtctatgtagatactcccatattaaaagacctggatgtaaaacttcacatatgtgtaaatagttattttggagggtgttgtgagggttattgcagctctctgctcagctgctactcaggctaaacgggcaggagaaattttccactgtgttagaatgatgattatttgcaaattacatgagcaccagtaattcattcatgcaatgatacagagctgggtctcagtgcagtggtattgaacttgctgctgggggcgttaattgattcgtttggaacattcccctccagagaatcccaatcacaggtcccctgatcaagaaacggacacgcagtcggggtcctggatatgtagagacacacgtgtgaggctgttgtcatcaaaataaaccatttctgtcccctgacaggggttgagtctattaggaacactccccaatcctgggagcttccgcaagaggctttctatcttggcagaggtggcagctgagcatcgcttctttgctgcaggatggaaaaaagggactggattattggctgcattttaaactagctgctgttctagagaaaatgttggggagggactgaacaagcttagcactggatcagtgtgggggtgtgttggtgaaaagaaaaaatgcctcctcctaacttaacgtttaactgatatcccctcaacacgacccaaatctgtctctccagatacacaatgtctgttttcctaactacatggtgaactgtggagcaagtcttggtcatgtttagtttgtttcccagaatctactagaagacaatgcctagcatatagcaggcacagaataagggccaaaggggagaatggaaacaaaatatgtacatttgaaatttagaaacacagttaagggactttgcctgaaattgtcataaaactttgaaaattgcttcaatgtatagtcccagtgggagaatgtgacagcatattttattctttgttcttttctgaaattctgtgtccagtctaaaacacgacatttccctttaatgtgttaggagtatgcatgactacacaggaatattttctggagaacttctggtgaagcatattttgataaacagtcttactaaaagttatatatatgtacttttaattgactagttgcagagaaataatcaatgtaaaaaaaaatcatacatagtacaggtagtaaaagtcacagttccggcagaagcacaaaagccttcaaagtgagtgggaacctgggaaccattgatcctcagtggctgtttaccatggaaaacacctgcatcaccaacattccagttttgcaaaagtacctctattacagacacataccaggcaaggagggaggaaaaagcctgaaaatttctctccaagtttaagtaatcaggaaactttggtggggaggttggggtggggtgggggcgggggggtaacttctttatttagcattaatctcagcaatcatgaaagtcatggaatttcaagtgatgaaaaatttgaccacaacaatacctatcactagcctggttttgcccacttctcgaacaggaattataaagataataattaattctaaaaagcagaagacaaaacaaacaaaccaaaccaacactgaatgaactaataaggctgctgcatatatatgttggagttggatgtttatttgcttactgcagtagtttaaaaatagttttccagttaacatcttttccacatagtggagatgtcagggtaggtttacatgattgcgtaaatggtcagaagttgtttatgtagctctgaactgctgagagatgagcaggaagacctgggttcagcaaaacccttggggctttttcccagagagagaaacagaggctcctctctgggttgctggaatgctttccagacgaattcgactgggttggcttttctctgcctgtcaaagtcactttgcacagtgctggtgaggggctggggcattgctgccaatctctacggttaccccgaggtgtggagttgcggcgaagggagccacttctgcaaggaaacagtagattcataatgtagaatgaccgtggcaacgtcgttcaaagcacattctttcgaataacaaggctttcgacatgccccacccccgcgcacaacacaccacaaattgatccttgtacctaatttacagcaactgttccctctgacctccccccgcccccgccccacattccaacctgaaagcactttgcgtggatgagacttcaggtgtgtaacgcagcctgtccagccagtgtcctccgcctaaggacaggcaggtaaaaacctaccaaagccccctcttctggcctaagttcaatgccacccgcccacccacattccccggttcagcaattttcagcccagacgcagaagcatctgtttccctggccagggcgccttaacgatcccccgaattccgcgtctcccggaggccagaggtttgggtacccaggaaggtcgcgcctcctcgtgccccgatactcgggttgtaaagggaggagacatcgcctcggcgcatccctggccgctgaacaacgcaacccctacgtccccgcacgggaatccggctgataatctcctcttgcctgagaatcgggccaggcgccctttactaatttcgcgcgctggggacctggggctgccgcctctcggccgcgcggggcaggtgctgcgtccccagcgctcgcctcctccggccgcgcactgagcatgcgcgggctccgggcctccggcgcgtctccccgtccccgctcgtctcccgcccgttcccacccgcccgcgcctctccccttccccgagcgtctcccccgccccgcggctaaggagccggcagcccgaactccggcgcgccaggtttttccagccgccgcgagcgccgggagggagggcagcgccgcgccagacggagcccggggttcgacgccaggattggctgcaagtagggagctttcgccgccgccccgggcccctcggactgtgccggcgccgcacccgaggctctcgccagcccggcgccccggtgctgaggtaagtgaggcggcagctgtgcgggtccggctcctgcgtgggcgcgcgatgccccggggacgcggtcgcgggtgtgggggggaaagggcagggtccgcgcgggttgcccgaaggacaggggcgcttcccggggctctgactcccgcggggccgggcagcgtctgcggggccgtccagctcagagcccggaagccctgcagggtcggggagcgggagctgaacgcctgagcgcggaggactcagggccccgacgacgccaccgtcaccccacagcgacccttcttctccttctcagccggaaaataagtttgttgcgctgcgaggcagccacaaaacaaggaaccgagagcccggaatgctgcgggaagccttcaagtcagctcctccgactggttcgggctactgccccctctccgtgcgccctggcctctggcgccgggttcccggcggggcttttcttctgacagcccagtcacagcccgcagcagagggacgcgaacctggggagtggagggacctgggactaaaggaacaggagcccgtagccgtggtggaaggagccgcgtggagacggaggctgatgtctgtggcgcccgctgggtgccgggctggctgctgagcgctgaggctgcggcggcgagcgacaggccaggtgcctgctcttagggaaggtacctggcttccccagtctctgccgcgggagcctgttgggtggcattcgtttccagcaacttctggggggtttccagtttctttcgagaggcaagacaaccgccccgtcccctccccgggcccagacggcggcgaactgtgcgccgggcgccccacagaccccaatccactcactctccttctggaacgcggggctcaaaatcttcgtgcattttctctcttgtgcttcgtgtatatgttttactatttatgaagggtgtggaggtgagggtaggaggacgtgggctcctgaatccctctgaaccagccagagagtcggctgcatggaaacatttcgcagcgaagctcctgcgaggaggcggcttcgcgcgtcgggaagatcaggcggttgcttgctggccagggtctgcagattcggtgcgaagaagctggcggaggttgtgtagggcgagtcagtgtgactgagcaccctgggtgtgtggtctgcgtggaggagagtgggccggatcttgaggtgtgttggaggtttatttgtaagaggagttcctgaaaggaatgtcgtggaactttttctagttttcctgctggaatcaacataggggcgggcacatgtttgtcagaataacagtggcatttaactgcatgggaagctctttcaattttctgtagtgggagctggatagttcaaggagtaactccacataactgagtcgtttggatacccacacaagataatttggaacgcgcttgtatttttttgttttttgagatttctggtttatgtcctttagagagtggggtaggagcgtaaagactgtataggttgcctatgagcaggtccatacaatagcgttcccaagtctgcctaatagcaagtttgttctctctttctctctctctacccaagtgggtgaaaaagaacagtgtgtcatgaagacaggcacctggaggtgatttgggtggcattcatgagaaaattcacgttacccgtaagtttattcttgctatttttatcttgatttctttaaagattttgtgggaatatctgcagtgggtcgcaggagtaggtaagattgctaaggatcaaaaacaagtttcatgagaatattatttttgctaccttataaaatagctattgatttgtttgttgaagctggtttcaactgctctgtcttgttgaggagagatgatgctgataaacgtcattatttttccatctgaaccctgggaggtagctggcaaggatggaaaaactgaccttttcaattaaagactaagagtctaagagaagtgacttggataagggtgcatgtcagagccacatgtaagtttcaacagaggtagattttcctatttgcagttttttaaacaacacttttcagtttctttgagttgtaaaacttttcaagtcaattgggagtcaatgcagtacctttttccatggtcatttcatattggcaggtaattaagagtgattagagaacaaacctttcaaatgatgttggattttttatcattcacttattttacctacttctctctcctttttgttcaaaagtaggtcttctgatttcttttccgatctaagcactaaatcttttggctgcagtttttcttctgaaatgtatacagggcatccgttccttcaatttaggtcttaaaaaaataaagctgctcagcagaaaattcccatgcatggtactgacttttctacaagtttgtctgatcatgattttaacttgttgtttcttctttgttatatttgaggacagacataatatgcattagcttcaatctctcttatcttaaaaattaatattttgtaaaaacttgcttttatattattttagttgaataagtctatttcatatgataggcagggggaagtctctacacactgattttttttgtt

SEQ ID NO: 9829 - DNA, 6000 bp, Homo sapiens
aaaaagttgcagaccccagttctattggattataaattggaggttattattcattatcagcagctaggtattgcctaactttgtaaggtgttttatttgaagcaggcattttctggcttaaagaaataaagaagcactcgtatgggctcgggtcatggagaattattttaaggctatccaggggagtaagtctcatagcccatctgtcatggttctgaatatagcagtagtaccagtgatattgttaataaccaacatatattgaatatttcctttgcgccaggcactgtcctaagttattttcatgtattgattcatttatttcttcttataaccctaagagaaaggttcagtgcttatctacgctgtaaagatgaggataccaaggagcagagatgggaagtagcttgccaaaagccatgtgactcagaagaactaaagtcaagatttggtacccagcgtgtctgcagagcctgtgctctaaaccaccacacagtaccacttagcagcatacctagctcaaatcttttttctccctctctgcttctctcctctactggggctatggactaccagggaggttctttgacaggtgcttgtcagaaagggacaatataagcattgggaattccctcagttaccagatatttgcaaatgtcaattatattgtagaccgtagcagccccctagtgtggtgtgtctagtacaagcgtacatgtcttgttgtttgtgtttctctaggaagaatgaaacccactctccgacctgtgtcattcctgggacacatcacaggcacttaaatcttttcttgatcactgtgggaaaggctagggactgcggatcgtaatttagttttttcttggtctgatttggtcctgtctgtgcttttgaaaccagacttttagaaagggtggtatacattctctgcctccacatcccttgccactgatcccttctcacctgctgccatctggtttctgcccctatgactccactaaaattgaccttgctaaagtaattggtgaactcctggttgccaaaagaaaggtacacttttcagctgtgtcacactccatttctctgtaccttgtgctgcttctgacttcactttatttccctttcttcactgctgggacattgctctatcttgggctccctgtaggcacatctaaatttggaaagtccttagggctctatcctcaacccttgtctccttgtctatagccttgattccagcaaaatttcacccgtagccatggagtcccaagcctttatcccagaaaacccttcctcctgaacatcacatctctttaagtgtctgttatccagctcctcttggatgtcctacagggacttaaaacattacatctccaaagctgatttgatcatctcccctccaaatctgctgcttgtcctttgctccctatttctgagacatcactttccatccaaataactaaaccagaaactccagatttgtcctaaaccctacttttattttaccccaatcaccaatttctggactctaccctcttgatacctctcctatcagtcctctcctctctgagccctactgtcccagttttggtacctaattctcttgcctaaatttctgtaaatgcttccttattggtttctctgcttccactctcaccctttccagtacatctttcatactactgtcaatttttttcttccatcaaccaagtctgatcatgttattgttgttcaaaatgtttcaatgaatcccagctgcttacagaataataaactcctttaccaggcagacaagtccttgataatctggttcttatccctctttcagtctcatctcccaatgcaccttcattaatattaaactttgtgtattaatttgaaggacttcctcgttccttcttggaatcccccatccctcttcctggtgtgtcttgtgaacttctgctcacccctcaagtttcaactcaaatactcccttcccctggaagctgggcctctgatgtcacaccactctgctcatcatgttgcacccatagtgtttgattgactcctgagatatttgaactcaggaggatgttacaagcacctagcaggattagaacctcaagtgcaaaggggcaaacacattcaagcttcatcacaaactgtaaacaatttttccaagttgataggctagaaattgtgaattcacaatgctgcaatttatttttatgggttctctagtggttccacaatagcatattcctcacaaaagtaatctctgaattctcaggtagagcttttactggtctcctctccaaaatgcttttcacattgcagccttggtaatcttttcaaaacacacatctgatcaactctctccctctatctcaaatacactacatgctgcttaaaaccctttatggcttctcaatattctgaagttaacatgaagcaaaaaacacctcttaaaaggacctacactacccggccattcctttgactcctactgcaccttgtcccactgtctgcattgcagccacttttctgggttactcgtatgcctcccctgccccactgcagtgcctttgcacgtgcttctctatgtaacgcgttccattctccttctcctcgtccgttcatcatcacttccagtgctgcttcctcagggtaatgtttctcatccttctggtgtagatcaaattccccatgtgcctgtcctccacagtgtttgtcaccctgcattttggtcctgaaccatctgatgatttggttaatacctcccttcctagggctggctggtgaactctctgagagtaggagccctgtctttcctgttcctagctgaatccccatgcatcccagttcactcacagtggtcggcataaaggagttcaatatatacttgctgaatgaatgagtgaataaatgaaggtcaaaaatcaaggggttttcgtagggcttttcacctttaccactaccctgtatttgcacgttccttaacaatttcctaaaatgctttcagataagcttttttaatattaacaactgactttaagagcagaaagggcaacccatgcaggtgacttgtccaatgctacatgactagtaagcaacaatttgggactatttcactttgtcacttttcagatcaggcctatggccattaaacagccaaaacaggaagcaaaagaagataacgtagaacttactagggaatagatacacaaagacaataaaatagaaatatccaaacaaattaaaataaaaacacaaattttattttagactgataaaactttggttcagggaacacagacaaaaatcctctgctgtcatttcagcatgtaccgtttgggctatgaggaaaagcatgtcatctttctctgtataacagaggcagttaatattttatcctaattctcattaaaatgtgtacgttcaataaatgtcggctattaaactgttggtgagaaagtctatttctggaaaccttttcattatttccttaataagactatttatggtttttttaaggaaacaagacaaaacgtaaccacttagcaggttaaaagggtagctggagttgccttactttcaaggagctacctcaaaataactagggttcatttatctaatattttaagacttctattaatattgaaacacaatttgtagttaaagagaaaaatttaaatcacctaagaaaataattcagggcctttatagttttacattaatatgccctttaatatccagatgttacttacctaataaaatgtacaattagctgtgaattgacatgaacaagtatttactgagcaccgattacgccgaaagctccgtactttctatggggtttatataagagcaattcgagtctccccactacctcacttagtttaagctcattttgccctgagtttatctggtagcactttattttagcggacaaggagggaagtggggaaaggaaaggaattataaaaatacaaggtagacgtgcacaagaaccttcgttctattattatttagtaaagtgagaactggaaacagcttaacgtccagggtaagttagtttcactcactcgacggaatgtatgcagccgttaatgtatttctgcattttcccatatttccagtgaacatacagtactttcgcaattcggagtacaaacgaaaaagggcgagagaaggtcgcattttgcctgccggagctaggggcgcgcttgccggttccaacgagttttcggtgtcggaaaacttgtctttgctcacattctcggattcccgcggccgcagaagccggaggcgggacgtgaagggcaatgagcaaggtaggctgtgtcactgccgccgcgggctcactcgcagcgccagccgaggagcgccacgggctgctgaacccctcggcccgacccacgcgccgagggctaggataatgcgcctgcgcggccgtcacgtggtgagggctccgcgcaaagcgggttaaaagtcacgaccgcggagagcccgcgagcgtcctgctggtcggtgcggcgctttccgcgtcctttaagacgagtttgaccgaggccgctccgcagttcccgcccctcggcccagctcagctccatgaacctagcggagccgcctagtaccctttctcgccgaccgcacaggcgcgcgaaaccgcgtctttcaactgacaatgaagccgtagccgcgcagctcggccactccgggcgaatcggcgcgaggccgggatggtgggggggagggggagacggttgggtcaagctccgccccagctcgcgcccctattggtgggcgcagcggttctgggcccgccccctaacggacctgtcgctttgtgacaggcggaggggccagttcctgtcgggccggaggcggagtcagaggttgcttgagctccgcccggactccagggggctcctccccctgctcctttcggctgggcgggcggcgggctagagagggaatgtcattgcttctcagagccgtggtgccgcctccgtctgctgcttctttcctggcgccctcgtcccgtcggctttcgccgccgccgccgcagctgcactggggatacggatggctagtggggcgccggggccatctgggttgagagagcggcgattgcggccgctgctgaggcggagactccccgccgccgcttcctccacccccagtccgccggcctcgcggcgctgagggcgggagcgcgcagagctcttccctcctcctttttcttcctcctcctcctcctcctccgggtccccgcccagcacccctcgcaccaggcggcggcggcggaggaggagagctagacccgccgccggggcacaacatggcggagccctcggccccggagagcaagcacaagtcgtccctcaactcgtccccgtggagtggcctcatggccctgggaaacagccggcacggccaccacgggcccggggcccagtgcgcgcacaaggcggcgggcggcgcggcgccgccgaagccggccccggcggggctgtccggggggctgtcgcagccggctgggtggcagtcgcttctctccttcaccatcctcttcctggcctggcttgccggcttcagctcgcgcctcttcgccgtcatccgcttcgaaagcatcatccacgagttcgacccgtggtaagtgcctcgccgcccctcccccgcccgtggcccgcggggaaccgggacccgctcctccgcccgccgcagctctcctcgacttggccccgcgccgccgcggagccccgctcgcgtcctggctgaggccggcgcggatcccggagctccgggcgcgccccctgcccgtgggcgaagtttgccccgtgcagcctgaggcggggcgtcggggtccaggagcgaaaccttgattctcggccgggctagtgtgaagactgccaggagtgtggatgcagccgccgggagtgtgggtgcagccgccgggagtgtgggtgcagtccctcgcagcccgctttggtcgctgagtccggacccgccacgcca

SEQ ID NO: 9830 - DNA, 6000 bp, Homo sapiens
gcatgcccagagacatgtctattcttatgggtgcacacgtttgcacatgcacaaatgtgcaacacatctgtgtgcaaaatatgcacatatcacacatatgtactgcatggattgcacagtgccacatgtgtgtgcacaccaacccatatccacacatgtgcaatatgacacactatatatttgcacatagatgtgcacacacatgcacatacacactacacacatgcgcacatcacaaggggacactcggaaacacattcacaggcacccacacccttggctccagcctcaaaagtgtctctgtgtttttctgcgggactgtggggacactgccacctccagaggcctgaccccctcctgtcactctcactcttttgactggcttgttttgctcattgcacttggcaccctctgcatccatctgattccttgttggcactctgtcccctttcacatggggaccttgtctatgtctcccagtatccctcctcccaggtctaggctggcatgaagtgggtggcacattgtgaattaatgtctgtgagtgtgtatacaagagaggagattactgggaagggtgacgtggtgaggcgggcttgccagtgcagggtgaccctgagggtgtgcccagtggcgtgggtgtgtctgtgattgtggccaggcggggcaccctcggaggggagggttcggaagtggaatgcgaccccccagcctctttcccctaggggctgtaatctgatccctggggactccccccctagcctcccgccctcgccctcactgctgactcctcttccagatcctggggcagagtccagggcagctcaaggctcctccacacacacacccgctgaaccctgagcaccctgagctgctgagatggggcgggccggggctgccgccgtgatcccgggcctggccctgctctgggcagtggggctggggagtgccgcccccagcccccacgccttcggctctccttccaaggtaggtgcacctggcaggcgggagggcccagcttgaggtgggcaggaaagggtccccgtatggccagggggctctgtgttggctgttgccccatgtgcgtgcctgtcaccagactctggtaggattagtgggcactctcaggccacctccagttaaccctgtccgggcctcagcccccagcctctgcccacattctcttcgtgctttctcaggaagacccctcctgtccccacagcaacagaccttgtctctgttccgttcagtacccccaacaaggcgatactccttcagcagagcaacagggaagtcagagcccccttctcatgcctcctgtataggagggtggcccctgggcagtggcagtgaataggcagttctgctgagctcaggctggtggtggagtggcaggaaaggaactctcagcctgacttttgggagttggggttctggccatccctgcatgccagtctcccccaggactctggtgtccataagccttgcctcccagtgcgcccgcctggagacaccacctgtctgagcatgcccaagttcaacctgccttcctcttcctggggggatgtaccacctaccctggcagctccacacgtgcacctgggtgggcttgggtttgcgtgtgtaaactcacacacatgtaaactcacatgtgtacaggccaggtcctaatggcaaccttggccgatagagtcaccaccaggcaggacctgggggaggcttccagcatggctggcgagtcatcagcagtgtcctgccctgcagagctccaggcctggcatggtctccagactttcagcctggagcgaacctgctgctaccaggccttgctggtggatgaggagcgtggacgcctgtttgtgggtgccgagaaccatgtggcctccctcaacctggacaacatcagcaagcgggccaagaaggtgccagggactcccaaccccagcactccccagggaaggagccctgggaccccactccagcctggagagacccagaggaatggctccctgaggtagagaatatcccaagttcctgacctgtgtcccctctcccccaacctcccgatagctggcctggccggcccctgtggaatggcgagaggagtgcaactgggcagggaaggacattggtgtgagtgccagctgcccgggccgggagtggggagggtcagcccctcaccccagagacagggcagggctaaaacagaggcctgcctgttctggctgggatgagggcagggaggtcgaggtggctgaggtctgggggtggtgagtcagggtgggggctcgtgtaattcttctggggtgcctctgagtcatgggaggctttgcaggcctgtgcttccccagacacccaccctcgtgaggcctgggctggtcagcaagggcccccaggtccctgtagcccatgttagtacttgcctgggctgatgccgaagagagggaggggtgaggatgccactggtgagctgggacctcttaaggctacgtccctgggggaagcctcacacctccaaccctactagactgagtgcatgaacttcgtgaagttgctgcatgcctacaaccgcacccatttgctggcctgtggcacgggagccttccacccaacctgtgcctttgtggaagtgggccaccgggcagaggtaaggccggatctaggcagggagggaggtcaggagggtaagaagggcctggtagtcacaacttgccacacctcccaggagcccgtcctccggctggacccaggaaggatagaggatggcaaggggaagagtccttatgaccccaggcatcgggctgcctccgtgctggtgggtgagtccaagggctaaggccccaagagaaccccttagaaactctagaacctcacaaagtcccaagacccccaagagctccagggaatcccccataacctcactcactcccagagctccccaggccctcctgccccaagagccctccatttgcctgagtggcccttgctctgtctgcaggggaggagctatactcaggggtggcagcagacctcatgggacgagactttaccatctttcgcagcctagggcaacgtccaagtctccgaacagagccacacgactcccgctggctcaatggtgagaggctggtggggttggtgggtagaggtcgtcaccctcccacagggcaggtgccaagcaaggcccataaagtaagtgagcagtgggtgtggccaggtcttaccaaataccctccttaatcaggcactggcgtcacagagacagacaagacaggtatgaccgtgacctctttgagttcacagatcacatacatgataagatcaagtccaatggccttgaggccagagagagacaagggaggaagggaaaaggagactgggtggctggagggggttgggtaaaggaagccgctgtgctgaggggagtatgagctaattcccaagcacaagacagctagccagcaaaatttagggatgagcattccaggcagagggagcattccaggcagagggagcaactagtgcaaaggcctggatgcaagaacaagcaaaggaatagacttgcagagctagcaatgaaaagggggcctggactgtcaggggccagagtcatttattctaagagtcatgggggctgggcacaatggcttgcacctgtaatcccagcactttgggaggctgaggcagacagattgcttgaagacaggagtttcataccagcctgggctacaaagcaagacaaaaaataaaataaaattagctgggggcagtggcatgcacacacctgtagtcctggctagtcaggaggctgagatggaaggatcacttgagcccaggagttggaggctgcagtgagccatgatgctgccactgcaggacagagcagaccctgtctctaaatcaaataaaaattaaataagggctatgggctggtgggcacagtggctcacacctgtaatctcagcactttgggaggcggaggcaggcaaatcgcttgaggccaggagtttgagactagcctggccaacatggtgaaaccctgtctctactaaaaaatacaaaaattggccgggtgcagtggtgtgcacctgtaatcccagcactttgggaggctgaggcgggcggatcacctgagttcaggcatttgagaccagcctggccaacatggtgtaaccccgtctctactaaatatacaaaaattagtccggcatgatggtgtgcatctgtaatcccagctactcaggaggctgaggcaggagaatcgcttgaacctaggaggcggaggttgcagtgaatggagactgtgccactgcattccagcctgggcaatagagcgagacttcgtctcaaaaaaaaaaaaaaaagccaggtgtggtggtaggctctgactgtaatctcagctacttgggaggctgaggttgcagtgagccgagatcgagcactccagcctgggcgacagagcgagactgtctcaaaaaataaataaataaacaaataataataataataataataataaagagcaatgggacccagcagaaggatttgaagcaggagtggggagcatctggttatgctagagaggaagattcatgagtgaaggtgaaaccagattacctcatctccctcctaccccagcctaaggtgctgggcgacgtgtggggcgagatcggaggctagccgggcttcacgcctgcgcccccaggtagccacggtctctgctgccccctcgcggctgcttcttgcctcgcaggccctgatcctttggattcggtccgcgcagagcgccaactggacatggtgctagaggttgggtggtcagacactgtgatcccgggtgctgtgcccgcactacgggaaggggaagcagcgcgtgggtctcgcatcaggaggcaaggccaggacccgctgacccatgcctcctgccgcggtcagagcccaagtttgtcaaggtattttggatcccggagagcgagaacccagacgacgacaaaatctacttcttctttcgtgagacggcggtagaggcggcgccggcactgggacgcctgtccgtgtcccgcgttggccagatctgccgggtgaggagtccctgggccacacccggcgaccctgcccctacccctttgcctgccctggtctcgccctcatcccctttgatcgtcccggcagaacgacgtgggcggccagcgcagcctggtcaacaagtggacgacgttcctgaaggcgcggctggtgtgctcggtgcccggcgtcgagggcgacacccacttcgatcagctccgtgagtgcgggagtgggtatggggttggggaggggggcagcggcgcagactccgggagcccccgccgcagcggggctgtgcgccctaccccagctaggccccttccccgcagaggatgtgtttctgttgtcctcgcgggaccaccggaccccgctgctctatgccgtcttctccacgtccaggtgaggggcaggaggtagggagcgcccggggcgggccgctgggctccacccggcccctcacctcgccctggtcttcgcctccagcagcatcttccagggctctgcggtgtgcgtgtacagcatgaacgacgtgcgccgggccttcttgggaccctttgcacacaaggaggggcccatgcaccagtgggtgtcataccagggtcgcgtcccctacccgcggccaggcatggttcgtagcccagggacttctgctacaacccacttcaaagcctcaagggtttgagaacttggcctggggtcttcttggtgaatgtggtttcttcctttagttatgggtgggaaaacgtttccatcataagacaaggcttgtttcccgcctctgacttcctagggcaaggctgatctcctctctaattctcagggcagggttctgtccccatccccctccatgttcccagaggctgggcatggagggctgcctatcaagcccccatatctatatccctgctgtgcctccctttcccccacccccag

SEQ ID NO: 9831 - DNA, 6000 bp, Homo sapiens
atcactggtggcctctgggctctgcctaatagggaacatattgccctgataaaccttagtatgaacaagagagagagagtagggaccctggagccagctatgcctctactccactcctttttcctacctgcagtgtggccctaatcaaacctcttcctgtctccaaccttgtgtcctcatccatgagatgcagagactggtcgtgcattggttatcattgtcaaggcggagggagatggtagacatgcactcctggtacccagtggatgggggcattgagttggacttcctttgagctgctgcaggcccgctgcaggggttgctgttcaaagggcccagtcacggagagggtggcgtgagcagcccctctcattctgcacccagccgcactcgtaacacctttgtcatgtcggcttgcaggggcttctcaggctgccacagggactctgtggccaaggctgccctgatggcaacaggcagtggtggcagcacccaggtcgtgtccattttgctaaggacaggtgaagcttgggaatgacccgccgagctgaggagtcagggcaacttgtcacttgccttccaggcctgtcctctgatggggccctgcctcaccagccaggcctggacagcccctcactggtcagcttgggggctggggctgggtgcttctctgtggtctgagctctgtgtgctccctcaggtgcaggccaatgtggagaagtcgctgacactgttcgggcagctgctgaccaagaagcacttcctgctgaccttcatccgcacgctggaggcacagcgcagcttctccatgcgcgaccgcgggaatgtggcctcgctcatcatgacggccctgcagggcgagatggaatacgccacaggcgtgctcaagcagctgctttccgacctcatcgagaagaacctggagagcaagaaccaccccaagctgctactgcgccggtgagcctggggggcactggggttgggggaggcaggcccatgcctccagctttggacaggttggtctagcaggcccagagacgttgctgtggcagttcccaccgggcaggggtgggaggactcacctggcctctgaggctcagctgccacctccctaggtactgatagtgaggacccaggctggagtctccatacacacaggcctgggctctgggcgaaggactggggtctccatggcagcccctgaagcgcctgctgcccactcatgtgggtgcctttcgagacctgaccttcggtgctgtaggaaggggggcagggtggggtgggatcggtgagtgaggcctgcaggggccctgtgcctgctggacagctggaatgacaccactctgcccatattctgtgctccccaggactgagtcggtggcagagaagatgctaactaactggttcaccttcctcttgtataagttcctcaaggtaagcagaggcgggaggaagcaggtgtcagaggcaggtgaacagcgggaggggaaaacggagagaggtggggattagtgggaggtgctggagaatgacagctggtggggtcttggtcgagttctggcttgggccaaggcccctgggcatgcagccgctctcagctcctggctcccggctccctcctccctccttctgaggctgtcaggccctcacacagcccaccaaggtaggtgtgggagttcggatacaggctctcagtgcccacagctggcctgggctcaggagggtgggggcaccctgggcaggggcctctgaggggccagcctgggggtgcctgaaggctccagtccaccacctgtcatggggacaggtgaccgcactgggcttcccctgtgctgtccattcaagcccctcccaccccccagcagaaggatgctgccgtcctcagaacaggaacagggtgtaggccagagactgcaggccagggcccaggctggatggggatctgggtgggctttatctgggcagtaagcagttgaattgctgtctgcactttcgatgttgggacttttacagactcaggtatctggcttctcttggaaatctgaaggcctggttagcccactcctgagaggtgggaggagcccggtgtgtgcatggtgaagtgcatgctcctcgcctggcttcagtggtccctgtcgctgctctgtgggtgagggtgactgacagtgtagcccagtgatcgagggtgggagctggcactgactgcctgggttcgattctcctggtttccttatggaatccagggatggcacctctgtctctgggccgtggggctttcaggcctcctgcagccagatgctgctgagctcaggtgatcagcgcacagatgcctgcacagagcggagtcctggccagacatcctcgctgccgggagagacactggacgggaaatacagcagacaggcaatggggcagggccgagcagggagggtgggattcgagcagaggtctgaagaccaggcggggggagggaagagagtcccaggcagaagaggccactggggagaaggccccaggtgggataggcaggggctgggcttgtctgtcctgggtcgtctctggaggtgggacatttatgtgtatatagcagtccctggcacctagtaagtgcccagtagatgataacatccttaggcagaactggaagcaggtaacacaaagtcgtgcgtgtcctgtagaaagtacagttctatgaagactgcatagtatgtgtgcatgctgggtaagctgggctctgtgagcctaaagcagcaggcgtcctgggtgaggtggagagggcaccgctaacctgagtccctgtctgatcccgattctccacacccacagagacagggctcagggcagcaaatgcctataagcaccgacgttgggtgtggattctctttcatgccaggatatagggggccagcttcagccagcgcagagtgtggccccacagggtattataagcagagagggtggcagtggggcactgtggaggggttgtctttaggccggatcagacattccatggagagccggggacatttgggacaggcgctgagggatgtgtgggcagtggagggagggagagggaggccagtcttggccaagggagccataggaaggggacacagggaggagggaggcaggggtgaccatttgggtgggagtggtgcaggtacaaggggtgcgggctgtgtgttgggggcttcacagcccatgcccatgaccccagcccaccctcgttgttagtggggtaccagtgtcgggggcaggcaggggccaggagctgttagatctccttaggtcatcactgccctcctccagttctaggaggacccctatatatgcaagggaggacacgtactgggcgcaaggacatggcctgaggctgagaggcgcagacagacatgctggagctgggcgccccctggatgggactgagatgggcctagggctgtttccatccacataactggccagtgactttttgtttttgccaccatatctggggtttttttgtttttgtcttttttaagatagatgttattgtttagagcagttccagattcatagtaaaattgaacagaaggtacagaggtttcccatgcgcccgctgctcccacacatgcacagtctccccactgtcagcatccctaggagaggggtgcatttggtccagtcagtgaacctgccaggagacatcttcaccacccagtgcccctcgtttctgtgcgggctcactcttggtgctctgcattctgtgagtttggatgaacgtaggatgccatgtatccaccgttatagtgtcacacagaatagtgtcgctgccctaaaaatcccctgagctcacttgtcatctctccctccccctgagcccttggcacccgttgatctcattgtctccataagttatgccttttccagatgtcatgtagtggaatcgtgcactgttaccgtagccttttcaaactggctcccttcacttcgtaatctattttgaaggttcctttatttattttcatagcttgttgctcatttctttgtagtgtgccacaaacttaaaaaaatttgttatggtgaaatacacatgacataaaatttaccatcttaaccatttttaagtgcacagttgagtggtattggatgcatttacagcggtgttggccatggccacctgctccatgactcttcatcttgtgaaactgaaactctgtccccattgaacacccactccttgttccttcctccccagcccctggaaccattctactctctgtctctgtgaatctgacagctctagggacctcatatgagtggaatcatgcattgtttgtcctttcgtggctggcttaatttcatcagcttaatggggaagcaatccaggtgtccatcgacagatgaatgaataagcaaaatgtggtctgtgcatacaatgagatagtagtctgccttagaaaggaaggaaattctgacatgctgcaacatggatgaactttgagaacacaaactctttttaaacaacccaaatccttttcattccttgctgtctttagaaacaaaaactttaactagaaaaggaacccatgccattttagcacatgtaaacaacctggaagggaggatggagaagtgcttgtcgtaatgtcatttattgaactgcccatattatccttctatttgaaaagtggcactttttgttgggcagtttttgcacattcctgagtggggctgggaggagtctgaggtcttccttttccccgtcactgcacgagagattgaggctgcgacaagaaaaggactgggccttcctcttccctggcctctgagctcttggaacctcctttgcagcctctaggctggcctggctgaagaagtgggtggagtggggcggggcctgctgcctgggttgagtgtgaatgcccggctcagcctgagccttctctgggtacacctggcttgtatggggcaggtgctttggggtcagctggatctgggttcagatcttggcttctccagtttcttgctgtgtgaccttgggccaatatctgcactgccctgaccttcagagactagctgccgtcctttcactctctgaggccaggcctgggaaccctcggacaggtgtctgactttgggaaaccctcaaaggcttcctgtcacattaatggctctccatccggatctgcaccccttttcctcctccttcgtggctaacttaatgaaaccaagtttgcaaatgaaacataatttcatagacagacatgttgttggaaggtctgggatggtcttaacagctgtctctctaattaccgcagatgctaacgaggtgcctggagcctctggttacaggagcagagctgctgtttgtttgccagggccgggtaggaggcagggctgccaaacctgcccctccattgaggtgtacacacacctgaaggcccttgggcaggcaggacctacagtggaccccatgcccaggctctgggcgggcctcgcctgtgtggccaactcacccagcccagacgtgaacgtttcccagggacagctctccattcactcaattcatccagcaagtgtctgtgatgccccatgcacaggctcagccagtgctagcagtagggtatagtgagcaggccaggcagctcccactccagaggggttgccaggggtgcacaggatccttcagagaacgacagatggcggggagactcagcgaggcagtggtcgggggtacgtgtgctgggcgctccccaggagcctttctgaagagggcacattgggttgggtccacaagggcccatgaagatgccaggggaaatttctggttgtagaggcagcagttgcaaaggccctgaggtgggacaggaggcggttctcatgctacagcgcggggagccggagggtgaggggtcaggtgcccgctgagggcccggggctgtgctgctggccctgtgctgtgtgcttgggtgctggtgaacctccctgggtgggcaagcctcctcaggtgggtatgtc

SEQ ID NO: 9832 - DNA, 6000 bp, Homo sapiens
ttcacagaagccacagcagaggaggtcagtggtcatattggttagatggtctgcctgacatgtcatctcggaatggtccaggaagatgtagcaggtggtcctagctatcacgtgttagaaacttgggaacagtgcttttgagttctttagtttcaccttttcctagattcacttgctttttagtcatgggaggagtaaaagtgaaagttggaagatttgttctatgaaaggaaaatcagggagcagaacctactcctgacagcatccagagacacaatctggagatgtcacacctgcagcaccgaaactcaatgtcaggcacttggggtctggatggctcctgagctgaactacagatttgggccacctctctaggctcaccatccagatctgggtccagaggacagaattattacctttgggttaaagtgatcccttctcaagtttttatttaatgtgcttttaaaaggcaaaccccacataccatcagtttggttactcttcccattccctcagctaccaagttattttggttgaatagaagctttcctttttgtagggtgtcttcatttcttacatctcactctatttcactgttaggcacaagggaatggacacatttgacaagttccacagtactagatgggtcctctaagtacagtctgaccttcagtttcagctttcctatttaatctgtcatgtaaaattaattgtactccaaagtggccatcaaatacagtccctatttgactttttgttgttgttgagacggagtcttgctctgtcacccaggctggagtgcattggcgccatctcggctcactgcaacctccgcctcccgggttcaagcagttctctgcctcagcctcctgagtatgggattacaggcgcccgccaccatgttcggctaatttttttgtattattagtagagacagggtttcaccatcttggccaggctggtcttgaactcctgaccttgtgatccgcccgcgtcagtctcccaaagtgctgggattacaggcgtgagccaccacgcccgactcctatttgacttttttaaaagtgctcctcagagtactgataccatgaccccacactgcccacagagaccctgtctctggaagtaatgccagcttcctgccagtagaagcagcgtgagttgccaggcttccattatgggatggttatgctgtcctggaacggcagaggttatcacttgtttctttttttcgctttttagttttttaacgtaagtaaatttcttgctgatgtctaaaacttaggccttaataatgcaccacactccccgccttcctctcacttgttactctgttgtctggttcttagattgggtccctttcctatatccctcagtccctcagtaagctcactccacccctaggcctgcctccctcaggagcatctcctggcagggtgtcatttggatgggaccacatggtggacgcaagcatatcctctgtacttgtatccttggtgtgagaagcagagagctggagcctccccactcaccagccaagggcagcctgcacttcatagctgttgaatgggtacttgtacttctcaagattgtccaggaaagtagatttgccagctctgagccccctcttcagtggatgacccctttcagctagagttcagcagagtctgcttttatttttataaattatcatcgttccacacctctggtggccactgactcatgtgcctaagaaatgagaccaattaattttaaaaagtggaatagtggttgggtgctgtggctcacacctgtaatcccaacactttgggagggtgaggcgggaggattgcttgaggtcaggagttcgagaccagactgggtaacatagtgagacccccaactgtacaaaaataaaaaataaaaaattagccaggcgtggtagcatgcctatagtcccagctattcggaagtctgagataggatcacttgagcccaggaggagaaggttgaggctgcagtgagctgcaaccacaccactgcactctagcctaggcagccgagagagagggaccctgtctaaaaaaaatcaaaaacaaaccagaatagcccgtttctgtagtttgaattctctacagaagagaagggagggatgagaataatacatgctgtatccctgtggctatgggcaccatgagtctaataacttaagtttgttttcctctttttatttgtctgctaagaaggctagaagcaaattgagttgcctgttcgttccttcatatatgtctcctcctctgccaacaggaatggaatttgaaggtgctatcatcgcacttttccatctgctggccacacgcacagacaaggtccgagcccttcgggaggcgttctaccgccagaatcttcccaacctcatgaatctcatcgccaccatctttgtctttgcagtggtcatctatttccaggtgtgtccagatccaaccccagggagtttccatggtctggatttaagtttcagaatgccttgtgtgcagtcccccactctgtggggtgcactgtcatcatattgtgttgaaacgatgagatggtatttgaaggcagcaggtttccagatgagctggacaagcatgttcattgagtcatgggacctgccattaacgaaacaaaattaaggcagttctaacgtaagtgaaatcatgttcttctgggttgggcctatcgacaggtaagatacatttttaagttcttagttcaagagaagcaaaaagtactctagctctgaaacctcattgctctcttatagaaagtttgtatgatatttataggtaacttctgcatctcggaaacggcctatcttcttaagctgtcttacctttaaaagtattccatctcttaaacttgcttctgagtaagagacctgaactgctattgttttcctgtaattggattgatctttgtattttttgatggtccactttgtattttggtgtttatttaaaagaagggacagagatgaaaggcagtttgatgtttgtgaaaggtatttatacgagctacatgcttttcccattccttctgctgagactaagccacattcttgcttaataaaaagctatctctttaggggctttgccagaatttgcagtcagatcattaagaattttttttttttttttttttttgagacggagtcttgctctgttgcccaggctggagtgcagtggcgcgatctcgactcgactcactgcaacctccgcctcccaggttcaagcgattctcctgcctcagcctcccgagtagatgggattacaggtgcctgtcaccacgcccggctaatttttttttatttttagtatagacagggtttcaccgtgttagccaggatggtctcgatctcctgacctcgtgatccgcccgcctccacattacaaagcgctgggattacaggcgtgagccaccgcacccggccttaagtatttaatttttaaatcctctgtattccgagccctgttctaggtactgggagctcataaaaataaaccctttctagtctccaggggtttcagagggagaagttgtattcctagaaaagtttagcttttctgtttatgattaaaaacactgtaaggaactattataaggtgtgaggccactgctgtagtggccctgcctcagagccagtgtaaaagcttaggaaacatcaccagctagagagaagcgcccttgggatttgggtgtgtggcctccaggcttttctccatattccacacagatgtggatgtaatgtgataggctctgtcttttggaaaaaaaaaaagtgggggtggggatcattccaccgtgcttgcttccatgttttgttttgtgtgagacagggtctcgttgtgttgcttaggctggaatgcagtggcatgatctcggctcactgcagcctagacctcccaggctcaagtgattgtcccacctcagcctcctgagtagctgggactacaggcgcgcaccaccacacccggccagttttgtttattttttgtagagacggagtctgactgtgttgcccaggctggtatcgaacttctgggctcaagcaattctcccacctcggcctcccaaagtgctgggattacaggtgtaagtcaccacgcctagccttcagtgtatttttaaaccagcttttctgggccccttctggatgtgccaagtgcaggagtgcagtggtgggtaaggagtgggcacaagctctcggaactgggagccccagaaccagcacacaggatttcctcccttgtggcccactggacagtccccggccgggctgtgtttctgtgcagcaggctgaaatgaggcagtgaaggggatttggttctgtttggcttctcagggcttccgagtggacctgccaatcaagtcggcccgctaccgtggccagtacaacacctatcccatcaagctcttctatacgtccaacatccccatcatcctgcagtctgccctggtgtccaacctttatgtcatctcccaaatgctctcagctcgcttcagtggcaacttgctggtcagcctgctgggcacctggtcggtaagtaggctctttgaagatgagctagcaatgcagctaagttgcagtggtttctatcagtgtcttgctcatgaacagatatttcatccaaagatattttccattgtgccttttacaaattcagcacattaaattatcttttcagtaaaaaaattgtactgtgggcaccgagtaaaattgcattctttcatctgctcagaactatttttgccttgatgctaaagtaaaatgaaggagcactcacatgcgtttggtttcttcttccccaggacacgtcttctgggggcccagcacgtgcttatccagttggtggcctttgctattacctgtcccctccagaatcttttggctccgtgttagaagacccggtccatgcagttgtatacatagtgttcatgctgggctcctgtgcattcttctccaaaacgtggattgaggtctcaggttcctctgccaaagatgtaagtagaagcaaaactttctggaagggtgatgaaagtgtgactggtataaggggtgtggacttgtcacctcatcataaataatggtctgtgacgtgtgcagatagatcgtcgtcctttagggggcagttcagaagctttaagggctgacagatggagtccagcagtagatcagctgtgggtatgagaatctgaatccacactgtaaagttagactttttcatatgacttccttgcggcagttttaaagttctctgtatgaatattgtcagtgctcgaagaggcgatctgtaactgttcagtaccacttggaatgcctatttccccttcagcctccaattccaacttctcccctgtgggcaccctgcaggttgcaaagcagctgaaggagcagcagatggtgatgagaggccaccgagagacctccatggtccatgaactcaaccggtgagtggtggccccaggtccccaacctcccgtctgtggacatgtgttgtttctttccatgcagggcatcctgataggccctagcacttactgggtcactaaatcttatccttgggttacaggacagaattaaatgttatatatttataaacttgctaagtgctggacactggagacgtaaaaataaacacttacagcccctttcctccagagggagccactgggtaaggagatggaagcatgtggccaggcggataggagacagtgcagtaagggtcctgagagcaacagctgtgactggcagcgggaccctcaccctggctcatgccggtggggtgctgaagagagcgccctggaggagggtcactctgagctcagagcaggcaggtcctggcatctgagcgcattttggggcctgtggtggcattaaggctagagaggctggcagtggctgggcacggaaggggttgatgtgcatctgaagcagggcagaagggatggagcctgcagtctcttaggaaggtcagtgct

SEQ ID NO: 9833 - DNA, 6000 bp, Homo sapiens
aaccctgtctctactaaaaatacaaaaattagctggacgtggtggcgtgcgcctgtagtcccagctacttgggaggctgaggcaagagaattgcttgaacctgggaggcagaggttgcagtgagccgagatcatgccactgcactctaaccaggacgacagagtgagactccgtctcataaataaataactaggttataagacaaattggtcttttagcagaattttcagatataagcaggaaattctttatttcagtgagtgacatagatttatccagttaatactcattaagtagtgggggtagatttatagtaggttattaaaaaacaagtaatattaaatatgtatctcttagcatcagaagttgtcagggagaacaattgtatttttgccttagaatgtagttttgtgtatctgtcaaagatcaaataaccaagttgacaactgaccttactcagtaaggcctcttaggttatcctggaccattgaagctgctgcagtttgtttttctccccctgttagacatagggagtttttctcctgtcagtgctcagaaaggtacttggctaatgctcttctgaatttcaggagaggaaagcctcctacttaaaaaatatctgctgtatttagtactatacaaaatagtcatacagacacactttcaacttttaatattaatggggtggtttcactttattcattttataaattatgaaggttattgcagctgtttgctagattttaccaggctcatggtagtaaagccatacatagtccatgaaaacataacaaaactttacaatttcattctgctttgttgcaaagatccatgtcccttgtacattttatgacttattcacatttcctttagaaatactcaacatttaggaacttaattcttactattttagataataatgtgctcatgatgagaataataatactaaaataatgatatatatcatcacataagcatcaaatgtctttgaatttggagattttcagcttagaaccactttaatggagctcttaaaagtcaaatgtgattttcatgggactgtactaaggtgtgataatggtaaaccatctctcctaagacaattaactcattcccccatatattttagatgctttatttatgaaatattttgagcaatgaatatgacatctgattacctctctttgtaattcataatctcttggactaatctttggactcagtagatttctttcattaccattttatgtatttattatttttttgagacagaatcttgttctgtcgcctaggctggagtgcagtggtgcaatcacagctcactccagccttgacctcctggtctcaagcaattctacctcagcctcttgagtagttgggaccataggcatgtgccaccacacccagctaatttttattttttgtagggacagggtctcactatcttgcccagtctggttttgaactccttggctcaagtggtatacctactttggcctcccaaagtgctgggagcctgtatatattcttagaatcaatttatcttacaacttttaaaagaactgagaggtaagatgatcagcaaataatatggagttactggaaattatttgattgttttttgaatttttaatgaactcttaaaatgacctgtagccttagttgatttaacaggaatcttaaaatcagattcacatttactattttggcctgaaatgagttccatgttctttttttttttttttttgcattagagaaaacaggcttgtgaagttgtttgtattactatccttttttcagattttaaggacatgtatctaagtgttcatctgggttctctaaccccctcctctatactgttatggtgttactaaaattttattagttataagtaactttacttgacactttcttcacatttccttcctggcttccttcctttccctcctttttccttatatgcttaaatctggaggaaaattttgttctgaattatatattttttaatcaatattgcaaacagacaactgtaaacctcaagtttttgttaatgaagtacttgaaaatatgattttttatttttttgctattatggttagaaaatagcgataattttttaatgaatggctggtgaaatgcagcagacacagtgcaagttggtggcatggtatcattgtaaaggttaaacagctgtgctggaaagagtcattttggtttagtccttttaatttggaacttttttggcagctgaattccaggacagactgtctatgacactttaatatatttaacatattttcaaaaactatcagaactcaggctaaataacctaaaccactttgacttcatactgggttacattttgcttgttgaaaaaaacttaagttggtttttaaaagaacaggctggtctgcaaaaaggtgatgaagaaatattagcctttgttggaagttgagaagtattatataaaccttagactgatattgtagaatggcttctaagactgaaaaattgtaggcatcctgttttaatcctctgtaacccagccatatgcgtcaaactgagcactcctaatacctgatacttagaaaaaagagtaagagagctgtttttctgtgtacaaatacacaagtgacacctagtatctatccctctattcccccagctctggtcttagggaaggggggtccaggcattttccacctggagaagtaggtgcctgacagcagatgcaacattggtgacttcctggactgtggcttgtcttcaaggcaccctgccaagacttcggtgtcgggggaactagagaattagggtaaaatttcagggcctcacctgtacaacatggtcataacattaacaccagctactctgacatctgtcagatcatttatttaattaacatcccttttctctgggccaccaaagcagggctgcttttcactggcccatcttctttgcatgtatttcaataaaagtttgggggctattgtttcattgtcatgtttccacctaaaacctagtctgaggaatagggatctacttatttttgatgcacatgatttattttagtaaagtggacagattttaatgacacttaggaactgaggcttttttttttttcagtcatggttttacttgtagaaagcgatctgtattttaaacaaaaaaacacttaatctttgaattgaaacacatttaatatgacagttaatttcttcttttccaaaggagaaaatcacaacagaactttaagaagtctcctatgcaactggatacaaatattgttgattcatggaacgtgatgcctctgacattaagggtaatagttattgttttgggtttaaaacttcaaggtctggctcctcattttcagggaagcctcttgtatctgaatagtgtttctggaattgtgctttgatcaggtgtataaggactctgaaccaggaatgcgggctttactatacctgctctgagaatttgtttaattactcagcttctctaatccttgctttcctcatctgcacgatgatattaaattcatgggattgttatgaggcttcagtgaattcacgtttgtgaaatctagaagtacaatgcctggaacagagaagattctttccttttccccttttctccagcctaaattaataactggacttttaggagcagcagcgtagaggtaggactatatgaatgtcattacaataataataacaaaactatttagatataaaatttcctgcctcctcttttgtaactttcctatgcacatcattatcccttttcactattgtttgctcagctttggtgtgatttgtaaaagctcctggttattaagggtataaaccttatgttaggcataaggctgtaaccttataaccttatgttaggcataaggttgtaaattttttaaagttttcctcttaacagtatatatggtattttttgtcatatagaaatttcaagttttgtttttatgttgtcaggtctattgtttttttccaaaaattgtatgacatatattgatttcagagatgttaaaatgtgaaaaaacaaagtcttagattcaatggaatagaataacaatcttttataggttctgcctttggtgcaatgtatgtgtgtgtgtgtgtgtgtgtgtgtacaaatatttgtaggtatgtaaattggtctcattttttgtacttaaaagatattattgcaaacatgactgggtatgggaatgttctctccagctaagaaaactctaggaagaatgtagttgcatagagcttagaagccctggcatttgcttcaggcattgctatgggatgctttagtcttggcttgtccgttgttgctagaatcacgtgctgccctcactgctgctcttgtccagctgccactgttactcaatccctcctgatagatatctctgtggtagcaacaattcaaaatttgccctgaggacaaggttagtatttcttgccagcacctgccactttcccttccagatcctgaccatgggagaagtgtgtgtgggtgtgggggtaggggaggaggagttaccaaaccctgtaaagcagacatcaaggtagaaggctagaatgccaggtaaaggctcataggacagagtgctataactacatcttcaccactatgacaaagttgtcccacccactctccggaaaagagttaatgttggttgaagatcacgaagcagttgtcctccaaaatgccccaagagtattagaatatgatagaagattgtttatttgctaatgaagacatcagaactagccgaatggttcaaaaataattttaaatactttatacattgaaacaaatcaagccactataataattaggagccccttgctctggtgcagggcataataatcgctagcaaatccttagttgatgacatcacagtaatctgagacagagaggtggggactgtagtggacacttaaagcaacattgctgtgtctccttggtaattcatgaatgacagttcccggcaattcatgaatgtgacacttctcggtcatttctgtgttttggcaggtactggtggctttaaagccagggaatcaaagtccttaaagttgtaattaattttcctgaagctgataatgagacctactgcgatcctttcacataagacaggtctttacacacaatttatgaaaacagaataattaatagaaaatgatttcaattgtcctctgtaatatttcattgaaataaatgttgtagagtggttttagctcttggcaaatcatgcaataataataataaaagagaagacggctgtgtgggaaagagtagttatttttaaatcttggtagacaaatgggacctgcccacttgtctattgagcacatctctgtaatttctcagaaattaaacagcatgaccctttgattgaatccaaagctggaagtttaaatagataacttcaaagtaattggcttgaaatccaaggatctattctgggatgctttagaaatttttattcccttttcacctcagctttaaaatatatataaatgtcaaggcttcagactttaaaactgttgctgttgtactccaaactattttcttataattggcactgttcaaatcctttttggaacaggatttgagcttgagtgagaagagaaggtagtttggaagaatcaagaagtatgtaacagtgggatctaaaaatctaaacaaaaagaggttaaagggacagatctgatgtatttcagaggagcaagagtagaaaggtgatacattatcaaaaaggtcttcatgcacatgaagtgttctattccagacttaggggattagctgttcttcatctctgctaagggcaaaataaaaggaaattattttgagacagaagcatgaagagattaagattagagaaggaatactttaaaaatacatgtttgttaaaccaagaacctcagccatctaaacaagagtaaatatgccaataattctaccatcttcgtctgattaggctat

SEQ ID NO: 9834 - DNA, 6000 bp, Homo sapiens
acctataaaaatggcaattttatatttcactgtgtttatgtttctcagtttttcccccagggatatgtttctgttagtgcagccataccatttaagtttttattctaaaatttaacttttgtcatttcttgttccagtgattgcagtaatagcggccaccctcttccccctttggccagcagaaatgagagtaggtgtttattacctcagtgtgggtgcaggctgttttgtagccagtattcttctccttgctgttggtaagtattgttattataaaattgacctcaagaaggttggtattgagcagttggactgtaatttggagcttcagtaaagcttaagaaaaattaatggaggtaaatcaagaaatatatggtactactttctgagtcaaatctcaaaactcaggcttggtaagatgtgttctgtctgcagaaaaaggatttaatacatctttaaaaaaattttttaataagattattttttattgacagatcataattgtatacatttatggggtacaatgtgatgttttggtgtatgtgtacaatgtggaatgtttaaatcaagctaattaacataattagcatattgatcacctttcttgcctatcatttattgtgagacatttgaaatttacttattttgaaatataccatacattattatatcttaatctgcaaatagatgtgctttaaaaattagttatggcagaggcgtttaatatttttgcagtggtagatcatttattagacataatactttcagtaaaacattttttaattttgacttagaacaaatgcaacatctaaataatctatgcatatatttaataaatgattctaaacaattgatttgccattttgggaaaaatcaataattttcacccaagtaccaaaatactagatgcaataaggagttaatgttttaaaaatcaaataggaaaacataagtaaatgaattttccgcatttctggatgattggggtctttcatagattatttgtttagaggcagggtcttgctctgtcacccaagctgaagtgcagtggtgagatcatagctcactgcagccttgaattcctgggcttaagcaatcctcctgcctcagcctcccaagtagctaggagtactggtgcatttcatcatgcctggctttttgtgggggagatagggtatcactctgcccaggctagtctcgaactcctgacctcaggtgatctgccctccttggcctcccaaagtgttgggattacaggcgtgaaccaccacgcccagcctccttcctctgatttggtaacctctggcagcagaaaaatcccctgctggttttgcatggaacacgggcacatttgtaggccaagaaacaatatctaagcctgtttgaatttagtgtcagtgtaatacctgcatcaagaaggaaaagtcataaactttgatctgacattagacataataaaattggtgctttttgcctttcaaattcctgaaatttagaaactccttggaaatttttagcaaaggtttagctccactgaatagaattattctacttgcttatttttaaattaaaccagtgttcacaatagtttatggttattatgtagttttgctgtttaaaatattgtttcttcagtagtctctttaaataaattttcattgtaaatatgctgtggatttaaatatgcattatgaaccaaatagtcttctgaattataccaggaaacaaacccaacattttattttgattctcttagaaaatgcaattccaaatatactttcaaataattagatatttcttttatattattctttgaagtctttatatatattatgtatatcgcatataatatatatcatgtatattatatatgaatatatatgatatatagatatatgatatatcataatattatatatcatatatatcatataatatatatcatatgatatgtcatatatattatatgatatctcatatttatatgaaatatatttttatatatattcattttttggagacagggtcttgctctgttgcccagggtaaagtaccatggcagaatcatagctcactgtaccctcaaactcctgggctcaagcagccctcccaccttagcctcctgaatagctgggactataggagcatgttgccatgcctagctaatttttttttttaaagtcagggtcttgaaatattatgtattggtcacaattatatctggtgtttctttgaatatgcattattaataatgccatttaaaataaaacctttggcagttttctaaaatctgtcgcttttagcataggaatgttattatagtacatgtcacagcttccccataattcttcccttttcactctcggtaatctagtgccacatagcgaaaaactgtaaaacatgaacattttgccataccatttgtatgtgataagaaattaggttagtgccatttctatattgctttttctttggtttgatacaagatttcatattatgaatcatctgtcttacaatcctgtaaaacctatcattgcatcataattggagaaaaaaatgtacagcctccttaaattcattatctctgtttatcagtggaatttattcttaaatcataattttaagcatatttaccttttccgtttataccacgaaagattctaatgtgtacaggagtctttcagaatatttatattcttgtgaaaataaaaattgctatttttaaaagtcaagacagctataacgattttcttccatttatacaaagcaaaataatggaagacacatagattagcttatttcaggctttatatgaaaacagtgacagaattgtctaaagaaaacaaaaaccaaaactcctgtcataattgattagtctgtaacattcacataatcatcatgaccttttaaaaaacaggaaaaaatcactcagctctacataattggtaaattcagagaaaactaaatattggggtttgtgataactcattactacaaattttaaaattcaaattccatttttctacagttttttcataatacagtgttataaaagagtaaaccttatgtatttaagtgatcttgctttcattaacattgtatttttcctaatattgagaggattggtctttaagcaaaaattacatagtttacctaactaataaaacaaaaaggtcaggttcagtgactcacaactgcgatcccaactactcgggaggctgaggtgagaggatcacataaagccaggagtttaagactggcctggacaacatagcaagaacctgtctatcaaagtaggtagataggtagagagagagggaggatagatagagagagagagattagataaataaatgatagatatagacctgtaatccctgcactttgggagtttgagcccaggagttcaagaccagactgggcaacttggcaagaccccatctctacaaaaaatacaaaaattagcggagcatggtggcacgtacctgctacttggaggctgaggtgggaggattgcttgagcccaggaggttgaggctgcagcgagtcatgattgtgccactgcactccagcctgggtgacagagcaagaccttgtcctcaataaataaataagaaaacaaggattaaaagatggaaactttctaatactggggttccttatccagggctaatttatcctttaggcatagtaaacgtgtgccttggaccaagatacatataggggtccacagaaatattttcatttttatttcttttaaatcagaagtagtaatgtatatacatgtatgtaatagcaaacctatacagtattttattcgtgtttatacagatgtacagaaaatatagtcataaatgtatagaaaatataatatttaatagtttttgtggagtaagtgccttacaaaggcaaaagggcctagggccttgggaagtatgatgcagccctgcttttccttcttaaaggcttccttcctaaacacctttcatctctttattttattcttttcctacaccatgatcttatgaatacttaaattcccaactgattgctatgtgtattgaagcataatatcacaaagtacataaatcagaagtgtatatccatgtaagtgtacacccagatggaaaaaagaagtaatttttttcagtgacattattgcattgtgacctcaagttcagagcaacattctgtgcccctagaataccgtgatagctgctaaactagtcaggaattttttgttttcaggcatgcagtggtgtaattatagctcactgcagcctcgagctcctgggctcaagtgatcctcccaagtagcttggattagaggtttagccaccacgcccagcactaatcaggatttaaatattaatatttaaggtgtatgaaatgtgcagataataaaactgttttcccagctttttattaacaaatactcccttctgaggcagtgtttgaattactcaattagagaaatttttctccccacagctcgatgcattctatttctcatcatttggctcataactggaggaaggcaccacttttggttcttgccaaatctgactgctgatgtgggcttcattgactccttcaggcctctgtacacacatgaatacaaaggaccaaaagcagacttaaagaaagatgagaagtctgaaaccaaaaagcaacagaagtccgacagtgaggaaaagtcagacagtgagaaaaaggaagatgaggaggggaaagtaggaccaggaaatcatggaacagaaggctcggggggagaacggcattcagacacggacagtgacaggagggaagatgatcgatcccagcacagtagtggaaatggaaatgattttgaaatgataacaaaagaggaactggaacagcaaacagatggggattgtgaagaggatgaggaagaggaaaatgatggagaaacacctaaatcttcacatgaaaaatcataatctgactaattttgggactgaatgaataagtacaagaggttggattttctatgttggctgattaccatattgaacacatggcatttgtagcattctttaaatctatctactgaaatgtatttgacattcaagcagttatattcggtccttcattttatagaatattggcactattattggtacagtttaaagccattaatatgttttatccatttgataattttacagtaagtaggtctcattcattttgacagttatcaaagatgtactttccacagttaaatttacattaatggcaatttttgatagttttatggctttttactgttagactaatcaaaaataactttaaaaggaacaaagaaactccaacatttcacattatgcatagttatgtagccatttcacagtttctttaagatgtgtaaactcattgtccttgatagtttttatttttcattataaaattataccaggagatttcttttaagattctgagttagcagagttcaaaactattttgtggaaacaagccaactagtaacaatgcagcaacacttctggtttagctaaattatttttccaatgtaggaaatccacactgatttgtacgtctgactgagagaaagatggtcgtctccagcagagaaagtgaacagcatttgttggaaggtgatggctctccctcctccctccccatttcattggcgtaacgtaaagtgtattctgtacataatttacaaataaaacattttattttaattgttacttattatttagatatttctcaacacttaaattcataaaattaagaccatgtaagggtatgtttttagagaaatggaagtttgagtaacccacagaacatctgtgatctttctacagcagcttcagttttgtgccaacattccatgtattttgaatatgagcaaaaactgatcttaagagcagacttaaagtagctttgtacgccttaatgttcattttgatttattttaaatctttacattcagaaatgagatactgtattatcagacca

SEQ ID NO: 9835 - DNA, 6000 bp, Homo sapiens
ttgttaggtgaaaatataggttaagatgacgtcattgtacttttaattttgatttctcttataatgagtgaggttgagtgtctttttatttttatttttatttattcatttttttgagacggagtcttgctctgtcgcccaggctagagtgcagtggtgcgatctcagctcactgccagctctgcctcctgggttcacgccattctcctgcctcagcttccagagtagctgggactacaggcacccgccaccacgcccggctaatttttttttattttttatttttagtagagacggggttttaccatgttagccaggatggtctctatctcctgacctcgtgatccgcctgcctcggcctcccaaagtgctgggattacaggcgtgagccaccgcgcccagccgagtgcctttttatatatttaagagccatttatatttcttctctgaactgttcatgtactttgcccacttttcaattaggttgtttattaaagcacctttattattttattttctcgctttaaaatcttttgattcctcccattttctgatattttaattttaaatcctagtccctttttctagactttacattctatgtttcaattccgatttcccagtacttttcaacaaccacccctgctatgaccagcctggtttcttccctctcccaggggcacaccgtgcttgccccttccgccatgctttcttttctaatgttcccctacttttctcctccacttatatctcctattttgagacagagattcatgtcatttcctccatttgtgtaaacttccttttaacctcaaggagacttctagaaaaaagaattaacttatagtttgtaaactctttaaaaaaatgataatcactaagaaccggcacaattaaaaaaaaaaaaactgctcaaacaaactacatcttcatttccattagagtttgacaagattgggatgctgtggacatgtctttacttacaaggtattttgttctcctgacatatttgaggaactacaaaaatataagctgtatgagaataggtggttttgtagctgatcaaacatgtgcacccaaagaatattgatttatggatcagtatcaaactaaaggtctctaataacatgtttcagaactctattctcaatcttgactgttcaatgtttatttactaataatttgggtgaaatcatggtcattaagtagacgtagttaggctgaaaaggttacttactatgacagaggacagccagcatgattcaaaatgatcttaataatttggaaaagtgggctaaaaccaaaatgtgaaatgtaaaaaggttgtatgtaggaccctgtgtttcatttctaaaattaactgagaaaagaatgagggggttctctcacaaggacaggtcattggatttagagcccacttagataatccaggatgatctcattttgagatccttagtcacatcagcaaagcctccttttccaaatacagtcacattcatagattccggggatttgacatgggttctttctgaggggccaccattcagcctactacaaagaggaacttgcagccgtcacgtgtgtcgctttgcatcccttgctctctcctcctcatagactgctaccttggctcagtgtcacctcaaaactgcctatttggttttgggaggtagaggggtggttaaaagctgagaaggtaagaaggaccaggtatgatcagactggctgtgaaggggattctggaacttgaagcagaggctttgggcaggaccagcttcctgtcaggttcaagtgttcccttgtcaatcacattctgtcctttggctgctgaaaaccttcccatggcatctcagtgtatgaaatccaaacctctccccacagttacagggtccctgactacttttttgggcctcacatttggtccttgatctctgctttggccacactggccttcgtcctcttggttcttgagcaagccaaggtcattcttgcctctgaacctttacattggctgttcctttggctgaaacactgttcctttctacttgcttcacgcttggttccttcgcttgaaacactgtttcttcccctcactcctcagttcatgttcctctcagctcaaacttccctccttctcagtgagtcctgaatattgagttttccccagtcaccctgttctcttatcatcacagtacttggcaccccatgaaatttcctggtttgtctattctccaccctcctgctggaatgtccgtcccgggagaataggagtcttgtcagatggattcattgctagcacagtgcctggcaggtagcaagtgtttactttgcaactccaggggaaagtgggattctcagacccatgaaatccaactaggatcagctcaagccctttccacatatacttaaaagcctcaaaccccaccacgcccccaggattttagcagaatctggagtggctcctgttctccagggcacctctgccctggagcagcttatctattgatccagacacgaatcttagcctgttcctcagctcccacaagaaagcccgtccttacagtagcagctgacatttacccagcagttactatgttccaggcacaggtccaactactttgtatgagctacatcacttcatcctacctaaaaagtaggtgaaatattgtgcccgttttacagatgagtcagctgagacccagagaggttaagcaaattacctaaaatcactcagcaagtaagggatagaaccaggattcacacttgggaaacttgtgtgtgtttgatcccaacacaggaaagaaaaaaaaaaatgagggtacagctaggcacttggtttaatgtagctcatgggccaaagacttaggaggccactaagttaagagtataatgctttaaaaatttgaaataatcttgatttgcatttataaaagtacagcacccagattaatgaatttgatagttccacaactttttttctgcatcagttttcatttgcgtattctgttcagtcttgagtattatattttaaaggagcttgaaattaaagtacctgtattatttttctattgctcccataacaaattatcaaaaactttgtggtttaaaaacaacacaagtttatcttatagttctgtaggtcaaaagaccaacatgggtctcactaggctaaaccagggtgtcatcagggcggacactctggggaaaaatcagtttccttgccattcctagcttctagaggccacctgcagtcctctgaggccccttcctccatcttcgaagccagcgagagctagtcaagtcctcctatcacatctccctgaccacagctgggagggaaaagttcactgcttttcaaggattcatgtgactaggttggactcctccggataatctccccatttcaaagtccttaaacgttaatcacatctgcaaagtcccttttgccatggaaggtaacatattcacaggttctcaggattaggacatggacatctttgaggggtgcattattttgcctatcacggtgcttgttgcagaagatccccaggatagtgaaggggtcaaattggactcagagagtcagactgaaaagaattaagatgatctccaaatttattgcctgggagagaataaaataatgttcataaagtgattagtgcagtaagtatgtaataaatggttgctgcttcaaaggctaatggtagaaattacaaggctgggcgcagtggctcacacctgtaataccagcactttgggaggccaaggcgggcaaatcacctgaggtcaggagtttgcgaccagcctggtcaacatggtgaaaccccgtctttactaaaagtacaaaaattagctggacacggtggcgggcgtctgtagtctcaggtattcgggaggctgaggcaggagaatcctttgaacctgggaggcagaggttgcagtgagccaagatcgtgccactgcactccagccgggacaacagagtgagactctgtcagaaaaaagaaagaaaagaaaggaaggaaggaagcaggaaggagggagggagggagggaagaaaggaaggaaagaagggggaaggagggagggaaggaaggaaggaaggaataaaataaagaaatatggtagctcagaagggaaagaagcttaggaatgtggcaagagatgaagcagtatcatattttatcttgcaaagaatagaatttgggatccatgttctcactttacatcagatcagccggtggtttgaatgtcagaaaatactacgtttaccaagaactttctttcactagtaaaaaagtcagggagaatggagatgggggaggactatagtggagaaacaactttctggcccttttctgccatgattgtacaatgtatagcttctgaggaggaagggaaagttgtctttttgttttttgttttttgaaatggagtttcaaaaaggagcctcagcctcccgagtagctgggattacaggcacccaccaccacacccagctaatttttgtatttttaatagagacagagtttcaccatgttggccaggcttgtcttgaactcttgacctcaggtgatccgcccgtctcggcctctcaaagtgctgggattacaggcgagagccactgcaggtggctgggaaagttttatgagaggaaagcaagatatttgaagctcagaggactatccttttcttttttcttttttccaggaacatatgggaaagaaatcccctcggaaaccaaagcccagccatcggagattttaagatttttcaggctttccttataatcttccttacatttgtctctttaaacacatttaagtcgacctttgagaagttgctgataagcagttatcaaacaagagttagagtaacaaaccctcccacctcgctgtgttggttggtagcttccaaggccactgtaaatgtgtatcagtgtgaacctgatccagaaacagccaggaagggagcaaagtttagtttagtctgtgaggaaactggcggctgctggtagttccatgctgtctgttcagacttcagcttggtgtaagtagttttttttaaaaaaaactattatgacattttcatataaaaaggattgtaagaataatttccatcaaagattaaatcaagtttctacctggctctaaatcttagggattagaactactgaaaagaaagtttcagcactcagcagtagttttatttttttttaatggaaaagaaagccgtgaggtgtatcagcaagtgtgctgctaaaacaggtcccgtgtgcacgaaatgatttctaatgtcttatgttgagtgcaagtgtttacagttagaaaataaaagtgagtatgtacctagtgccgagagattgtttctaagcagtgcttagatttatcctcatgttctttccagttgcttttcctctggtttagattcatagttacagattcatgtcagcaaatatttagcagtctctcagatcattaaattggaggttttgatgttcaaagaaattaaaagaatgagaataaagtagaacttaatatcctgtaacaagatgttgggatccaagatttaagagcagcagaatgtattttcaaagaggaagaactttgtaaaacagaagtggcaagcagcctgaggtttcacgcaacttcggagaaatctgttttcttaagatttgacatctgtatggatttttcagactaaattcccagtactatggtgcgtaaaatgagtttcatatatgaaattagagttgccgtgtttcagctcttctgtcttgagattaggatccaggaactacacattgttacacaaacatattgactttattaatgcagccatgagaatgttaaggtcgcatgtggtgttggaaaggttggtattttctatttcccttttaccacaatgcatttttaaaaaacctggtacatgacaattatatgacttttaactatataaaaggtcgaattagccagtagcctttttttttttttttttttt

SEQ ID NO: 9836 - DNA, 6000 bp, Homo sapiens
cagaagtgaaaggcccacctcaatgcaagggtgattagctctttctccagcagtactgactcactttggcctactaatcaatgtgaattcttcataacaggcgatcccctttgagtccaggaggacagagttgatgacagtgtagcctgaaattcctggggccctggattgaagctgtggccctgccatttcctcagtaactctgagctgttattgggcaacagacttcctaggttgtggaggaggctgggttaactggggactttaaatgcttgagccgtgtgttgactcattaactatgtctaccctaggctgaactggtgttgcccttcccttcccaggaaaggcctggcctctcccattctgcccaaggaaaccctctgtgaacttttacattcttccaaactattctgatgtttattggtctggatccattacatcagaagctactgagggtaatatcaggcatctatattttaaaaatgcttcctaggtgatattaatgcccaggtaagatagagcaacaatgttctaagtggttcccttcacctacaccactcaccttcatggctgtgagattaggggtgggagggcaggggagggttacaccaagggccttgaagctctcaggacagacttgaacaacctttttctcctccatgttcccttcccctttttctttgtagggggtccatttggccttggacgggttctagcaatgacgtcagtttgttaagacgagcgaggtaaacagttgttgccttggtgactttaaggagaggtagttgcacttcagtgattctggcaattagaaaatgtcaaggaacactggctcagacttcctcctgcccagattgataacacgaaaaccacgacggacatggttggaaagaacggccgcctggcgcgatccccagccctggaattcctggaggacatgatatttaagaagacattagtagacattgtcctcactaaagacagagttaaagtggagtttgaataatcagacccacgttagtaggatttcagaggaaatccttatcttcggtatttcagtagaaatcgttcctgttttgttgccatttggttctcctttgcaacttagcatgtgagaattccgggcagcctgattccttgcccatctttgacagctctgctgctgtgtcccgggggaggcaggtttccaacataactgctactctgcctttgcctggtgagtgctgagatggagaggcaggctggtatctgtttgatctgatactccagaaaaatcgtaattttacattgtttttttcctgatttctaaacacatgaaaccagattcttctggagaaacatagagtgccttaattttgcctagttaggggctgttgggggtggtttttctaagcacccttctgtgtctagccaaccagtagaacctgatttttgggaggtgaattagccagggttctctagagggacaaaactaataggatagatgtatttataaaggggagtttattaaggagtattgactcacacggtcatggaactatgtgaggtcccacatagtccatctgcaggttgaggagcaggaaagccagtccgagtcccacagctgaagaacttggagtctgatgttcgagggcaggaagcatccagcacaggagaaagatgtaggctggaaggctaaggaagtctagtctattcacattcttctgcctgctttttattctggctacaatggcagcagattagatggtgcccacccagattaagggtgggtctgccttccccagcccactgactcaaatgttaatctcctttggcaacaccctcacagacacgcccaggatcaatactttgcatccttcaatccaatcaagttgacactccgtattagccatcacaggggcatgctaagcaagaattgtgtctatggctgtaatcacaaagttacgattattggagtaagctccacaaaccagagtcccttgtccagggcctccagagatccaccagacacttgagtatctcgaaaagccagatgggagaagcacgttcaccacggcaaacctgcgcagccaagaaaatcaagtttctttgttttatgctaaacttttatcaactgactgtggtagtcgtggcaatctcatgccattcagaacctctgattggcaacagtatctttgttcatttgataacaaataactcaaattttaaattaaagttagtcgacaacatctttcaaaatcttggaatcgtgtcgggggaaacaaaatacaagagatatgatttgatgtgaaagaatttaggacctcttggctttgattaaattagggtgtgcttctgttgtttcactgggattgtgaaatgttgggatgaggagatatgaaaaatctatagctgaatattctgttgatggttttaaaccatagaaataaatattcaggaagtctctattgagtagctctatagggtaatgctagctgctagagcaaataaactcacgtcttaaccatcttggcccagaagtgatgtatgttatttttgctcacatttctttgccaataactagtaaaatgatcccatctatatgctgtgtgtgtttgtgtgtgtgtaaaatgcaatccctctctggacagtaatttacagcaataactatatggcagaaggagcaaacttcttgtggggcagccagctatccctgatatgaggaaagagaaagaagggtcagcattaagtggcagctcaggtggcacacattaagaatccaagctcttagagaaatgggagtccttcatgggagagggtttctggcagccaggacacatggagcccctctcggaggcactatgccaccctctgggggcaacagggtgtcaagcactctaagtctaagaacagaaagtttgggttctaaggtccagatgagggtgaggtttgtgcactaaagattaaggagatgaagatcagggcagagtaaataggtgtcaccagaaggtcaatacagtgattagcaactgtagttggtgtgataaagcagagaggctcgcagtagcccttggaagggcctgagtagagggacataggatgaagagcactaccagtttgttggttagaataatctggtcagccgggcatggtggcttatgcctgtaatcccagcactttgacaggctgaggcgggtggatcacgaggtcaggaattcaagaccagcctggccaagatggtgaaaccacgtctctactaaaaatacaaaaattagccgggcgtggtggcgggtgcctgtaatcccagctactcgggaggctgaggcagagaattgcttgaacctgggaggtggaggttgcagtgagccgagattgcactgcttcactccagcctggtaacagagcgagactctgtctcaaaaacaaacaaacaaacaaaaaacaaaacacaccgtggtttcaccatttacagtgacatcttgagcaaatgacttaaactctctgagtttcaatttctttatttaaaaaagaggattgttaataccccaccccacagggtggtggtaagaattaaatttggtaacatctataagacctgctgttcattacagttgattcttaaggcagcatccggtgatgcctttgaaacatacatcggcaaagtcttaatcagatgaaagccaaaacccctacacctgtgtaaggcgccacattatctggctgcccctgtgtaggtattttgctgttccctctacttgcaaccctcttttctcagaaatctgcatggtagcctccttcatctctgttaacagaaaaaccaaattctgtaaaatattttcaagaagtttatcctgaggcaatatgagttactgtagcttagagaaaacacaaacccaagaagccttgagtgagtggccctgaggcagttgggccatagtctggttttatacattttagggagacaggcattacaggcaaggatatctggaaatcagtacatggaaggtaactggtagttctgtccaaaaaatgtgagacatctcaaagtgggggagggtgcggtgttaggatatatgtattggtggtttttttttttgtttttttttgagatggagtctcgctctgtcacccaggctggagtgcaatggcgtgatctctgcccactgagcctctgcctcctgggttcaagtgattctcctgcctcagcctcctgagtagctgggattacaggagcatgccaccacgcccggctaatttttgtatttttagtagagatgggatttcaccatgttggccaggatggtctcgatctcctgacctcgtgatccacctgccttggcctcccaaagtgctgggaatacaggcgtgagccatcatgcctggactatgtgttggtttccatgcatgtttcctggcgcatagccccatagcccttgctacagtcttgctagaatgctgggctttttagacttcagggacaggccctaagaaacagtctctctcctgccgtcctttcacctgccccaaggcaaggtttttatgttttctggcctgactgtgggccttacaaccctcccatgaggccaggcatagtggttcatgcctgtaatcccagcactttgggaggccgaggtgggtggatcacctgaagtcaggagttcgagaccagcctgaccaacatggtgaaaccccgtctctactaaaaatagaaaaattagccgggtgtgatggtgggcgcctgtaatcccagctactcgggaggctgaggcaggaagaattgcttgaacccgggaggcagaggttgcagtgaatcaagatcatgctactgcactccaacctgggcgacagagcgagactctgtctcaaaaaaaaaaaaaaaaaaaaaccttcccatgagaggttcctaccctatgccctgggggaagaaatgctgacgtcaaggaagcttctataaaaacccaagaggacagggttgggtgaactttctgatagcttaataggaggaggttcctgtagggcggcacaaccagggagggcgtggaagctctgcatcccttctcccataccttgctctacacatctcttcatctgtatcctctgcagcatccttgatgataaaccagtaaatgtaagtagggtgtttccctgagttctgtgagccgctccagcaaattaattgaacccacggagaggggaaccccaatggaagctggttggtcagaaagaagttctggaggcctggacttgtgactggtggaggggggatgtcttggacactaagccctcaatctgtaggatctgacactatttccaggtagatagtgttggaactgaattagaggacaccaagctggtgtcgctgcttggtgttggggtgggacccccacacatatggtcacataagtcatcttctgtgttgattgttgtggtgtgagagcagaggaaagatggctacagagagttttccctacacagggacttggggggtagagggttaggggagggctgaggggccttacaagtcttaagtgcgttttagggattctttagctaacagtagctgagagagtcaagttattgtctagtgacttgaagtcagtaggaaggaatgcctgagtaagataaggaggttgtgggggcctaggtccttggagcctcatagatagcagccctctgggtgaatagatagtgattgtctcttctcagacctttgggtgtctgactctcagttagaatctctcctagatctgggaaaggcctagcaagggaagagacattaatatcgattctctggagatgcacgtttcccccaccaaagatggctttgcagtccaaaggctgtctggcagccttttccaaatatgtcaaagaaatgtattttggggcaaaatattttaatttccttcagagtctgctgtctgtcatgtgatactataccagagtcaggttggagagtaagccacattttactgggttaattaaaaaacccatttaatgagactgtattgtttctagggtatg

SEQ ID NO: 9837 - DNA, 6000 bp, Homo sapiens
accaccaccaccatctctatctgtgcctaccttcccctactatagaacccagctaaaatggcccaggtttgctttcctgaacatttgggtttgtgcaaacctgagcttgtgtgggtccatcttctttcctgggctccccatgagcccaggaacacgtgtgttggatcagtggatggatgaatcctcagctcggctcccagaacctatgctgcgagctcaccttccctcctgcctctcccctgtgcctcactttgccctacacccctcacaccccttcccttccatgcgtttccgtgccccgatcatgtgctctgtctgcctgacatgccttgctcctgtttccttgtgctcttagaaacatccttctaggatggatgggagtcagctggcctggctcttcccctttctagatcagtgcctttgctgatctgtgactttgtttcctcaactgcaaaatggggatgggaaaatgatctgaagtcaggttccccagaagcagagcctgagatggggatgcttatgtgtggggtttactgggggtatgctcacaggagaaatctatagtagaagaagacaggcaggataggggccagcgaagatgaggttcccagagaagtccactctcagcctgatcccatgcggacgacaggtgtgtgaattgcaccgcagaggtgcggaggctgttgccacccagtggttcctgtaagccaaggacaacatccccaggagaagggagcaagtgtgagaagctggcacctccacagagctaggggctggggaggctggggtatcaatagcctcgctcacaaacacctgctctatagcattgctggggggatgaaatcagtatatttcaaatactaagaagagtaattgacatttaacagagtttaatgattgtttctgtcattttgttactttttctttaaaacccagctaaaactccacctctgaagtcttccccactggccatttagagaattaattactcctttcccaggctatgtcagcacttggtgtatttgtcctttttatttaaatttttaaattgcaccagtaaaacacagaaatattgttgtaacaggatctgaaatagagtagaatgtcctcctctctaacccacattctccctgggaggaaaaccctgttaaatctttgttggtggcactttgtaacttgagcatatcatcctgccttgtttaggaggaactgaagtttcctggccacatttagagtcttttaatgggaaagacctggcttgtaattcttttaacccctgctcgagaaatgcctgcttagagttgagccaaactttcttgatcatagtggggtggggtgtcagaaacacatttccagcctccgtgccctggagattgccactcaggagacctgcacagggccaggaatctctttccagattctggtaacaagttctcctggtaaattaggtgaaaatccagcttggagaacgttgtgttaaaggtggcttccatcatatgaacatcttgcttatcaattagtttagatgcctcccttttgcttcatagaatgatattttgggtgtgggcacacacttttactgtggctacaatagtagcgcatggtcattgtgggaactagcatatttttaaagtcacctttagctccagcacatgaaaaccacgtttaaggggcattcacaggccccatgcatattttccaagtctggccctgggaccaccccgccattcccagttttgttctcgggtatttccatcccctgcttctgctacagactgatgggaaccagggctcctttctcttctctttatgaacttggggatgacaggtgcacctgctcaccaagcaccagccgcttccccgtctcttcctcatcctgcagaggaaagtggccacttcccccattgcctgctgccctcaccatctctcaagaaggcctcaggttttaagagtgtcagggccctatttttagtggactgagacttctcctgggtggccagattgttgcagcttcctcatgaccagatgtgtgtctatgttggcagtggagcctcctgtggcctcagtctgcacatgctggtcacctcgcgtaacctttgctccatccgggtaattctgcgtgtgcgagtgcacacacacacacacgcacacacacattgcctgcccattctcagagaaggacactgaggctcagcaaggacagctgacctgtctaagctcccacacacagtagggacagaaccagaacaaggactgggatttgatccctcacctcccacccttcccactcctgtcagttgcagtgaggtgctgttcccactccattcccatgacttctgcatgtctgaggtggacatgacccccgacatcccgccagagtgaggagagggctgtgtgtgtatgtctgtgtgtgtcatgaacaacattgatcttccacctattcacccagagcccagcagctgccagcctgctagccaaaactatggcagctataactctgtttgaccttctcaaagtttaaaattttttttatcagttggtgacatttaaaaaccaagagtattcacatagaaatccagatgtccaccttctctggaaaaaaatggaaaactggcagtccaggcccacatccctgcttagccaccatccagtggagttgggtagtggctgtacccatttgacaccacagatgccacagtccgcactactccctattacctccccatacagagccagtgcctgctgctgtttgccacctcacatacactgttgctttttcttattggtagattccagaggagaaagccataagccagaaccagcccacctccctaggtaatgcctggtccttctacatatttgagtttgaaatccctgccatcccccaagtccctacccaataatctataaatctcagagccttggcatacagtagatgctgaaaaagaactgtagcccccatttactgagtgcttatcctgggtgaggctgtggaacctatcaccttttaacagatgaaccaacgggctcagagttgaagctatgcccaaggtgagttttgtcactaggacttttgtggtgtcactcacttttgcactgagctacctctcatggtgcggcttttcatgcctattctttttgccttctcaatttgcttgctggtttcagaaggtttcataaaagatagtaattaaggccaagcctcagcattgtggctgggcagagactgagagaggagaaaggcatttcacaggaggaaaagaagagagaggaagacatggtacagtgctaagggtgtgctgggaggggcactggcaacccaggtggggaaggagtggaaagggcacttgaggccagagtgtgaaaggccctgcatggcatactggggctgtgagacttctgagagcactggggagctatgaagtgttttagagcaggactgggcatgatgaaggctagcgtggcagcagaatggaggcagagaggatggcgctgtgagagtccagaaaagaggtgtcagggacctgaagaagagcccttcaacagagagaagagcagattccaggccccgtcagggaggacatggtgctggggtgggctgagggacagtgcctggagctggccatctggaggcactgcagtgccattagctggcacgaggatggtgggaggagatatggattgggtgcatccctggggtgatgtcctctgggtgcccagggagaggacagggccgcggcaggagatgcaagtgctgcctgccaagctgagcgccaagcagcgagaagggagtgctctgggccaagaagggcctggagacacccctgtcacacctgctggatcgccttctccactggcctccctggccccctctctccttcctatgcctaagcctccaggcgtgaatgtcctctgccccatcccagggctgcagagagcaggccatgttgaattttggccctatgaatgggcatccctgccactcccaggaagcagatgttccagatactgagaccccagggtccccccaagctcttcaactcgtcagagcaaggcctgggaaggggaattactatggtcaggccctcccctccccatctcctcacttcctgcgagcagtgcatttggctttatataaagccaataaataaataaacaagccggcatgattaattgatggtatggagcagacccaggcactgggagtcaggtggcctggcttcctggtggagctcggcttttcaagacctggggcctgagccaaggaggggaagcctgctttggggaggtgctttcggtgcgtgtctggggttttcaactttctcctcaggcagggccactgtcctggactcctcctggccctaagcagggccagactggaggctggggggctaagcgtgtccttgcctgctgccctaacctttctcgcctctgagggcccttaggctaagctcccagggattggaccagcggtcccctcctccaaagcgggtctccctatctgcctactccacacccaattcactccacagccaattcgctccaccccgtgtggccagttcacaggctcgggtgtgctggggaggcttggggcaccctgacccctggggaagaatggggaggatgcctcccagggccaggctggctgtgggggtggggcggggacaggggcctgtgctgatggaggtacctggagacacgccccggggcaagactggatacccttccccgcagccccactggtgcgcgcggaggaggacgcgggcgggaccgcgcgctccggtcccgcggggcgctctccgtgaggagtttggggagggccgagggggagcgcgcggggaggagtgagcagggagggcgggagggggaggcgggcagagcgcagtgcagcggtggcagaggcggcggcggagggagggaggcgggcgggcggcggcggggccgcggggcaggcgagcgcggggcagccgcggcagaggagccgcagccgcagcggggccgggccgggccgggcgcgcaccagcggcagcggcggcggcagcggcggcggcagcatctcgctctcggagccggcgcaggtgaggcaggggcggccgggcccgggctctgggcctcttcccctctcgctcggtctcttgtcactttccctgctggcttcccttccgcgggcgctcggccccggagacccccgccgggccagggcgggagcgtgagccggagcgtgtcttggtcccttcgccccgcggaggcaggcgccttgtcagcagtgaccttgagcgggcaccaggcggcgggcggggcgggccggggtgggcgtccgcggacccggcgcctgcgggtgagggaagggggcgcgccttgcgcctgctgcgcgaaaactttccgggctcggagcagccccggagctgggggggcgtccgggacgctagaaccccctatttcttcttcccagatggctccgacttccccacctggcttctcctcagtgtgggggccccctttctcctggctctagttcctgcaggctcgggacaggttgagagctgcagagactcaccctaggctgggggcttctcccttccccaaacgtgatttgcagctgctaagagcacaggagccaggagagctaggagagcatctctgccaagtgctctccgcatctccagcctcaccttttcctagctcccctcctcctggcccccctggccacagccctaaccccaagcacgcacgggtcccccacctggtgacacaagagctcggaagtcccacattcagtgggtcctcagatccacagcgtgatttttcagcccagtgcctaagcctccttcggaaggtggacttgggcagttgcctcaggccctcaggacgagccagtatagcatgtttcgggacactgggactcacccagggcctggccacccctccttgccctgaggcctcaggaggacgggatactctggcctttggtgatgtcctagctgtagaagcactgcttcc

SEQ ID NO: 9838 - DNA, 6000 bp, Homo sapiens
aggctcactgtccttgaggagatcctatactgtttggaaagagaagacaaagatttttcaaagtttaaagtaaatatagtgtatgtcaaagagacataggggggcaatcgaaagagctccccagtggtcagtgctagagcaatttttttttctttttttttttcctttttcttttcttttttttttttttttttcaagacggagtcttgctttcgctaggctggagtgcagtggcgcgatctcagctcactggaacctccgcctcccgggttcaagtgattcccctgcctcagcctcccgagtagctgggactacaggcacgcaccaccacgcctggctaattttttgtattttagtagagacggggtttcaccatgttggccaggatggtcttgatctcctgatcttgtgattgatccatccgcctcggcctcccaaagtgctgggattacaggcgtgagccaccatgcctggcctagagcaatttttgcaacaaaataaactggtattgaattaagacccaaaatataaaataattctctgtgagtccattcctgagtccatatgcttgaataaatataaataaatgaatggatgacaatagacaaatctcctgggcaaaaaaattctaagtaatgtatcctaaagtgtggactatgcatgatgactttcttccaaagaggacagtgtgactgtgggaaaaagtaactttacagtgaagaagcctgacagacacctcctacagtaagtgattggggttaaagcagcagtgataaatcacattgattgattgtgcccttgatatgtgaggaggaggaggacattttaccgctgatcttcctctcccaaacccataaccgcagtataattagaagtaaaacatcagacaaatcctagttgaggaacaccctacaaaatgcctgaccagtaccccttgaagctgccaagatcatcaaaagcaagggaagtctgagaaactgtcacaagctacaagaagcctcagacactacagctaaacgtaacgtggtttcctggatgggatcctggaaaagaaaaaggacattaggcaaaaacttagaaaacctgaatatactttggactttggttaagaatttcactgtggactttggttttcagaaggaggactacagagatgaaatgtccttctttttatatacctcagcctcctaaattatttaaaaattcacgtacattaagattcagtctttgtgctgtaaagtagggattgtgggagttcactcagcacagtgagtgtgggccctgcccacatcttccttaccaggttagtgctcctttcctgctcagacctgtgtgagcttctgttctggtcatagcctgtggcagccagctccatccaggtgcctctgtgcctcccagcagcttctagtggctgagcgtgatacagaagacaaagtggatgaggccttctgtccccagagccctcactaaggcacagccacataaagttcacaaaggctcagacggttgcctctggttgttcctttgtgcccagggtcccaggaggcattaacttgctgtgcttggtcagcatcttggcccttgcctatgctgtaacctggagtactgcattggtgagtggctccatggcctccctttcatccacacgcatgccccttggagttcccgactgcagcccaggcgtggagacagcccctcatccctcagctgggctgggccctgcccccttcagtccacacctcgcagtacaccgctgtctagggccatgtttccttgtctccagttgtcaccaactcccggggagtctttacagagcactgctttcatcaggttgccccttcacctcagagacactgggctttgctttgtcaactgattaaaatcctgacagctcagtcaggcttcagtctaagcctgcttgtcatcttcctcgtaatttctgttatcccctgacaggtttccttggtgcagatgtccaggccttctgtgctctcagcatcccttgcaactcacattccctcctgctcctctcctacctgttcttttctaaccttatggctctactcagcttctcctgggccataactctgctgtggctgacccagcatgttttggggtgctccgcgacatgcctgttactgagggttgcatatgtgaacactcttgtcatttacatccctgttaagctcttgaaaggtagatggcagattctagtgagaaaagtatgtgatatttagtgaggagaccttggtttgagtccttacaccaccctgcctggagtgtgaagctctaggcaggcacaatgcctgagcctctccttgcttctcatcaggctgttgtgagggtcagatgaagtgaaatgcctgattgttcattgttaatatttctgctaatctttcagacactgtttgtatgcgtgtgtggtgtgtgcatacatcttgatgctgcagggtgaatgtcgttattcctgtttcacaatgaggaaattgaaatccagagatgtcaaaagtgttttcaaggccatatgtttggaaagctgtgatttaaaattgggtcctttgatcttcaaaacccgctactctgctgcaagtgacaaaacctgaatcagtaagacaggttacatgctttggggagtgtagagtctatagtgcggtcagcagacatgttccataaagggctagatagtaaacatttaggctttgcgggccagacggcctctgttgcagccatttgaccctgctgttgtagagtgaaagcagccatagacaatagtaatggtaggggtgtggctgtgcttcagtaaaaattggaagtggaaaaacaggcactaaccagcctgggcaacatagtgagaccccatctctacagaaaataaagaagttagccaggtgtggcacttcgggaggccaaaatgggaggatcacttgagcccaggagttcgagaccagcctggcaacatagtgataccctgtccctacaaaacatttttgaaaattaggcgtggtggtggtgcacacacctctagtctcagctacttggtgggtgggggtgctgaggtgggaggatctcttgagcctgggagattgaggtttcagtgagccatgattgggcaatagagcaagaccctgtctcaaaaagaaaaacaggcatgggccctgatttggcctacaggccatcgtttgcctacacctggtcccacagtgctttgcccatagtagatgtgttattgagcaaaagaggctcgctgcccaatgtgctagaagccaatactgtgacaccaggatttggggaaaagaaaagctttatattgaaggttgactccctaggagaccggagtccagctcaaatctgtctccctgtgctggctttaaggcagtaattttattaggaaaggtttagagggtggatactaggattagcagatgattgatggaaggaagggtgatttctgggaagtctttgagcatgcccagttatctcttgatgccacctcacaggtcccatgtgcaaattccggggggagttagtatgaaacatggcagtggaaattcaggctgtgacatcggcaagctcattctgcacaactccagtcggccatcttggttccagcttatttcagccagttcttttatctcataagcggagggagtttctgggtttcagcaaattgtttcttttcttatctgccatcctgcaaactcaagaacttgtattagtcattggtttctttaactctgtggggcacggtttccaatgcccattaaatcccttgaattggaccgtctttcttcttcctgtgctcagctgccctttctgccctccctcatttcttctgcagtatgtgggtgccccggtggcttatgtccagcagatatttgtgaagtcctcagtgtttccctggcacaagaacctcctggcagtagatgtatttcgttcacctttgtcccgggcattccaactggtggaggagatccggaaccacgtgctgagagacaggtacccctctcagggaccctggcctccctgaatcccattctgtactgaagggagagttacagtcctcagtgtaactgcagtgagccagtcagctctgcagagatagaacaagcaagaaggatggagggtgagctagccttgaatttctcagcatccttgtgggtctacggtggctgcattccgcttggacctatgcagatggcacacacatagccttgagtctcatccttacatctcagatggagtcagtgtccactgtgctaactcatgacccacatggcttcctgcctgtgggttatggtgtgaatgtaatggtggtgtctctgccgacgagaagcaagctctacctgggggtaccttctgaagccccagcccaagtcgtgctcccctgcctatcagtgggtccctgggttatgctggcttggcatacaatgtgtgtaattggcaagctgcatcactgccaggttttagttagctagtggcgttgacagatattttggtgaactaaatgaagcccctaatttaccccggtccctgctcatccactgaactggccagggtgttttagtgggtggggttgtgcatgctcttatagtacacttgcccgtcctcagagctgatgggcttttgggcttcagatgcactttgaaagtcagacagccacatgtttaggttattggccacctggaagtacttccccctgctgccctagtggtcaggctctttggcgataccagagagcaaatatggggcattgaagaacagacagaggatgtcccctaagtacagcaggtctgccctgtggtggcagacacagcaggtgccttgtcctgtctcctgtgcagctctgggatcaggagcttggaggagttgtgtctgcaagtgaccgacctgctgccaggccttaggaagctcaggaacctactccctgagcatggatgcctgctgctgtcccctgggaacttctggcagaatgactgggaacgcttccatgctgatcctgacatcattgggaccatccaccagcacgagcctaaaaccctgcagacttcagccacactcaaaggtagccccagtacaagttcccttcagacctgtaaaggtgcccattggtcaccgtctttttgatgtgtgcttaggcagatcagggtttaccctttgtttcccagggtgggggtgagaaaggggtccttggtggctctgcagtagctgtcatttctgtgtcagtacctgctggtttctgcttgcagacttgttatttggtgttcctgggaagtacagcggggtgagcctctacaccaggaagaggatggtctcctacaccatcaccctggtcttccagcactaccatgccaagtaagattgacagtaccctgggctcttgactggtctgctgggtgacatgaggctttgagtagtccctcttctggttagagtgttctgaatgccccctggaaacttgggagagtttccaggcctcctgttgaatgtttacatccctcagactagatgatgctgtctaccacattttaatggggatgacctgacagctggttaagcataggggactaaggtagggctggcggtctcagtgtcctggtgcctcctctggtctctcttgagcctagggcaggcatccccagctggttactactgagcaccctatatggcctgtgtccttcccagtggggcactgcaggcagctccccaattggcaagggcactcgaggtgcttctgatcggctctcctaggcctctggcaatcaagagtgttggaggccgggcgcggtggctcacgcctgtaatcccagactttgggaggccgaggcaggcggatcatgaggtcaggagatcgagaccatcctggctaacacggtgaaaccccgtctctactaaaaatacaaaaaattagccgggcgtggtggtgggcacctgtagtcccagctactcgggaggctgaggcaggaggatggtgtgaacccaggaggcggagcttgcagtgag

SEQ ID NO: 9839 - DNA, 6000 bp, Homo sapiens
ccgctagaggtgggatcacccccacttactggtgagcaaataggctggggggggttggtgtcaggttacatggtttagttgatggcgcaagcccaggtccaaagcccatgctcttctcaaacagccagaggtgggggccggaaggagggattggctgttggggagtagtgggagcaggggcggtgagcaggggcggtgggcagggccaggtgcgcaggggagaaacaaggcgccttggagttcaggtaaagaaagttggggaggatgaccaccggagccgggtaaggaagggaaagggagctccgggcgcggggcgaggccgggcgctggcagaagaacgggtcgggctggtgagggactcgggtgctacccggctctggacgggcgggaagaggccgggacgctgttccaccagcacctgcgggtgcggagcgcgaccccccgcctcggctcctggcaaccaggaaagttcccagttccggttccaaggaggcgagcaggtgaggccgacggggcggggcggctctggctcccggggttcactcctcacccctccgggcgacccgcgttgccatggcgaccgccgcggtgcagcccgcccccgccctcccccgtgcgggaggggtcgggtccccagccctcggccgatgcggagcccgcggggctggaatgcggggtcccgggcggttcggggccgcgcgcccggctctccgggctgcttccggcctggcccgggcggcgggcggggggagggcagcccggcaggcgagggggaaggagcggagacgagcccggccgacgcggctttgtctcctttgttcccggcggtggcagcgccgcgcgggaggggcgggcagcgggcgcagttttccgcccctcggtctccgggtaacagctgcggctccaccagacccggggagaggccgctgcgcgcggagcccgagcccggagcggccgacgcccgcctcggcgcgcacatcccgcggggcccggccgggtggtgagtgcggggctcggggccagggcggcgaggaacggggctcccgaggtggaacgggccggggccccgatcccgccgggcaggggcggcctgggtgagtggtgggcggctttggttttgagagttgggaccacacttctccgcgcgaagggaaactctggcgactccgcctggaacgcgattgggagactgaggaggtggagctgctcctccgcgccccctcctcgccgtcgccgcgggggaccggccggccccttccccgccctcccagggccagtgatggggtcctcgcctcggggtctgggggttggggagggtcaaggacgagccgagtggggaggtcggggcttcccctcagtagtaacagccctttctggctgctcccggtgggactgacaaaggcggacctcgagcctcctgacccccgggcgggtgggggggaccctcctctccacacacagacatattaagtgggtgatcgatgagcgccttgggtcatcgcaggtgcctggtaaatggtggatctccccacccctcctcaacacacagaaaacagggcgggcagcgggcaccactgcactgtcaatgaataactcacctctgtagtgaaccctgggagctgagcaggagggtgaaacgggaaggccggtttcccactaactggcaggcaaggcaaatgtgggctgtcctatggcccctctgcaggtgcggaatggcggggtttgtgagccccttttgttgtcgaggacagctccacgggggtccgggaggtgcttgctctacagacagaagttgggcagtcttgcgccccctgaaaaggttcagagtagggtggccccagaagagactccagggcatgtgtgggggagcactgggcacaggcagagttaggctttggctgtgagtctgagcagggcctcagatattgggaatgggcaggagatcctggctgtgtaagttggggatgtgaggtctggttctagatcagccttttcagtctgccctggcctggtcattaataaaagtggggccaatgtgttccctttgagagaccaagtggcttggagggattgtgggccccctatctcccctacttgttgggttttcttgggtgtgaaatgggggttcgttcaccatacagggagcatctggtctgtgctgaagtctgtgtaagttgctggggcctctgaatcagaagccatactccctgccttcaaggagcttcaagtccagagtaggagggtggaacagggagaaaggtgaccctggttggcatcactaatgccaggcacacactgtttcatgtttactggtcagagcaatcctgcctcccattgtacaactaggaaatctgaggctcggaaagcctgaggcagagcggccgtgcctgtcagggtggtggctaggtgtgtccattctgtccaccgcatgcagcggcctcctcaggagcctgggaggacaggggaggctccccagggagaggatggttggtgtaggagttaatgggatagcgagggagtgggcattccaggcagcggcaagagcctgtgcagcggttggaggagccaagcagcctgcagttcaggctggcaggaacgaagggcatgtgtgggggagcactggcatggatcgggtgggagaggtgtggactggaggggtaggcctttatccctcccgctctggggtgccccagaggctcttgggggaggggtgtactcaattctgctcaaggaaagtcctgagaagttgggagttgggaggctagattggaggggctgggagctgctcagtggcctgtggcagagattaagtgaaatccatgtgcctgaaatggaggagaaaaagtcactgctcttctttctgtcctccttccgacacccatggtatgtgtggaggggcaaggggtgctaggtcctgattcacagggagactgctggcagaagcctgaccactttccctggagtgggtcagcggccgacctcctcagtggcctggccaggagctgttctgatcccgcccatttcttcctgttgtctcctcatccagtgttttttttttgtttttgtttttaaccattttttcatctcccaaggctctgtcatgcatcaatgcagttttgatttcacatatggggagtggttttgttactgccccttgagggctggagaactttggcacgcagtaggctctgagcaaatatttgtaagcatgtaggagtgagtattggtctaactatgggaccctgtgcccaaggcccatccctggcatgcggtggcaggagaattgaacagtagccccttgcaagaggtggcctctgcccatcctcaggtggactctgtcttcccatgggaagaaactttctttcctcatcccttggaaactaggtggggggctcttgggcagcctggtcttgccacagtcctgggatcctggccgggttcgagactttccctgctgcccccttccccccgcccccttgggtggctaacagaggcagccttgttcctgctcccatagagctgccctgttttctgcacactaaaaatggaaacccccaagctatttcgggagcagtgcccagccaggctgtgaccacggcccccctgctcccaccgggctgtggccacagtgtcccggcttccaccaggctgctggaccctcccctgagccttgtgcccggccctgttcacttcagggcagcctcaggagtaccctgctcaggcctcatctgctaggatgagccgacctgggagaagcaagcgcttgggatattttgcacagacagcttggcagctgggtgatgggaggggctgggcaacgtggcctgggcacaggcaagtaggggaagtgtctcccagtctgagatgcattgtctgtcccagcacttcaccaaccttggtgctcctggctagagaccactggggaaggtggtattgccatagtttcttggttcagggactcaggagcctcagctggggcccaagaaggggtctgtgtggaaagcaggcacccaaagtctggggaggtcctggggatgggcctgggaacagccaggcatggcaccttcctccaggacacactccacttaccccacatcttgggccctggcactattctgaactgcaggagaggaaatagcaagagatggcctagcttctacagctctctagtacgtagggctccaactaagtactctcaaacgaggggagtgtgcctgagtgtgcgtgtgtatgtctaaatgtgagtggtggtctgaatgtctcgggtgagtgtgacatatgtgcctgcagtgtgtttctgtgtgggggagttgtctctatatggatgtgtcttcatgtggtgtttgaacatgggtggctgtgtctgtgtgtgtcactgtgctgtgtgtatagatggcatctgcatctctctctctgtgtgtgtgtgtgtgtgtgtgtgtgtgtgtgttgtaggcatatacatacagggtgggtggtgtgtatgtatcttgctgtgcgactgcctgtctgctgaagcgctggtggccctttgggctgggacagcccctggctgtgtagagggtgtgtacctgggtgcctttacagggtggagtttgagcagagagagggacctcacagggagaaggccatgctgggggcctggctgggccctgccagccacggggctccttcctagctgacctttcccaggcccctcgggtgcctggctctgctgccctccccctcctcatgtgggctctgaggaggcgtcctctgtggaatgtgtttggtggccaggggccaggctgggcccagctccaccagcaggctgggcggtggggagggggtgcttctgtgctgcctccccggtggggagcccagggcttccacgtgcctgcagcccaggccccggcttcacactcggctttcccgcctgctaggtgactcccacacgggtcatgctgttgtctcctgatccagccggccctgccaggtgagcctgacctcacactagatatctaggagcagcatgactcctacctattctgagggctctcggaggtggggggcagcccttcaggccccacccctccgagctggaacctcttcccatctctcaggcctgttggttctgtggttattacccttctggattcctggcctgaaaggccctgcacccaactcttgtcttgattctaacattctgctggttcaggagacctccctctccttccttcttctgcccgggaaaccctcatccatgtagagcctctcctttcttggggtctgggcccctccttcccatcacctgctcttctgccccatccagaccctgcttcctgggcatggcctctcagcccctcaccctctgatctggggggatggtgagtggggtgcaggtctcctgagagaatcgtgcctgcagagaatgggcagtgttgtctaggaagtgtctcctatttctgaccttgttctagtgtgtggtcctggggtcatcctggacatagtgcctatctaagaagcctggtcctcctctgctcaccccctaggttaggaggagcatcttggcaatgccacagtcctatcccttaccagtggccccagggtgctctggcggccacgtgagccccactctctcgacctctcttcctgccaggtgaccatgcctgctctgggcccagctcttctccaggctctctgggccgggtgggtcctcaccctccagccccttccaccaactgcattcactcccaatggcacgtatctgcagcacctggcaagggaccccacctcaggcaccctctacctgggggctaccaacttcctgttccagctgagccctgggctgcagctggaggccacagtgtccaccggccctgtgctagacagcagggactgcctgccacctgtgatgcctgatgagtgcccccaggcccagcctaccaacaacccgaatcagctgctcctggtgagcccaggggccctggtggtatgcgggagcgtgcaccagggggtctgtga

SEQ ID NO: 9840 - DNA, 6000 bp, Homo sapiens
tctttaatttcacatgagacagttttttcccctgacatgaaaaggctctaccattttgctctccttattcactaaaaattgtaaagcctatgatatgtaatttttcagaaattttgatcaacgttatagcttttgtatctctaaaactctgttaggaatattcaatcattgtgatgaaggaaacttttctagtttcttccactagcaattgatgagttaccaacctaaaatagaagaggaggtaggatgataggggacaagaaaaattatgtcaatgctagtcaagaaatggtagccttcggactcattcacctttttcttatcatttcccttaagagtcagcaatgattgtctctcatccatcagttcttaaggctgttgagtggttttccatggggatgcccccgagtccccacactctgcttagcaactttctatcttcataaaatgtagaatctttccgacaccaagccaagctcaggctctaagagaaacagtttcaacagcgttgtcctacccacacacttctttgagaacttcaaagctgaatgaatttgctttagggacacctaggactagagctgtttctgtgtaaccaatccattacttctataaagtaccaagttgaatgcaaacaacttttatacagatttagtggtaaataaccaacttgaaacttgtcccaccacttactagttgtgtgaccataggctgcttatgtaacctatctatgcccttttctctcatctacaaagcaagactgttaatagtatcaacatcttgagttcaagtcaatgattaaactatataatgcttgtagtatatttcgtgtagtgcctgaacattataagggctccatgttcaatgagtaggcaactattcttatgaattgtacatgcacgtgagtgcatatgggtgtatattaggaatcctgtacaaaatagtactttgctgaaaacagtagactctaaagtcctacggagttgtctggtctgacaggggtttgtgtaagttaaagggataaattactcttgtgacaattgagtatgaaaatacagtcagtggttctatctcctctcagccactactccttgtttccactgccactcatctgtgatatatggcttgttctgaaaacaaatgtaccattaacagtaatgtctttgtaggatatcaaattaacatcaagatgttgggggtcaggaattaagactcatgtaaatgagagtggctatcatgacagaagacataaccgcagtagcaatcattgtagcaacactctatatagctgattagatagtatccagagttaaatgaaagcccattttctgtgaatcctataatgtccagtaaggtgttaattacccatcttctgtctcaagcctaatcccttccagggggtaaagtttccaggggaacagtgaacccaagagcagggctaggaagaggtaagtgagcaacttttctatcacaaaatttaagggagaaccaaaaaatatagtaaccaagataaataacattttaatacaacatttttataaaatcaaaattagtgcaaaaaatccatgatgactgaaatatcaaaattttcattaaagacaagatctgatcctgcacttgtacaaccctgccctactccctcaccctaatcctggccttggtgaacccgaatgttagagaataaatattttatgtttaaggatttctctacatgaagtcagtatgtttgcagggcagaatgggtgacccaagtgtatctgcatattaatgatctaagcttcttactagaaagggaggatcaaaaaaatgtctttctgtcacatattgaaagtatgtccatgggccaggggcagtggctcacacctgtaatcccagcactttgggaagccaagatgggcagatcacctgaggtcaggggttcaagaccagcctggccaacatggcaaaaccccatctctagtaaaagtacaaaaaattagccggacatggtggcttgtacctgtagtcccagctactcaggaggctgaggcaggagaatcacttgaacctgggagacagaggttgcagtgagccaagatcatgccactgcactccagcctgaacacagagcaagactctgtctcaaaaaaagaaaaacaaacaaaaagaaagtatatccatgatgtttctgagaggaataacaacagtgggtaaattttattgagtccttactatgtgacactcactctgctaggccctccacatacatgatttcttttaatgctcacagtaatcccatgaagagagtactggtattaaccccaaaaggagactgaggatcagagaattaagtaatttccttgaggttacccagctaataagtagccagtgtaaggtgaagctgtaactcaccccacagggtttgagaaatcactcattctgtgtctgaatctttttaattcaagacgtaaatctaggtcaatatagtttaaaatgtgctttatgaacccaaagtttgggtgatgatctaccagaaaaaactttacaacacaattgcatggttaaggggctacttgtgtgtcctataaggcatgcatacaattccagaaatattccaatgggaataattttcttcaccaccacatgactttccctggtaacgtgttccactttctcccttgtttttgggaatcttttaggttgagagagggagagaaaaaagagaagaaagatgatgatgatgatgatgatgatgatgatgttgattgcagtggtggaggtggtggtagctaacatttattgaggccttatcatgtgccaaatgctgttgtgagtgctttatgagcatgatttcatttacccatcagaaaaagcctataaaaggctagttagtccccattttcatcaggaaaccgagtctctgagaacataagtaacttgcccaagatcacaaacccaggtggatgttagagcctgtgctcttaaccactacactgtagaaagaagaattaagtggcaaatttttagataagccttccagcttcttttaaatagagccttcagatccagttcagctgctgaagaagttcccacctttccaagggccctgttgtctatgatgggcatccttttgggtgacaagttcaaaaccttcacagaattttccccagagggcatattttaaaggtgcccaggctgttgggggctttatttctttagtgctgtgttttaggattaaagtagctttatttagcaagtttcaaattaatatatttgaattaaagggaggcagtaaaggagtagaaattatacttaaatacttagtacatgtcgtcagcccacaattcttatttctacagacttagagtatattttaccgaaaagttagtgcccaggtgttagggtagctctggaaaaggcatatctgaaccaaggactaaacaaaatagggagcacttaaaatattttattaatttcctcctttgaagatcataacaaatctgctgcattcccatccatctcaaataaagcaaacccgattaataagcactgtgagccccgtgaggaagagcagaacaacccagacaccaaggattgtgctgataaatgtttaatgactggctttctgggagggagaaagccctggtttgtggcatttgccaattcccatgatgaaaaaatcccccacgaaggcctatttctagctatcaatgtgatatccctgaacgcggattcgggaagagatgtgcaagatcggctgtcatgaccggcaaacacactgctccatcccttagggaggaggaacggaagacagtccgctctttcaatgctgtggctatcttggagagctgctgcttccggaggcactcactgtgtgacattggcaagtcacttcacctctctgggcctttgtttcctcctctacaacagataacgtggaagatcccctgtacctctaacattttaaagttctagaaggcattgcctcctgttttttccgacatccaaatgccttgaagcgcctttctggaaaaccaagttagcactgtgctgcatccaaaagtgcctccaatttcatctcctgagcataaggtttggaaaggagtgacttactcccttttgcctctttaaatgtgtagccaatggggcatcatacattttttacacttcttttgctagatgtgagatccaggaaggaaagcatggatgttccagggctttcttgttctcctggggtgggaggctgcgtgtgatgcactgattcattgctgtatgcaatttctacctccctatcctttcggcagccgagcaagattgttgatagtctcctacctttttatttttatttttattttttactactagaagccatttacaagagtgggaactgcttacataaaatggaggggcggcagggggttgcgttattttattttttttttttttttcctgaaaggtggcacgtctctcagcaaagagaaaaaggcatgttgcacaaggcttgctggcagtgatataagccagcgccggtttgcctgttgtcacagccaaagcaaaatgccacctctgcctagaagccagagtgccacactcctcttttgtgtccctgagatgtacccctcatgaggccctggaattgtaggtttggccaggagtttgccaggattgctcgaaggtcatcttccaatcccaggaggctgggggtaaggggaggttcatcatagttctcaaaatagatctgttgagccccccccccccccagattacatgtcagctacaaccagtaaatgtggaatttgaggcctggggttagcacaagagagccctccagttgccaggagtaaggtagggctgccagaataccagtgacccagtgatcaccctgtccctgggccccttcttaacaagcccagatgcagtgacagcaaaagctccagaatcccaaggcaggaggtgccaaaaacaccccccaacaaccattaacaaaaaaaattttcagtaaaatgttctcacccctagaggggaaaacctgtccatgcctgaagcagcttgaccccagcaaacaccctgcctccatggagtgaactgcaaatctccaaaaaaaaaaaaaaaaaaaaaaaatctacttcctacccctcctgctccctggggagggacagaaggttcctaaaactgacagtttcgcctccatgatctttaaaagagcagaagctggctgtgaggctgcagtgctgcctcgattggggtagtgtggtctctgttgcggctgggctccaaggagagccacaattggctctgatgaggaaggagcctagaaatgaaagattgcaaagagggcttctgtacgccatggctgagactgtgtcgtttcttgcaaggtgaaacttggcagttctaccttgcaagtaaaaacctaaattaatttttttaaaagaaattaagtcagaaacaaggcttcggaaaaactgtgagtgttaggcataaactgattttggatgatctttaggtgagaaagggtggagttaccatcagaaacatgtttttatttatgcttttcgaatccccactggtgtgcgatgtgtgtgtgcgcgcgcgtgcatgtgcgtgtgtattggttagcgtgagagtatgcatcatctcaattctctaaccatttctttcttttttgcatcttttctgtgcacagttcatatagatcccctataaataaatatataggtccatccacaccttttcattttatttgtaaattgtttggtataagcggcagagcgtaatgaaacctggtgaagtttaaaagattagatttttttttatactgacacttcataacactgttcatatgtctccgagtgagatttatgaatatatgagcagtactgcaaaattatactgcaccagagacttcctgcaccacaggggtggcagtctaaagtgacacagcttcaagcatttttcacagacaagaagcaaaatttaacccccttaaggggaagtatgatttcaacagcttgaaatgag

SEQ ID NO: 9841 - DNA, 6000 bp, Homo sapiens
aggaaggggaagttgccaggccagttaacatttagaactggtgcatagtcttgcttctgccacattgaattaaagcaatcacagaatccatccagattcgagagtgttgaactcatctacctctcttgatgggagaatggcgagttctcatttcagaatagcatttggaatgggagatattgctatggacattttgtagaatacagtctgccatggccagatatgtagcttacattaagtatgtttaccttaaaattgaatccttacctgtcataaagcataaagcatgttacctaagctctgtttgcctgtgatctttttggtataaatctagcagtctttaccatggtaggctcacagtaaatgtttaaagaataaatacattgattacatttatatttattgataaggggtgcagatagtgtgatacattaataaaattactgaacttaaaccattataacactgcaagtcgaattatataaacattaaagacctgcattattatgaatatttcaattttggtattataatgaacttctagggtattccatttttgtctaaaactgggtaaactaggtgatcaacataataggaatttgtcttctctttttttcaaacaatagctgggaaaataatataattaaacttattcaaatatgttgttttaaaaagtgattggtatgcttaactttattgcagtatagtaaaagtctctagaaaagtaaaaattatgttcatatatggaatacatgaacatttacttgtttgattaatacagataagttgaggtaatagttacttttacaagaaactgaagctacactggtgttagaacaaaatctcaaaggtgtgcatttttctcctttgtcttttgcctggtaaatgctatatggtgaatggtataaacacctactttgataaattaatgacatcattccgcttttctcttgaacatgtttatgaaggcatcattcttgcaggagactagagtgttgcgatacacagtcatatacttatacattatttcagaagacattgaaacccctcggggagaaatctagagggttgaggttcatttgcgacaagtcccacttgagtgcagcatcttgaaatggctttttgttttccaatagaatgtattacatatttcaaactgtacatgtttatcacacattccctgggcttgccttatttacagatggtttgaataaatttttctgtctttcttcaatatttgtaaagggtggttgtagttaaaagccagcccttgttttacatgaagatgtatttgctctacagaatgtgcattatccaaacacaacaatgctggcatcctttcatagtgaagtcggccattctgcatctttctttattgatggtcaaaatagtctcctttgtgctaaaaagtcttacatgtctttaagaaggaagaagtttcttgtggtattttgggtttgtatgctgacaaagactgtaaattaacttttaagtgtggtattttattgcattccaaattaaacaatggttttcctcctatgtgtataacactccatattgaaacaattatctattttaatctcttaaataacttcagctttggcacatttttcatatttctcctagtgccacacacagacactttaaaaaccacccagaaatgaaaaataatgcattatattaaagaatgttgtgtgtatatataacagatatatacacataataatatataattacatatatgtgtgtatatgcatactttttcaatgtaatatattagcttttatttcttagttttttaatacatctgtatatggcacatatctctcctagcttatatgtatacacacacacacacacacacacatatatatatataatatatttacacttatatatgtgtgtggaaggtcatgcccttggaaataaactttggttttaaattctgcatttgatacatgtgatctgtggcaactttggtaagacccttaatccctctgaatttcaatattctcccctgtaaaatgatcatttaaaaagtaactcaaaaagttattgaattaaatgagtaaatcttataaaatatgcttagctacaaagtaagtgctcattaaatgagttaattgcaatatttttaataatcatttatttttaatgttttccatttctattgaacagatttatcaaagttcaaattcattgggataaaaagcagaaaatgtttttcttctttttttttgagacggagtctccctctgtcgcccaggatgcagtgcagtggcacgatcttggatcactgcaacctcctcctcccgggttggaacaattctcctgcctcagccttccgagtagctgggattacaggtgtctgccaccacacccggctaatttttgtatttttagtagagacggggtttcgccgtgttggccaggctggtcttgaactcctgatgccacccaccttggcctcccagagtgctgggattacaggtgcacaccaccaagcccagcttgaaaacgtttttcttcaaaaaactcccatgccaccctaaaaactgtgccatatcaaagttatttttccctctctatagtagagatcttggagcagatcctactggttttaactttatttagatcttgaccaggtcctgtatggttttgttttgtttgcttgctgttaaaatctagttctatgaatttaatgtcatgtaattaatttttttttttttttttgagacagagtctcactctgtcacccaggctagagtgcaatggtttgatcttggctcactgcaacccctgcctctcgggttcaagtgattctcctgcctcagcctcccgagtagctgggattacaggcatgcaccaccacacccggctaatttttgtatttttagtagagacagggtttcgtcgtgttggccaggctggtctcaaactcctgacctcaggtgatccacccacctcagcctctcaaagtgctgggattacaagcatgagccaccacgcccagtcatttctgttaattttaaaacctcaattgtgcattcccagacatcctttgccaaatgcccttttctgtggcaatggtggcatggagaaagtgatcatgttctgcttttaaatacctccctccacctgcctctgccaggtgcattctcctagggctaaggcagggaagatggaatgagaaaagggaaaactagatgaggatccagtcttctgcttggttagctctaaaggctattcttatctcatcttactctatgagtatcataagggtgctaaaggagaggtgccgacattcacttatcccactgatgaaggcctcaatcctgggcaccatctctaggcatttgcagttcttaagtgatttatccatatcttcaggtaaactaccagttgatgacattcatgctgtatctctcctagcctcccaagctgtggaggtcaccagatgaccctagaccctaatctcagctgctctccaataccagtgctcagtttggcagcttgtgtagaatctatcctctttacttctcaggagtgcaaaatttgatgaggtgttttaatgacctttccatctgaaagtcctccatatgtcatctctttaaccttgcttagagaatattaggactgttgagcaagtcactgaccaaggactcctccaactagaaatccaaccatgtcttccttttttgatggcactcttttaatttaagagttattctcttagcattctcctcccatggggatgacttccttccacgaatcttgcttcctactaaagtcaaaatgctctataccttctcggtcatctattcactgtggatcatagccctagtggtgttagtggaaggatggcttctagctgttgttattcttcatgtctgcagagagttggttgaaaccaattaattggtaactgtttacctatattttgggagactacttcattttgtcctcaactctggttcttaaattaattccaggacataagaaaaaatacctttaaatatatttttaaaaaagatagaataacaataaatgcaatagtgttaaaaatagttaatgatctttaatgaaactcatagcgaataaatcagagaagaattactcttggcttccatagcttttttttaatagaataaaatctaaaggaaattatgtcatatgctgaatgtgtgcttttttaaatcttatgaaattttactctttatagtgaagatgaatgacttcatttgcttgaaaaagtaggagaggtgatttaaaaaagggaaagaaacagatgtttgtggagcaaagtgtttcaggatgaatgtcagttgtcttcagtaatgataaactatggataatatttgaaatgctttaggacagatacatatgtgtatgttttcaaaacaagtattacttttccttttttcatgaaacataatccaaatgataaaacataagaaggcttagagataactgactatatttctattaaacttgaatcagaaagtaacccggtggagcctctggttgcgaagtgcaactcaatataaaatcaaacttaaatatattgtgatattcagttgtttttctgaacatatgagctcaaaagaagtaaaggtcaaatctgcatgcttgtgaatttcttgggtaatttgtccttttatgtcttaaataacaagctgagccagacctatttattcatcttcatacagacggcagcctgtgagtcctcctccaccaccacggccgatctcccctccacatacctatggctacatttcaggacccctggtctcagatatggatacggatgcgccagaagaggaagaagacgaagccgacatggaggtagccaagatgcaaaccagaaggcttttgttacgtgggcttgagcagacacctgcctccagtgttggggacctggagagctctgtcacggggtccatgatcaacggctggggctcagcctcagaggaggacaacatttccagcggacgctccagtgttagttcttcggacggctcctttttcactgatgctgactttgcccaggcagtcgcagcagcggcagagtatgctggtctgaaagtagcacgacggcaaatgcaggatgctgctggtgagtcctaacacttttcaccaagctgggaaagaaaactcaatgtatatatgtttgttgctgattctgtcctatgatcttacgtcctatttgaaaagcatctattcttacagtttttttttttttttagctgcctaaggaaatgacagtccaagaatatgacttagttggattattcccttttccttgacaaggctttttaaatcttctatttagtttttatttaataaatcttacataatatgagtgatagggagctacctcattttttaggatagccatagcaaatatacgtattacacaaattgatataatttctttaaactatacatacagtcaattagatgaagtttgtgtttttgaatgtatactctaattttttgtgtagaacctcaccaaaatcaaatttgttgtgatagttctcttgtttaaataaaaattctgtagggaaaatacataaatatccaagtagatcactttgacctttggaaaatgggctatttctccttaattcccattctctttatgtcctctcaaattagaatattaattgggaagatatgacggtatatgtaatgtgcatacattttcaagcataaacgttccatacttacagtaaacattttaaatataataattgggagagcaagctaaaccaagtgcttttcatatttttactttcattgctagtaacccatttttaattaccatatattcatctttatgttacaacatatttttacttatctcctcctcttcccaattctgtttagaaagtaaatagttcaagaaagaaaagaatttaaatgtaagacttatttatcacatgattttcatttctgtagaattaatatatacattcccatacatatttttgtgtgttt

SEQ ID NO: 9842 - DNA, 6000 bp, Homo sapiens
tagagttagaattgaaagttagttctacaacaagtgagcttactaaaaaatcagaagaggtatttcagttacaagagcagataaataaacagggtttagaaatcgagagtctaaagacagtatcccatgaagctgaagtccatgccgaaagcctgcagcagaaattggaaagcagccaactacaaattgctggcctagaacatctaagagaattgcaacctaaactggatgaactgcaaaaactcataagcaaaaaggaagaagacgttagctacctttctggacaacttagtgagaaagaagcagctctcactaaaatacagacagagataatagaacaagaagatttaattaaggctctgcatacacagctagaaatgcaagccaaagagcatgatgagaggataaagcagctacaggtggaactttgtgaaatgaagcaaaaaccagaagagattggagaagaaagtagagcaaagcaacaaatacaaaggaaactgcaagctgcccttatttcccgaaaagaagcactaaaagaaaacaaaagtctccaagaggaattgtctttggccagaggtaccattgaacgtctcaccaagtctctggcagatgtggaaagccaagtttctgctcaaaataaagaaaaagatacggtcttaggaaggttagctcttcttcaagaagaaagagacaaactcattacagaaatggacaggtctttattggaaaatcagagtctcagcagctcctgtgaaagtctaaaactagctctagagggtcttactgaagacaaggaaaagttagtgaaggaaattgaatctttgaaatcttctaagattgcagaaagtactgagtggcaagagaaacacaaggagctacaaaaagagtatgaaattcttctgcagtcctatgagaatgttagtaatgaagcagaaaggattcagcatgtggtggaagctgtgaggcaagagaaacaagaactgtatggcaagttaagaagcacagaggcaaacaagaaggagacagaaaagcagttgcaggaagctgagcaagaaatggaggaaatgaaagaaaagatgagaaagtttgctaaatctaaacagcagaaaatcctagagctggaagaagagaatgaccggcttagggcagaggtgcaccctgcaggagatacagctaaagagtgtatggaaacacttctttcttccaatgccagcatgaaggaagaacttgaaagggtcaaaatggagtatgaaaccctttctaagaagtttcagtctttaatgtctgagaaagactctctaagtgaagaggttcaagatttaaagcatcagatagaaggtaatgtatctaaacaagctaacctagaggccaccgagaaacatgataaccaaacgaatgtcactgaagagggaacacagtctataccaggtgagactgaagagcaagactctctgagtatgagcacaagacctacatgttcagaatcggttccatcagcgaagagtgccaaccctgctgtaagtaaggatttcagctcacatgatgaaattaataactacctacagcagattgatcagctcaaagaaagaattgctggattagaggaggagaagcagaaaaacaaggaatttagccagactttagaaaatgagaaaaataccttactgagtcagatatcaacaaaggatggtgaactaaaaatgcttcaggaggaagtaaccaaaatgaacctgttaaatcagcaaatccaagaagaactctccagagttaccaaactaaaggagacagcagaagaagagaaagatgatttggaagagaggcttatgaatcaattagcagaacttaatggaagcattgggaattactgtcaggatgttacagatgcccaaataaaaaatgagctattggaatctgaaatgaagaaccttaaaaagtgtgtgagtgaattggaagaagaaaagcagcagttagtcaaggaaaaaactaaggtggaatcagaaatacgaaaggaatatttggagaaaatacaaggtgctcagaaagaacccggaaataaaagccatgcaaaggaacttcaggaactgttaaaagaaaaacaacaagaagtaaagcagctacagaaggactgcatcaggtatcaagagaaaattagtgctctggagagaactgttaaagctctagaatttgttcaaactgaatctcaaaaagatttggaaataaccaaagaaaatctggctcaagcagttgaacaccgcaaaaaggcacaagcagaattagctagcttcaaagtcctgctagatgacactcaaagtgaagcagcaagggtcctagcagacaatctcaagttgaaaaaggaacttcagtcaaataaagaatcagttaaaagccagatgaaacaaaaggatgaagatcttgagcgaagactggaacaggcagaagagaagcacctgaaagagaagaagaatatgcaagagaaactggatgctttgcgcagagaaaaagtccacttggaagagacaattggagagattcaggttactttgaacaagaaagacaaggaagttcagcaacttcaggaaaacttggacagtactgtgacccagcttgcagcctttactaagagcatgtcttccctccaggatgatcgtgacagggtgatagatgaagctaagaaatgggagaggaagtttagtgatgcgattcaaagcaaagaagaagaaattagactcaaagaagataattgcagtgttctaaaggatcaacttagacagatgtccatccatatggaagaattaaagattaacatttccaggtaaatgagtagtgaatttttcctcctccagaggtaacttcaagcaaagaaagtctctaaactatttctgtttccttttagacaatgggactaattttggcataaatgtccatggaagatatattctctctcacttctgacttttttttggcaaacaacaatcctgctacaactgcatgaacatgaaaagttcgcatcttctcttcccatctttctattgagagatttctgtacttctgttttgttttgtttaagatggagtcttgctcttgtcacccaggctggaatgcaatggcacgattttggctcactgcaacctctgcctcctgggttcaagcaattctcctgcctcagcctcccgagtagctgggattacaggagcctaccaacacgcccagctaattttttgtatttttagtagagagggggtttcaccatgttggccaggctggtctcgaactcctgacctcaggtgatccacccacctcggcctcccaaagtgctgggattacaggcatgagccattgcacctggcctctgtatttcttttcatttccatttcaactactcttgcctggatttttaccacagtactctcaaattaattgtctagtctcgtcttttcttcttcctttagtccacattaattcatactgcatatacctcttagagttattttttctcaaatttcaattttctgtcactttttaatctatagaactaataatgtctctcatcctttgtattccttacttccaataggacccttctgttctaaaacagattttctcactgtctttcatatcaagattatcccttagagaagccaaacgttagcttgtctggagcaaagtagaataaaataggagaaaatgttacttttcagtgttgaaaaccatgtcactaaaataagtgacatattttggagtttatgacttaaatatatgaacccttaagtatgatatacctttaatacatagcactcagtagataaacatgtaggtgcagagaattaatacctcttcagtaaaatatttaacacctgttatgaatgttaattcatttgtaaatctattgagtacatgttatagtatttgttccttgggaaacacagtttttttcttgaaatctgtaactaatgaccttctctctgtttcaggcttgaacatgacaagcagatttgggagtccaaggcccagacagaggtccagcttcagcagaaggtctgtgatactctacagggggaaaacaaagaacttttgtcccagctagaagagacacgccacctataccacagttctcagaatgaattagctaagttggaatcagaacttaagagtctcaaagaccagttgactgatttaagtaactctttagaaaaatgtaaggaacaaaaaggaaacttggaagggatcataaggcagcaagaggctgatattcaaaattctaagttcagttatgaacaactggagactgatcttcaggcctccagagaactgaccagtaggctgcatgaagaaataaatatgaaagagcaaaagattataagcctgctttctggcaaggaagaggcaatccaagtagctattgctgaactgcgtcagcaacatgataaagaaattaaagagctggaaaacctgctgtcccaggaggaagaggagaatattgttttagaagaggagaacaaaaaggctgttgataaaaccaatcagcttatggaaacactgaaaaccatcaaaaaggaaaacattcagcaaaaggcacagttggattcctttgttaaatccatgtcttctctccaaaatgatcgagaccgcatagtgggtgactatcaacagctggaagagcgacatctctctataatcttggaaaaagaccaactcatccaagaggctgctgcagagaataataagcttaaagaagaaatacgaggcttgagaagtcatatggatgatctcaattctgagaatgccaagctagatgcagaactgatccaatatagagaagacctgaaccaagtgataacaataaaggacagccaacaaaagcagcttcttgaagttcaacttcagcaaaataaggagctggaaaataaatatgctaaattagaagaaaagctgaaggaatctgaggaagcaaatgaggatctgcggaggtcctttaatgccctacaagaagagaaacaagatttatctaaagagattgagagtttgaaagtatctatatcccagctaacaagacaagtaacagccttgcaagaagaaggtactttaggactctatcatgcccagttaaaagtaaaagaagaagaggtacacaggttaagtgctttgttttcctcctctcaaaagagaattgcagaactggaagaagaattggtttgtgttcaaaaggaagctgccaagaaggtaggtgaaattgaagataaactgaagaaagaattaaagcatcttcatcatgatgcagggataatgagaaatgaaactgaaacagcagaagagagagtggcagagctagcaagagatttggtggagatggaacagaaattactcatggtcaccaaagaaaataaaggtctcacagcacaaattcagtcttttggaaggtctatgagttccttgcaaaatagtagagatcatgccaatgaggaacttgatgaactgaaaaggaaatatgatgccagtctgaaggaattggcacagttgaaagaacagggactcttaaacagagagagagatgctcttctttctgaaaccgccttttcaatgaactccactgaggagaatagcttgtctcaccttgagaaacttaaccaacagctcctatccaaagatgagcaattgcttcacttgtcctcacaactagaagattcttataaccaagtgcagtccttttccaaggctatggccagtctgcagaatgagagagatcacctgtggaatgagctggagaaatttcgaaagtcagaggaagggaagcagaggtctgcagctcagccttccaccagcccagctgaagtacagagtttaaaaaaagctatgtcttcactccaaaatgacagagacagactagtgagtagctagttctttctttctgatctgtttaagagtttttgaacctttctttaaatttatttttatagaaaaggataaacacattcttatacatattatctgggaacgcaggga

SEQ ID NO: 9843 - DNA, 6000 bp, Homo sapiens
ggggcagcaagaaaattcacatgctcatcagaaggcacccgaattccacattgttctgtcttcttactgccaccccactttgtgtccccacaagaccctcaagaagctggcgtggaggaactggagactgaagaagttaaatgacagagccacattcagagcccagttttgcagaagttgtgcccgcctattaaagacaacttggaaaataatgggaaaacaaaaaattgtctataactttaaccccagtcccaaccacaaccacattatggggtattttgttctcttaatggagagttatgcttgtttcttaagtagtttgtaatcacactataactatagtgctgaattctttgttttcatcttatattgtagatatttacatataattttatcctttctatgaataatttctgatggctgtagaggagatatctgagtttatttaccttttccagcacagtaggatattcatgcctttccctttttctcactattaataaaaatactgttgcatatatttcagaatacttcttgtggatagattcccctgaagtagaatcactgagtcaaggataatttacacagagtaaaattgaccctttttaggtataaagtcttatagccacccccacaattgagatatggattatttccatcaccccggaaagtttcccagcatgcctttgtcatccatctcctcccatgaccctaagccactttggcgactactgatctgttttctgtacctgtatttttttctttttctggataccatatgaatggaattagccttttgagtctggctttttgcccttaacgtaatgctttgagattcatccatgttgtggtgtgttatcagtagtttgttcctttttattgcagtgtagtatttaattgtatggatgtattatgatgtgtctgttgattactgatggacatttgggttgtttctagtttatgatgattgcaaataacatttttataaatacttgcatataggtttttatttgagcataaagtttaatttcttttgggtaaataccaaagagtggaattgctggattgatagtaagtgtatatgtaactttgtaagaatctgtcaaactgttttccagagttggtgaaacattttgtattctcttaggcaattatgagagttctaatctttccactttttttttttttttttttgagacggagtctcgctctgttgcccaggctggagtgcagtggcatgatcttggctcactgcaaactgtgcctcccaggttcacgccattctcctgccttagcctcccgagtagctgggattacaggcacccaccaccacgcccagctaattttttgtattttagtagagacggggtttcaccgtgttagccaggatggtctcgatcttctgacctcgtgatccacccacctcggcctcccaaagtgctgggattacaggcatgagccaccgcgccaggcctcgttccacatttttatcagcacttgatactgtcagagtttgtttgttggtttgctattcaaatacggatctaatggctatctcgctgtggttcaaatttgcatttccttaatgactaatgatgttgagaacccttttgtgtgcttgtttccacccatatctcttctttggtgaattgtctgtgcaaatcttttgaccactttttaaattcagttgtttgggttttttcttagtgactaatgacagttctttatatattctgtaaacaaatcctttatcagattttaattttttcaaatattttctcccagtctgtgccctgtcatttcattttctccacagtatttttcaaagaaggttttgaacaaataagtttttgttttgatgaagcccagttcatcaactttttatcctatgaatcatcttatctaagaaatctttgcctatgtcacagtcacaaagattttctcctaggtttccttcagaagttttatagctttaggtctacgtttaggtcaatgatccactttgagttaatttttgtgtgtgatgagacatatgggttgaacttcattttttttgcatatgaatatccagttccagtatttgctgctgaattgactagatatgtgtggatctatttttgctctatctatcccagtccactgatctatgcattctgtcattgcatatattttgtcatgaccatagccttgattactgtagctttgtaataagtcttgacctaagatacgaagtcctccaactttgttctttttcaaaattgttttgctagtttccattgcttacaatttcatataaatattataatcagcttgtcattttctcaaaaaggccttctaggcttttgattgtgattgtgtcaaatctataaaccaatttgcagagagatggcgtctcaacaccatcggctcttccaatcctgaaatgatatctctgtccatttatttaggtttctgattttccttaaggttcttaatacaatttgtcaaattaaaagttggttttctgcttccttgctagggtgttgagcacatggctgtgcccttttggataacagattcacatgtttcctgcaaaaaactctactagtttatactttctctctattgtattttatttcccaagcatctggctccctcttttccacaatccatggcttataatgcattgccttatttatttaataggttttaactctttatcaaaatgtacacatcaaaaactatagttatatatatagtttatatatatttatatatagtttatatatatactatacatctcgataaatgctcataaggtcaagaaacagaacatcaccagcaccttgaaagcctctttgtgaccccttccaatcctgacagcaaggagaaccactattccaactcctacccataagtagttttgttatggcttagcatttcattgcagtaagggaccttctaggcttctcactccaggttcctaaaatgtgtctggcctcttcactgtgctcctttcccctctgagcttctgttagcgcctagaatgcccacttcctcttctgccttctcccttcttattccttctttcagcttcctttaatttttttaaaattatttgtttttatttttatttatttatttttttacagacaggatcttgctctgttgcccaggctggagcacagtggcatgatcatagctcactgcagtctcaaactcctgggctcaagtgatcctcctgccttggccacctgaatagttgggatgacaggtgcacatctccatggctggctaattttttaatattttttgtagagatggggtctccctatgttgcctaggctggtcttgaactcctggcctcatgccgtcctctcacctcagcctcccaaagtgttgggattctaggtgtgagccatcccaccctctttcagcttccttgaagtgtcctcctcattttttccagctcagtttaagtttcgtctgcgctgggaagcctctccctcctcctcctctccctggcttccattagcattggactttccttcattaacactcctgtcatggtgtattgaagttgctgtttccatttgactataagctctttgaggtctggaactagcttttctgtggacccagtgccttctgtggggcctggcatgcagtaagagatcagtgattgaatgctggatgaatattgagtgtctaggaaactgattctccaaaaggctaatccctttgttcactgtaggtctcctggctgtcagtcctcactggcttcttttcaaacttcttttcctcctcatgttggcgggctcttttgtgatttatttattttttatttccatgccgcctctggagcaagtgagaaaatatcatagctcttttggctgttttatccaccattatgatgataagtaagagaggatgataccctctactcttcatctgtcgtaagagagcaatagcttttaacctgtaaggtctgtgaatccagtctcctatttcagtagcaagtgtgcaggtatagaagactctcagcagtgtttaaatccttcatttattcatgctgctaccgacgcatttggggatgcccgttcaccattactatgaaggcgaccatatcccagtgtttcttgctctgtatcaaggtctagctgctcctaaaaatgatgactgggagtgtttttgtgtagagttggcaccacagtggcagagtatgaaaaatgtagagtccttcctttccaatacagactgtattcagctgtgcctccatctgaattctggataaatttcagatagtggagcagaaagggagaaaagggatctgattgactttaactaccaatgtggctcaaataacaattggaatggtttatatctaccagaatagacggcaggttttacaaaccctcaaaagacagacccatctattggtcatttgagtgctctgttctgattgactcaggtctaatggggggacttaacaatcttaaccatcatcttagactagctagcccagccaaccaggggatgttgttgggggaaaggttaaaagttgttctggggaaggaagaatagctgaggccaaaaggggaagcatccaggaggagcagctctcaggggtcatcagtgaaaggagcagagaagagtatgatgagctggagggagggggtttcaggtgcattggccaaagtgggcaaagacttggacatttgtctgtgtgcatctgggcttccccagtccaggctgcgtctcttcggagcctctgtggaatccctccccagtggttttgtgagtgtgccccaggtacacatggcaaggggaatgcctctgattcaggccgtgactcctggagaggggccagtgccctgcatgaccagggcaggactgggcagaaagactggtgtacccatccaccttctgtccttcaggagaagattggctggcgaaaggatgcactgcatttgctggtgttcacaacagatgatgtgccccacatcgcattggatggaaaattgggaggcctggtgcagccacacgatggccagtgccacctgaacgaggccaacgagtacactgcatccaaccagatggtgagtgccgggaaccagatcccccctccctgttgcctctcttgtgaccctgcccgtggtcttagtacttgcccagccttgaaaccttcctctggccctcagtattcactggctttctgatcccttcttggggttgggtttcattattcagtcttctccaactgggtttccggaactcctaattgacttacaacatttctcagggatttctgtagctggttcatctttctgtcaatgtgcgtctaaatgggaagtgtttggttgggatacgggtggcccaggggaaacaggatagatctcatagtggggagggtgtcttaaaggagggtgggtgctgtgcccctgcagaagtcacaactggtatagaagttatggggcaggacttcctgacttctagacgtgggctcccagaggtggtgagttgcctgtcagtgttagtggtggtgggcagaagtgttctgcatggaatgagaggtcccaaggaccatctactcccaacagtctataaccacaactatgcaatttgaaagaatttgtgcaaaatttcaaagatatataataatagaccagtaaaatgaaccctacatgcccatcacccagacccaacaatgatcaagatcttgcatactcactgtgcaattttcctgccaaaatctgcatccttttctttctcaaatccattctggtggccaaagaggaattcttcccaattttcttccttagagaagcccattttctccagtttcaagaggtggtcagtgcccaagccttccatcttgtttaagaataatggaatctgaaaaaaggactataactgtaggacctcaccagatgcgggcccctgtacccatcattagtcctcaaaatccctcaggacactgttaaactgcctcttagcttcctctcttcttcctctttctgc

SEQ ID NO: 9844 - DNA, 6000 bp, Homo sapiens
aataacttgctagtagcaaagccagatttgaacccaagccatttatgccagaatccatgcttcactactgtactatatggagccagactcaatcttgtttgttggatttgtgcctttccttgtatatttaagaaaagccttccttattttgcagtgctgcctttgaaaggtttttaaattttgccttttacatttgggatttaattgtctatctggagtgagttagaaacctaattttatggccgggcacagtggctcacgcctataatcccagcactttgggaggcgggcagatcactgggggtcaggaattcaagaccagcctgggcaacatggtgaaaccccgtctctactaaaaatgcaaaaaaaatagctgggtgtggtggcgtgcgcctgtaatcccagctactcaggaagaggcaggagaatcgcttgaagccaggaggcagaggttgcagtgagctgacgtcgcgcctttgcacttcagcctgggcaacaaaagcaaaactctgtctcaaaaaaaaaagaagagaaatctaattttatgttgttgtatatgaacagcctaatatgccagcaaaggctgttgaaaaagggaaccacttttcagttggtgccttcaaaactcatagctaagtgctaagtattaatgcctagagcatggaattcccctttaaggactttgttcctaactcagagtatatcacgactgttttcctcccctgtcctgtgattctgtagtccaatgtaactttctctttctttcctcctttactctccctctgcaccccactcttcttcttcctctcctctggttttttcctctctccttccctttctttcactccatcattctcctctcttcccctccccttatttcccattttctccctcctttaaaaaaattgtttctgctagaattgggaggagttccagtagtccagtgattcatggtttcaggtgttaaactaccttactgctgaagctatgggttagtttttttagaggctgaagacgttgggttctatcagctatactcttgcaggcatgttgatgattctgagtaggagccaggacacactatggctccaaacagcccaagtaggacggaagtcagattaaagacagcctagtttatttcttcagttactacataaggaaataaaatcacatctaaaatgtgatcacttgtaaatatggggatacattctgaggaatgcatttagggagttttgtcaaagtgcaaacatcgctgagtgtgcttacacaaacctagatggtataacgcctgggctatgtggtatagcctattgtttctaggctacaaacctgtacagcaggttactgtactgaatactgtaggcagtgtaccacagtagtgtttgcatatctaaacatagctaaacagaaaaggtacagtaaaaatctggtattatagtcttatggaaccactgttgtatatgcagtccatcattgaccgaaatgtcattatgcagcatatgactgtatgttgaaagtttagtgtagagattttttttttttttcattttagagatataatcaaatacaatcatggctcactgcaacctctgcttcccaggttcaagctatcctcccacctcagcctcctgagcagctgggactccaggcatgtgccaccatgcccagctaatttttaatttttctgtagagatggggtttccccatgttgcccaggctgttcccaaactcctgggctcaagcgatcctcccgccttggcctcccaaagtgctgagattacaggtgtgagccactgtgcctggccatagctacacttctttagtctacagattgcatgtaaatattcatattaatatcagagaacctaagagagagataactagagcatgcagaagcttagagtcttggatctagtgacattcttatatttgctttcctttatattgtggtatattttgagcttaattattaaacataaatactcatcaaggtcaaggatctgaaatctcattcagaaagaaaatgcaacaattggaaccctgtgcaacctagaagacattgggcactgaataaagtggatttccaggagctcttgttgcaactcttggcaccttgcttatctggaactctggctgctcctcccttgtgctgcgtctgtccattccactgcttgttagcatgcaccaaaagatgaattgggcagaaggaggaagtgacacaaaacagttattgtgctagtaactattccagatattctcttttattcactagtggtgcataacgttattttgtcattaatttcagtattaaattctcttttgattttatttaaatgcacagtatttctcatttgttcatctagaaagaaggtagtgtttttattcacatcaatggtaatatattgaattcaataatgaactaaatgtgttttatggctcagagatcagcatagctcctgctcagatggcaaactgaggtaatacatcccagatgaaaaaaagaagatgttatccctaggttaattattggcgtttcataaatatttcaaacttggtgcattattgtcatgaaaatatgaggaagaaggtgatcttgtatatagttctttctagcaaattgttacctggtacagattaagatgggaaccaagaaaaggattgtaatttggcacttatactggggatttttattaccctaagaaggttattttattactcattactcattactctgttactgcttaacagagagcaggtttgtttttttatttttagagacagggtctcgctctgtcactcagactggagtgcagtggtgcagtcatagctcactgcagcctggaactactgggctcaagtgatcctcccacctcagcttccctactagctggaactatgggtgtgtgccaccataactgtgtaatttaaaaaaaaaatgtgtagagagggggtctcactatgttgcccagggtggtcttaaactcttggcctcaagtgatccttctcctttgacctcccaaagcactgggaatatagacgtgagccactgtgcctggccaagaacagtttctagagccttcttctttgggacctattcaaattcaccaccacaagccacacccagggatgacctactgaaggatttttttgtcctgaatttgggaaacttgacctccccaaatttagctaactatgttgaagagtgaacatttatgcttttaaatctgagtatcttgtctttttcttcaactcctttgaatggttctcacccacatgaaaggattaagtatacgtgctttggagtcccttgcctaacaaaaaccttttactggataaaggtcacaaaatatgggctccgaaagacctgatccttgtccctgacttgttaacttagctcttactgttcctgtccctgagttttcaagttttcttgctcaaggttatcacctttgatttggtaacattcatctttgccactttcagcagttactttcccatcttgcctccaaccatctccagctgccacttaaatatccttagaatatatagaatgatccatcacccttgacatgatttggataaaaatcattatgataaaaattgcatttttatatctagccagtaacatacctattcttgccgacacatttaggtgaccataatctataagtgtggatcagaattacagtgatgtctgaacaccaaaagggttttcatataattatattgaaatgcagatgcaacttgttttacatagatgttcttctgaataaaaattatgtgtaaagaaagtgaattaattcatactttaaacccactaagggagtgttattgtgtgaagaaacactgaaaaatcctctagcaaaggaagaatcccccagcttatatcttgtgcagatcttttttcatatatctgttttgcttaaagtatacttgtatgagggcagtatgtaagagggagacagggctggcataggacaagggggaattataggtcagttatctactgagatttgagagtagacacatttccaatacattttggcccattgattttgaagacgtagtcctcttgggcttctaacatgtacctcttgtttttacactagatcgaacggttggaagtaagcagccttgcccaaacatccagtgcagtggcctccagtaccgatggcagcatccacacagactctgtggatggaacaccagaccctcagcgcacaaaggctgccattgctcacctgcagcagaagatcctgaagctcacagaacaaatcaagattgcacaaacagcccgggacgacaacgttgctgaatacttgaagcttgccaacagtgcagacaaacagcaggctgcccgcatcaagcaagtctttgagaagaagaaccagaaatctgcccaaactatcctccagctgcaaaagaaacttgagcactaccacaggaagctcagagaggtagagcagaatgggatcccccggcagccaaaggatgtcttcagggacatgcaccagggtctgaaggatgtaggagcaaaggtgactggcttcagtgaaggtgtggtggatagtgtcaaaggtgggttttccagcttctcccaggccacccattcagcagcaggcgctgtagtctcaaagcccagagagattgcctcactcattcggaacaaatttggcagtgcagacaacatccccaacctgaaggactctttagaggaagggcaagtggatgatgcggggaaggctttgggagtgatttcaaactttcagtctagcccaaaatatggtagtgaagaagattgttctagtgccacttcaggctcagtgggagccaacagcaccacagggggcatcgctgtaggagcatccagctccaaaacaaacaccctggacatgcagagctcaggatttgatgcactactacatgagatccaggagatccgggaaacccaggccagactagaggaatcctttgagactctcaaggaacattatcagagggactattccttaataatgcagaccttacaggaggagcgatataggtaagtcacatggaattaatatctgaaattatttgtgtagggttcccctccctttagatatggggaaatggcttttaaaagtctttatctttctctagagtgtccagagcactttcggtatgtcataagacatccacatgagttcctgatgaagcattgctgtaactctccagtctttcgtgccagtttagaactttaaaatgaagtccaagctttctaaagtatttcacctatttatttataattataaaactacacagtcattgcagcctgtaactgtactacattgaattcaaaagatctgtaattcttagaactgtgtagatatcaaagatatcacccaagcaaaatgtagtgacttctataggtatttggccttaaacacacatatctgggcaacttggtatagaaagattagactgcaaacaaatccaaataagaatgttacctttattatgaattgacaagtgtttgaatgagagtggacttaaacatgaaatggttctacaagagttagaaaattctcaaagggttaagtgctttgaatcatagtctctgttaagggtagaagctggtctcgtttttgtgtttaatattacactacatattcatattagaccactcttggctatactctgaatatgtgtcctttctccttgttaccttcacacgcagagagaaataatattctcgtctggagaaatcccatctctactaaaaatacaaaattagccgggtgtggtggtgcatgcctgtaatcccagctactcaggaggctgaggcaggagagtcgcttgaacccaggaggtggaggttgcggtgagccgagatctcaccattgtgttccagcctcggcaacaagagcgaaactccgtctcaaaaaaaaaaaaaaatttttttctaaggatacatccaaactttgttagccagagacaggccacctaatgctgcaaatt

SEQ ID NO: 9845 - DNA, 6000 bp, Homo sapiens
aaagaaaaaagatatttggaagtacatggagctcactttgcctatgagttgtgtgcatttcgaggtgggagacgggagagggagtgcaagagaggctggaatgagatttttttttgtagtgatacttggttttctgaggcataatctagtgaggagagagggccttgacgtttttatttagcgatcatgcctccagtcatgtgttctgaggctcatgttcggttttgcattgatagacttggaattataggacattcttggcttttgaactagctcattgtgctgaatgtggtaatttttgtgaaagcatactgaaacgtctaaaataacttccaaggcaaaacagtttagtacagctactgcagctatatgtagagcaccaacatttatacttagtcgggttttaatctcagcactcagttcttcggtattccaactataagaaccccatcatgcttcccttgggccagggtatcttaaacatattgaggttaacatattgagccagataattcgttgctgtggggggctgtcctgtgcttggtaggatgataacagccagtagcacccctaccccaagtggtaacaaccaaaaatcagggttttttttaaactgtctttgttggaaggaaaatcagaatcttctgaggaaaaggatttttgttctcttcttggatgttaagaaaattggcttgtgttggctgggtgcggtggctcatgactgtaatcccagcactctggtaggcccgatcactctgggaggtgatcttgtgggcagatcacaagatcaggagttcaagaccaacctggccaacatagtgaaaccccgtctctactaaaaatacaaaaaattagccaggcatagtggcaggcgcctgtaatcccagctactcgggaggctgaggcaggagaatcacttgaacccaggaggcggaggttgcagtgagccgagattgcaccactgcactccagtctgggccacagtgagagactttgtctcaaaaaaaaaaaaaaaagaaagaaagaaaaaagaaaattggctttttttttttagccattaaaataaggataagtcagttctcccccaaaaattaaatgagaagtaacactcataaaacaatttgttctctctctcttttcttctccctctccacacacacaccccctcaaattttttgctaatagtgactacaaatttctgagcagttagtggtagatgaatatcaaggcatattgcacccttttatctagctcataggtcaatttgatgtcacattgacataattatttaaatgggctattttctccacagactgttttaatttcatgaccctggtctctgggtcattgttattagaatctgattatctcatggaaaattaatatggccacatattttcttatgtgcgtccatacttttggcttacttcttgaatattttattactggctccattgcttttggttggaaaagaaggttcaatcattgctgcatagattatcattccagtaggtgccctgggcagcaatttctgaaccatcccttttgaaattttgttcccagctggagaaatgtcacagttgtctcagcttttgactctgacttttagtgagagatgcaaggaataggaaaacactttcaagaagaagcaatgagcagttgtatgcacatctggtgacttattgctgaagattctaaagcatttaaaaatattgattaagcctcaaactgttgggaaattgttcccataactttcattctgcccctagatttgctgaggttttgagctgtatttagcttggtgaatcttgtgtaatggccagaaagagacctcaggagccccatcccccaggttcttattagccttgacaagagtgttgttaaaattgcagactcttcacagttccaaagagatgccgtttcttgctgtttcaataccaagtctaaaacaatctctgtatacattttggcttctaaaatatattctgaggtaaaatagcaggttctactgtctttgagaagaccatttcttttgtttgtggtaactagtcatgttggtctcttttttccttctctttgttatatttatttggactttaatgttggctatgccctttaatgaaaaaaaatcaggcatttcccagatttagatttttattataaacacttcatattttaagtggtatatctctagggagaaatgtatgaagaattgatggaagttggaaattttttagttagtaattaacacctaccattaaaaacaagtgcaaatcacatgatggcaaagtgaatctattacatatcataatcaaagattaatcaaagtaattaccaggcaaacagggattgaatagaacttaaaaccaattaaactatttcggctgtaccactgaataaacactttggtattttaatttctcctctcttcatttgcttcagcaatatgtttgctaatatgactgaggtgcacaattgctatttaattaacctatttttgtcagaacctcacacgagctgcgtggagtagatctgctaaagtctcaataataatgagcctgataaaaaataaccaacatgaaattcgtgccagtcattttacaagttatgccaaatgtaataatatctgaagaaaaaaagaaactggttaccttacagaaattggattgaaagtacttaaaaaacatgttgaaccaacacaaaattactcaaaagtttagtaaaatttcaaaaatgtataattgccttgtttctttgtaccccactttgcatatcattaccattaactattggtaataaatctattcgagggcatggatctgttttggggatacttgagttgataatgggcacagaagggtttggtagtggacatcttttacccaatcatgtatcctttgggagagaatacttttctagctattgagtaaggcatcacgaaagtgttgatccattttgcttttattccctaagacaatcaaaacgctaacacagtttgggtggtcttggcctcaatgatacacattttttcacaaaagataacataactaaccatgtgaagaaagcctcacctttctctacctttggatagtagggatgaaagaaagtaagatggagaaatccacattaaatataaagactctttccccacaaaatcccagagctcttctgattggcaccatgaagacaaaacattctgattggatttttggttcttcacccaggtgttttactatcaggtagacacagtttgtgtacaactaaataagaccatttcctgcccaagctgtcttttttccccacacatttaaaatttactcacacttactgagcatgatgtttcaagttttctgaaacagctggttagtagccagttgatcactggcccctaaaggtaacaaagaccctccatccccaaatttttgccagtcaaaaaagcatgactttatttcactcccgtcaccccagtgctattacgaggtgtaagcacctttctagtgaaggtctattttctagatcttaggacaagaatagaatgtcacattgtaagcgttctcagaggtctgcagcaaagcccttattgtacagaaaagaaaactaagactcacaaaggtgtagatcacctgtttgtttgtttggggtttttttttgttgtttatttgtttgtttttgcagcaagatgaggattagaactcagatttctgactccctcaatgttctcccttctttatcatacaggctccttaactactggctgctttgcgtgtggtggactttaaatgatcacacgggtgccttaatcacagcctttttatgagtgacacaggcgctgagtctccctttttctaaaatggaatgttttatatccataacccagacttgcttaactaaggtcaaatttacataaacaaatgtcttccggggccagcaggtagcatgtctgggcaaaagcgtgtgtggcaaggttttgataaagcgcagaacacatgttctgtttaaaaatgttcacattcagattctcaaatctctctcttgccagaccaagcatgtccacaggctactggtttataacccctgactgcatcacgatgcagacagagtaaggaggagtgttcttacagttatgcaaatggaatccatatcaccagttccttttagaatactagatgtcccaagtgtgccatgccaaacccttttgctttgaatgccctggacttctagtattcaatgaagaggcacgacttggggaacatgaaacacccccataaacaccagctttagttcagccagtgtccccaaagactgactctgaaaagaacatacacgtgtatgtcgcataaaatccgtagaagagatgatgctgctacccacaaccttcttgggagctgctgagaatccctaacagacaaaccgaatcatagggcaaacccaccctatgtaccaaacaaccagtgtaattatattctgtagttgaggaattacataaattgcccattgggaaagaagccttaatctccatccctcccccgaaatctatcaacagctgtgtgagcctctgtgtatttttgaaaggttgaacacatttgatcggagaacaaacttgatttcctaatcaggttcgatgcgaggagagccagttagagatgtgtgtgattctcccagtgtgcgtctttgattcgtgtgctaattatgtcgatcctttggggaacacagccaggaagctgggtcctccttgatgaatgctggcggagagccatgcagcgcgcagcggagagcagttcagcatctctagtcccagctgagaatatggtcccattatctcccagctgcctaagcaatccataagggcctgttctgcgtggatgatcagtgtagtggaagcagggacttgctgagagctgaaatctctgtttgatttgctgtaacatgtaaagcgaaactgggacattttactttacagtctgtaagtaccaggttttacccccctctttctccctacagctccatgtgaatgtgactttgcaagctgcatttgattttctgttccattgctctttgttgaatcaagctggtgaggtagagtgtgatctgtttagagcttgctgtttctgttaaatctcttatataattgattcatacaaggaaataggagcctttcagaatgcttttatagaaattagaaattattggctttgtttttaatttgggagtgtggttgcattatctttggtgccaggatgattagagcatatatttatcttcttctgtacctctggccattgcaagaaaaatgtaagtaaaactaatatatatataaagagataatctttatatgcatgcctgtataaaagaagtgcctgtatttccagaatttaaatttaacatagtttattttgctgttctctgctgctactaagaaaggcagaaacagaaaagtttctcttgtttttcagttgcatgctgtttagaaactttgccatggaggtgggcaggataactgtttggaatatttgcaaatataaactgtatatctccttttttatgagacagtacataaaataagagtctgtgtttagccccttattgcttttgaatgcaccacttcttaagaagtaatgtgaattaaaaaaacaaaaaaaatcactttaaatttggttcatttatctttttatgtatcctcaaatgccatctatcaaattaatatttattattcatgcaagattcattgtaaaaatgctattagaatttaatattgttaataatgtttgcatgatgtctttcacatgatcaatgccttagtgaaattaaagattgttatcactgtggaaagggatttgtggatttttctgtttccctaacctaaacataaatcacacctgtctttttttattaaaagtggaataattgagctgttgtaaaaattgaatttgaataaaagtggcttgaacagcatgaaccaatggccagggctaatgtgaaccaaagtgaacttaaaatcat

SEQ ID NO: 9846 - DNA, 6000 bp, Homo sapiens
aaaaaaaaaatcagagcttctgttatttacctgttatatgctcaccttctcttgcatgcacacacactccctctttctcccctacttttcagcagtttactaacagaatcagtttcagtctgcttctggattctaagttaccctctaacctttatttaccagtccttagaaacaaattgaattctttctaaatttattctgtcaaattaatgtaaaagccgtgagtgtttaaaatcatctttgaatttatctggtgggatatggcatactggactagatcatttagaaactccctttcccctgccccccgtttattttattttttttaaatgatctggtcttgtttaatgccttagccttattagtcaactaaaagcttaagagaattggaaaactttctacaactttatctcaaatgtgtttctctggaagtgggttctccatggatattgtttttatttgatcactaccttattttttctgactgccaactgtctgaaataggttgacacctataaatgaaaactgaaattctttgaacattagtttgtctatctataattagcaataaacataaaggcaataaaagatttacaaaataataaaaaggcagattaatttcatccatgtttttccttccaaggttacattgcaccatggagtggcaggttttattcattgtgggatactgggtaagtacagttacattatttggcatcatatttattgaaatactgcttttcctttgtttttatctgttttgtcagtgtttcactcagttcttgggcaacacttctaagtaccaaagatgctagtttagtaaatgttaaattccttttactttatcttgttatgatacctgttctgaatgcatctttagtatgaaatgtacgttgtgtattactgttctgcatgggcaactccttgtttccgttttgtttgtaagaatatttaggttacctttgtgcaatttaaagattgatttgtcttttataacattttcatctttagtaataattttttattcttaagaattcttaaggatactgtttaattgccatagataggaagaaaatttaattttttctaataccatctgatctaagtttttttgtttttttaaatctgtgaaacacaagagaatatatatctgttgtggtttttttttttaaagtgctgttataaaatgagttaatacatttggttttgaattagactagttcaataaaactttttttctctaaaatgttttcctggagattagaaaatatctattgattataatttatgcccctcctctgttcctgctgttctgtcttgttactccccaggtggctcaataaaaaacaatttattgaacagacatgctttctgatgtgataccagaaggacttgtgtccaggtctaattaaaggacataagcaaattatgcatgaatgactggaactaacaattagacacatacttcaagagttcagcctgtggatcactaacgaatttgaaggataacccaagttgtagaatgttattctgattaggttaaattactaggttaacttgtgcagttatattataaagtaataatataactgtaaaataaattatacagttatatataactgtaaagtaaaattgtaatattataatataacttgtgcagttatattataaagtagtcaattaattgactactttagaatctcagggtgtttcagtaataattttttcagtcctttccatttccttcacctgtctccatgccagcttcatgtcaagcaaggcattattgtgtaaggtgtaattattgggtaaagtatttctgctacaggttgagtattcaaaatctgaaacgctctaaaatcatgaacttgttgagcaccaacatgatgctaaaaggaaatgcttattgaagcatttcagaatttcagattagagatgctgaactggtaagtataatgcaaatattctaaaatctgaaacactgctggttctaagcatttcagataaaggatattcagtctgtagtaataattccaaaaggtaatgagactcgttgatgcaaacatgaaaaatgctgacttaaactacagaacaaattgccagttgaacagagatttctgtattggaattcagagccaacattctcatgtctggatctagataattctctgaattttacagagggcatattagttttagttttaccagtgtagaccaaacagaaactatccagtataactggttaccttggaaggtatatttaaataagaaggggtagggagtaggtaccatttctacaaccaaacaagatttcttcatctaaaaggaactcctgttttatcacttaattgtaaacaatattaacttttttaataccaggtatgcaaaaatacacattccaattattgcatcagtgtctgagcatcaacctacgacttgggtgtctttcttctttgatctacatattcttgtatgtaccttcccagcaggcctttggttctgcatcaaaaatatcaacgatgaaagagtatttggtaagagaggtttttaatgaatactttgatatggaatagttatttttctttttgagattatttactttaaatttttgtttttctatgtttgactctatatattcaagataaattttctcctttattttgcataggtgcttaaccaagaaaaattcactgagaggctgggcatggtggcacacgcctgtaatcccagcactttgggaggccgaggcgggcggatcacctgaggtcaggagttcgagaccagcctggccaacatggtgaaaccttgtctctactaaaaatacaaaaattagccgaacatggtggtgcatgcctgtaatcccagctactcaggaggctgaggcaggataattgcttgaacctgggaggcggaggttgcagtgagtcaagatcaagccactgcactccaccctgggaatcagagcgggactctgtctcaaaaaaaaaaaaaaaaagaaaaaaattcattgaatttgtattaagtattttgattgttttaatttaggactagtatattatggtttctgagaggttaatgttgtagtttgtgtttgagaattgaaaattttaactttgttgacaatagccttgactttgttttctgagtaaaattttatttaagtaggaagaagtttttagggacattcatcttccagatttcagagcaaagaccattttatagcggaataaggatcacctttcactaaacatcctcttcattgacagatttgtatatttccaactaataagacttgaaatacaaaatatttaaatgccaagtatttagggttctatatttctaatataagtggacaaaataagcagatatcaaaggcttctacatgatttaatcacacatgaaatatgctgtggttgttttgtatgagataaaaactgaaactgagaaaaactttatcacgtgcacaggatcacaccagttggtaagtaatttgtagtgctagaaacttgtacaattataggatctggaccatgagtgacacatgaatcaggaaagaaagaacagcacctgtaggggttcagtttaaaggattgcacactcattgttctctaggttaatggatcctggatgaggccctgttaatactgcatcattcaagaagatttaacttaaacctcatgactcagtaatcccattcctatgtatatatctaagagaagtgagtgcatatgtctaccagaagacatgtttaagaatgcattagtaattttatctacagtaacccctaatagtaaatattccaaagtcatcagcagtagcatgaataaatttttgtatatctgtagtggaatacaacacaacaatcattaaagaacaggatggggaaataagagaagccaatacaaaagagaacatttttatgtggttacattcctgtaaagttcaacaataaggaatactaattctttagaagtctaaatagtggttaccttttttgataggggagggggttgttactgactgagaagaggcatgaggacatataaaaatgttctatatcattatgggttgtagttacacaggtgtgtatatatacaaattcattgagatacacacttaagaatatgatgcgatgtattttttagtcaggaagaaaaatttaattagcatcagataaggtaggagctcacatgactcactgaatttgtaaagttatacatagccttcagccagaaatagttagagtcttttcctgtggttagcacattatccagaaagctctggctattggaaatttgtttcaaaaattttttttaagtttcttggcagtaactttgcaggttcctcctttgattaataacttacgttcttctcatcccgtttttgttttaaagcaggttttatgccagatattggcactggctttttatagattttaaatctataaatttattttgcctggagatgtcatgcacaaatatgtttttatctgccagctatgggttttttatgatgttattgacaaatagtgaattaagtctaattcttcataactaattaaatttgaatcatatacatttttctaaactgtggatgtgtaggttttatttagtgaacactagttataatttctaaatgtggctaattaatcagttgttcagtagtatcaatttagaaacaattagatcgtttgtgagacatttatataattccaggttggttttatagttttaagtatctagttcagtttcctgggaactttttccctccaacatattgtaagagaatttgtctttgcagttgctctatatgcaatcagtgctgtctactttgctggagtgatggtgcgactgatgttgactttgactccagtcgtgtgtatgctgtctgcaattgccttttcaaatgtttttgagcactatttgggggatgacatgaaaagggaaaatccacctgtggaggacagcagtgatgaggatgacaaaagaaaccaaggaaatttgtatgataaggtggggaatctaaagtaaggcctttaaattgtctatgtcctttcttaatttttccaccacagtaagaactatacatatcaagaaatgttattaaatgatgatttggacaaactgtgacttttctagttggtctccactgtttgcctcaaaatatgaatcctggtcagtcctttagctcagagttagaaaatagaatgtaatcagagaaggaattcctctttttggtaatttgttatctaaatacttaagatatatacccttgttaatatacccttccatttttgagagcaaaaactttatgctgtactaaattacataacatttggcactgtaaacccctctgaaaccatgtggacagacaggtgcttatccttgaggtccatactcagtgcatactttcaaaatattttggaagtgacatttgattggttgaacagtaaaatgaagggagcaaaatgccttttttaaaaccctccagttcgttagcaataggtaactggccaatacaggtaatttatttttaatctatagtttctcagttggtgcaagtgtgaaaaggacttgtaagaattagagcacttgtcttggatgacatattaaactttgctatttgaatattgcctggattttaaaatactaataaattaaacttcccagtatcagtaataactttgaaattctttccttctataagatgaatgtaattcataaagatgtgtgttaataaacccacattcctgatttttgtgtttgttgttattgttggggtttttttgttgctttgtggtttcttaaccagccttgaaatttagaagttgtgactttttctattctctcttcccttttctgttggggaaggtgattttttaaggtaatcgtagttttaacaagtctgttggttttagggtttcgaaatcggaagactgattctgttaatgcagttttttcctatactaaagtggtacatggtcaaaattatagctgagca

SEQ ID NO: 9847 - DNA, 6000 bp, Homo sapiens
gcctagcatccctgggctgtcctgatatagagttccagactgagtgaggtggctgcctccaggcacagcactagggtgtcaccggggtccccagccggggagtgggagcctggtggtgcaggggcaccctggtgggtcacagggtccctggccctctgcccacaggtgacagacgggtcctcggtggcactggtgcccaagcagacgtccgcctacaacatctccaactcctccaccttcaccaagtccctcagcagatacggtgaggggccaggcagcgggcgagagggcagcgcatgggtccctggcctgggcaggacgtcccccgggctcccacgctgcagcagccggacgggaggacccaggggcaggtgtcaagcctgtcactcgcactcttggccttaccctccagctctggaggctgcgcctcctcgcgactgtgtgtccgtacacaattatgccacctctgtggtgtcatcggctgccccaaaatcccacatgggtgggggtgccatccccagctttcagatggggaaacaggctcgggcggggggtgcggggtgccagccaacgcgggcgctgacagcctggtgctgcagagagcatgctgcgcacggccagcagccccgacagcctgcgctcgcgcacgcccatgatcacgcccgacctggagagcggcaccaagctgtggcacctggtgaagaaccacgaccacctggaccagcgtgagggtgaccgcggcagcaagatggtctcggagatctacttgacacggctactggccaccaaggtgggcctggctggcagatgggggcaggggacgctgggccaactgagctcagagaaagtgccaagcccagagcaagggcctcacccccatgctcccatggccacttgcctagtcacccaggaggtgtaggcagccaggcagcgccctggggctcagtgtccctgcctgccccccgcagggcacactgcagaagtttgtggacgacctgtttgagaccatcttcagcacggcacaccggggctcagccctgccgctggccatcaagtacatgttcgacttcctggatgagcaggccgacaagcaccagatccacgatgctgacgtgcgccacacctggaagagcaactggtaatgcagggcagggggaggaggggcatcccccagggccaggccagatgtgttcccagggccctcgccctgttctgatccggagcccccacttggggctccctggcgtggggacacaacccagcaggggcatggcgggccagtcctgtgctaactggccttccctatctgcctgtgccccttgacccacggctcgccctctgctccagccgctgagcccctcccactgctgcaggaactgtgtgcaggtgtgagtggctctgggtgtgcacagctgtgcggacatgagtgtgggctgcagcgtgagaaacagggcacagtggaccagccccaagccggctggttgcagtgatgagggcaacagggactgcaggtactcctggtagtctttagtgcgaggaatttacagcctccccattgcagtgtggggccaggccagagcctgcttactgaggcgcagaggccgagccacttgccacggtctcacggagcagctggagtacggagcagggcctgcccagcctgcaccgtgcacagctacaccaatgtgagctggggctctatgaggctgggttttgttatgaagaggcacccagcctctgagtggcctccctccagagtatctgcctccctggccagccagtcccttgctttcctccggcctggcccacccctgggacagtgacctgcttcttccctggtcatggactgcccaactcagcaatgttggcttcctctctgccacacaggcaggccagcccttggcctcactccttactcaggacccccaagctctggtctgtggccccctgctccggttggcacactgtagccacaccctagcccctggagcgggtccctgctgtgtgtgtggcccccaccccagcagacaaccccaccattgcctgctacaggggagcccctctctgtgcaccaggcccctctacctgcatggccgagggcttctggggtaggactgctcccccacacctggggtcaggtggatgcccttgcctgtatggctggaccctgcttcaccaggaagtgcccctcctcaccgtgcatcctgctggggtctccccccagttctgtgcacactctccactgtcttagctcccctctctcctggactgtccctgccacttctgctggctcccgggccagcagccacccccgacttggtcttgtccatcccatgtgttgcttcccaaacctgggatgcagccaccccaacctgtcccagctccgcccactgctcgcggagtctaggatttaaatgaagtgtcacgaagcccctctcctgggccatgctgattgggcacagcgggaggtggggcctccagggacgcagtgtctccaggtcagcatgttcttggagaatgttctgtcacagtggaacattctagacccgtgctgtccagggtggtggctcctgagcctttgaaatggcactggtgtggctgagtgtctgggctcttcacttcatttaagttaagcagccacgtgtggccagtgctgccaggcagcccagctaatggcagtccctgaggtggtgtttggggcacagagggctggtctctgcaggaatgggtcccctgggccggagctgagctgcaggtctcagtgcaggagccatgagtgcaagccagcatgcaggcctaggagggtggtggctgtgtggagtgggcccctgagggcctggtcacatcttgcccttgtgcaaacgagtgcgtttgagcacgcctatctcatgatgctctgcgtgagatgcaggtggtgggggcagcacatctctggttgggtggcaggggacggccttcacttaaccatgggccctgcacctctgtgggcctcgtttccccgtctgcatggaaagccatgcccactttggattcggagctgggagggccacaaggtcactgctcaggagggagcagaggcctatctgagcagcgcctggactctcgcctgcagcctgcccctgcgcttctgggtgaacgtgatcaagaacccacagtttgtgttcgacattcacaagaacagcatcacggacgcctgcttgtcggtggtggcccagaccttcatggactcctgctccacctctgagcacaagctgggcaaggactcaccctccaacaagctgctctacgccaaggacatccccaactacaagagctgggtggagaggtaggtggagggtgcaggggtcgggggcaggggcccgggggcagcctggactctgctcatgtgcccacctggccactcacctgcaggtactatgcagacatcgccaagatgccagccatcagcgaccaggacatgagtgcgtatctggctgagcagtcccgcctgcacctgagccagttcaacagcatgagcgccttgcacgagatctactcctacatcaccaagtacaaggatgaggtgaacaccgtgggagcccacaggctgggctaggagggcttgccggcccctgccagagtcacctgctctgccccgccctgccactcctccctgaatctctgggctgccactgaccaccttcactcctctgcaccctctggccacctggttccttggggccaggagggagcctgccaggccgagcagagaaggccgtggtggagtcactgtgtgcagccatgtggggtcaggggtggggaagatgggatggcagcttcttcctgaggcagagggtgtgtgggtggtgagcaacttccctgaggggctcatttcagggttttctagtctgggccagcatctccagggctgggcataggctcttggcagagctttcctttcagtatcttttctgctgacttggagtgaggccacgtacatggacctggggacggggtccaggaggtatccaggaaggagaactggctcctgggccgcacaggatgggagcacggggccagagggcaggacagtctcggcctgtgccaaggctctgagggctaagaaggccacgggagtgaaccagagccaccctggggaggccagggcaggtgcagcagaggcaaggaaccttccccagggtgccacaggaggcagacaggaggcagagggctgtcctcaggcaggtgccccaggggagcagaggagcagccagagactgcatgtattagggtggggagtggggacaaaagcctggggtcctggggctcaccagggaaaggggagctgaggctctctggggagctctgctttaaaggggcacagaaaccccagggtgtgaggactgggtggggacatgtcagcagcatggccaggcagccaagggatcagagcctgctgttttagggggtgagagtaggatgatgacaggggcagggctcattctccatattggggtcctggagggtccaggctcacaaccaaggtcctttggccaggggtagatggggttgaacctctggcacctactctggaggcatctgccctgggcctgctgagtgcatggaggctggtggcccggcatgctgacagttctcctggccctgcagatcctggcagccctggagaaggatgagcaggcgcggcggcagcggctgcggagcaagctggagcaggtggtggacacgatggccctgagcagctgagccccagctgtgatcatccagcatgatgcagcgtgaggacagctgagcagggaccgggacagccctcaccgcatgcgtgtggagtgtccggtggtgctcgggccgccgcagtgcagcgactgcccggccctccctcccctgcctcacccggtcgggtcccggctcttcctgtgtggaggtgatggtacctgccacaccacagctgcgcacacagctgcttgctcaggggccgggacagcactgggtgctcaggctggccaaggaccttcattgcctggcaagagctgcccagtggccttcatgggagaagggctgacctctgaggggctgaggggtgaggccagggccctccagggggaggggtagccagcttgggctgtccccttgagaccaggacaagaggctgggggtgtcagcattcccagctttccaagctgcccccaggcggcagagtctgagggtcccggggcccggttggcagctggagaaagaggcaaaaagcccgtagccgggcaagaggagctcaagtcggtctgggcccgttgccaccgactcccacctccagcacccatgcccgctgcaccgctgccatcctcagattcaccgcgtgctctgcgcggccgaggccggagcaccacatccacctcgccccagagaggctctgctccctcctatggaggggctgtgggccaggctgctcagactcctgggtggcttccagacggaccgggcagcccctctccgtcctcagggctgtgcctctgggagccactgggccaggggccccgggtcgcagagagcacgttcccgttatttattcccctccgcgtcctacacaggctgccctggcagctgtcttcaagggtaggctgagctccccaccctggagcccctgagggcggcccctgagcactcctctctctccactctctctgtccctgccccagcggcttccagtgtggcatctcagcagtgtcctggcccctccagagcagtgggacatctggggactgtttttgtgtttaggggaaaaaattctgctgcactctgcttgggccttgaggtctgtggcagggctcctctggcccgcagtggcctggatctatctgggccatgagtgacgggcagtgaccagagggactggaggccagcggtgtccacccttgccctcagcaagagagaatgcattcttaaaagaaagctgtacatgtatatatatgcatatatatatatgtggctctagcctcaggctccagc

SEQ ID NO: 9848 - DNA, 6000 bp, Homo sapiens
cactttcaaggtgggggaaaactaagaagcaaaggtggatttgtctggccttgaagtcagtgtgtctacatgtcagttgctcgtgtttgggacctggctgacacgagatgcattcaggaagggctgtgccccatggcctgcatgtgggcagtgagtggtgctagagggagagcctagggaggggcagggagagccacacagagggcacagctgggacggcagctttgcagctgtgcctggagatgttgcagcttggcttgggacaggggaggctgttgaatgagattctacaggcagagacagtaatcactgctgcttccctgggcagcaggaacaatgcagaactgggaattagtcccaaatttgaaaccgtggggaaacaggccagccttgtcacacaggaccaaaaggtggaaaggatgggaattgacgaaagaccgccacagggtgagatgaggacatgatggccagttaggatatggtgtctctttcacagaagccacagcagaggaggtcagtggtcatattggttagatggtctgcctgacatgtcatctcggaatggtccaggaagatgtagcaggtggtcctagctatcacgtgttagaaacttgggaacagtgcttttgagttctttagtttcaccttttcctagattcacttgctttttagtcatgggaggagtaaaagtgaaagttggaagatttgttctatgaaaggaaaatcagggagcagaacctactcctgacagcatccagagacacaatctggagatgtcacacctgcagcaccgaaactcaatgtcaggcacttggggtctggatggctcctgagctgaactacagatttgggccacctctctaggctcaccatccagatctgggtccagaggacagaattattacctttgggttaaagtgatcccttctcaagtttttatttaatgtgcttttaaaaggcaaaccccacataccatcagtttggttactcttcccattccctcagctaccaagttattttggttgaatagaagctttcctttttgtagggtgtcttcatttcttacatctcactctatttcactgttaggcacaagggaatggacacatttgacaagttccacagtactagatgggtcctctaagtacagtctgaccttcagtttcagctttcctatttaatctgtcatgtaaaattaattgtactccaaagtggccatcaaatacagtccctatttgactttttgttgttgttgagacggagtcttgctctgtcacccaggctggagtgcattggcgccatctcggctcactgcaacctccgcctcccgggttcaagcagttctctgcctcagcctcctgagtatgggattacaggcgcccgccaccatgttcggctaatttttttgtattattagtagagacagggtttcaccatcttggccaggctggtcttgaactcctgaccttgtgatccgcccgcgtcagtctcccaaagtgctgggattacaggcgtgagccaccacgcccgactcctatttgacttttttaaaagtgctcctcagagtactgataccatgaccccacactgcccacagagaccctgtctctggaagtaatgccagcttcctgccagtagaagcagcgtgagttgccaggcttccattatgggatggttatgctgtcctggaacggcagaggttatcacttgtttctttttttcgctttttagttttttaacgtaagtaaatttcttgctgatgtctaaaacttaggccttaataatgcaccacactccccgccttcctctcacttgttactctgttgtctggttcttagattgggtccctttcctatatccctcagtccctcagtaagctcactccacccctaggcctgcctccctcaggagcatctcctggcagggtgtcatttggatgggaccacatggtggacgcaagcatatcctctgtacttgtatccttggtgtgagaagcagagagctggagcctccccactcaccagccaagggcagcctgcacttcatagctgttgaatgggtacttgtacttctcaagattgtccaggaaagtagatttgccagctctgagccccctcttcagtggatgacccctttcagctagagttcagcagagtctgcttttatttttataaattatcatcgttccacacctctggtggccactgactcatgtgcctaagaaatgagaccaattaattttaaaaagtggaatagtggttgggtgctgtggctcacacctgtaatcccaacactttgggagggtgaggcgggaggattgcttgaggtcaggagttcgagaccagactgggtaacatagtgagacccccaactgtacaaaaataaaaaataaaaaattagccaggcgtggtagcatgcctatagtcccagctattcggaagtctgagataggatcacttgagcccaggaggagaaggttgaggctgcagtgagctgcaaccacaccactgcactctagcctaggcagccgagagagagggaccctgtctaaaaaaaatcaaaaacaaaccagaatagcccgtttctgtagtttgaattctctacagaagagaagggagggatgagaataatacatgctgtatccctgtggctatgggcaccatgagtctaataacttaagtttgttttcctctttttatttgtctgctaagaaggctagaagcaaattgagttgcctgttcgttccttcatatatgtctcctcctctgccaacaggaatggaatttgaaggtgctatcatcgcacttttccatctgctggccacacgcacagacaaggtccgagcccttcgggaggcgttctaccgccagaatcttcccaacctcatgaatctcatcgccaccatctttgtctttgcagtggtcatctatttccaggtgtgtccagatccaaccccagggagtttccatggtctggatttaagtttcagaatgccttgtgtgcagtcccccactctgtggggtgcactgtcatcatattgtgttgaaacgatgagatggtatttgaaggcagcaggtttccagatgagctggacaagcatgttcattgagtcatgggacctgccattaacgaaacaaaattaaggcagttctaacgtaagtgaaatcatgttcttctgggttgggcctatcgacaggtaagatacatttttaagttcttagttcaagagaagcaaaaagtactctagctctgaaacctcattgctctcttatagaaagtttgtatgatatttataggtaacttctgcatctcggaaacggcctatcttcttaagctgtcttacctttaaaagtattccatctcttaaacttgcttctgagtaagagacctgaactgctattgttttcctgtaattggattgatctttgtattttttgatggtccactttgtattttggtgtttatttaaaagaagggacagagatgaaaggcagtttgatgtttgtgaaaggtatttatacgagctacatgcttttcccattccttctgctgagactaagccacattcttgcttaataaaaagctatctctttaggggctttgccagaatttgcagtcagatcattaagaattttttttttttttttttttttgagacggagtcttgctctgttgcccaggctggagtgcagtggcgcgatctcgactcgactcactgcaacctccgcctcccaggttcaagcgattctcctgcctcagcctcccgagtagatgggattacaggtgcctgtcaccacgcccggctaatttttttttatttttagtatagacagggtttcaccgtgttagccaggatggtctcgatctcctgacctcgtgatccgcccgcctccacattacaaagcgctgggattacaggcgtgagccaccgcacccggccttaagtatttaatttttaaatcctctgtattccgagccctgttctaggtactgggagctcataaaaataaaccctttctagtctccaggggtttcagagggagaagttgtattcctagaaaagtttagcttttctgtttatgattaaaaacactgtaaggaactattataaggtgtgaggccactgctgtagtggccctgcctcagagccagtgtaaaagcttaggaaacatcaccagctagagagaagcgcccttgggatttgggtgtgtggcctccaggcttttctccatattccacacagatgtggatgtaatgtgataggctctgtcttttggaaaaaaaaaaagtgggggtggggatcattccaccgtgcttgcttccatgttttgttttgtgtgagacagggtctcgttgtgttgcttaggctggaatgcagtggcatgatctcggctcactgcagcctagacctcccaggctcaagtgattgtcccacctcagcctcctgagtagctgggactacaggcgcgcaccaccacacccggccagttttgtttattttttgtagagacggagtctgactgtgttgcccaggctggtatcgaacttctgggctcaagcaattctcccacctcggcctcccaaagtgctgggattacaggtgtaagtcaccacgcctagccttcagtgtatttttaaaccagcttttctgggccccttctggatgtgccaagtgcaggagtgcagtggtgggtaaggagtgggcacaagctctcggaactgggagccccagaaccagcacacaggatttcctcccttgtggcccactggacagtccccggccgggctgtgtttctgtgcagcaggctgaaatgaggcagtgaaggggatttggttctgtttggcttctcagggcttccgagtggacctgccaatcaagtcggcccgctaccgtggccagtacaacacctatcccatcaagctcttctatacgtccaacatccccatcatcctgcagtctgccctggtgtccaacctttatgtcatctcccaaatgctctcagctcgcttcagtggcaacttgctggtcagcctgctgggcacctggtcggtaagtaggctctttgaagatgagctagcaatgcagctaagttgcagtggtttctatcagtgtcttgctcatgaacagatatttcatccaaagatattttccattgtgccttttacaaattcagcacattaaattatcttttcagtaaaaaaattgtactgtgggcaccgagtaaaattgcattctttcatctgctcagaactatttttgccttgatgctaaagtaaaatgaaggagcactcacatgcgtttggtttcttcttccccaggacacgtcttctgggggcccagcacgtgcttatccagttggtggcctttgctattacctgtcccctccagaatcttttggctccgtgttagaagacccggtccatgcagttgtatacatagtgttcatgctgggctcctgtgcattcttctccaaaacgtggattgaggtctcaggttcctctgccaaagatgtaagtagaagcaaaactttctggaagggtgatgaaagtgtgactggtataaggggtgtggacttgtcacctcatcataaataatggtctgtgacgtgtgcagatagatcgtcgtcctttagggggcagttcagaagctttaagggctgacagatggagtccagcagtagatcagctgtgggtatgagaatctgaatccacactgtaaagttagactttttcatatgacttccttgcggcagttttaaagttctctgtatgaatattgtcagtgctcgaagaggcgatctgtaactgttcagtaccacttggaatgcctatttccccttcagcctccaattccaacttctcccctgtgggcaccctgcaggttgcaaagcagctgaaggagcagcagatggtgatgagaggccaccgagagacctccatggtccatgaactcaaccggtgagtggtggccccaggtccccaacctcccgtctgtggaca

SEQ ID NO: 9849 - DNA, 6000 bp, Homo sapiens
aaggaaaaattttgagaaatctaattatgctcttaaatgtataaaagctactccatttttaaaaatcaataatttctcttatttagatttttaaaagtcagatttgactgtgagtgataggaaacctgaaataaaagcatcttaatacaaaatagatgcttatttcttttttatcagtgaaatctgtaggtaagctgtacagatacgtcagctccatggtggatcccagctcttcttttctcctctgtctgaggcttctagctaaggttaccttatggtccagaatgactgccaatcttatatctgcatcgaaaagaggaaaggagagtgaagaatatgtctcctctttaaggagaccagtttaaggacactgtccagaaagctggtaatttcatttctgcttgaattccattggccagaacatagtcacatggtcatgcatatgagaagtaaaatcttggaaatgcactttttatacaggatgattatttgcccagccgaaatgtagggtttccattattatcaaagaaaaaagagcagaataggagatagctacaagtctctatctcttacagaatgtaagtcagacacatcacttgaggggcttaaaatttttaacatttcttgatgctttatgcttatcatttgtaatggaagatttgtatggtggtagccttccataaagactgcttaattcagtcacttcaccagtacgtaaacatgagttatatactgggcattgaactgttgtgaatttcaggatatatcctttcctgttatacctatacaatagtaacatctataaagtcatggctcctagggttgtgtgtttgaaattcttacttgcatgagactatctagagtgggattgtgggggaggattatatatctataataaagtgtcctcaggtgactgatgtgaaccccttgttgagaaccactgtaatagaaatttttatttttataggcgttgggaatagcttgataagtaggataaaatctcttaatggtctagcaaagatacaggcacttaaacatgttaatatagtacagtgtggtaagcattaatggtgtgaaagcaccaggtaggaatagttaatttagtcaggaaggataagaagggtctaaaggacatttgagcttagacttgaagatgactggcagattgccaggcgtgccaggaaggaggttaggtctgttagggaaggaaacagcctgagcaaacgcatgggtgcttggtatcctgagaagcctagattttattctgtagaaagcagcatgcactccataacttttaaagttgtgaaatatcttttttaaaaaaacatgtttttttagaatggaaactggcagaagtaatatctgtgaatctgattcccaaggaaatgggcagagtaaaataagaggttaaagtggaacctctggtgttaaaaattgaagaaccacgttggaaagacaataaagagttctggtcaatatagaaataagagggaagagtactgttatttatagaaactaagaaataaaactgagttttatggatgaatgatcaaacagagttctgatctgaatgaagtaaatttctgttgtgtaaaataagagcctgataaaagtaaattaagttttgaagtagtggttcccagcttatgggccctccatggaggagtaggcaatgaaattaatacagtcatagagactatgttcaccaagcatgatctttaataattgatctttgtgtcttctcaggagagaaaagtgtggagttgagtgatactagatctgtaatagggcctggctggaatctgtcttaactgcgcttttatcccagactggttcatcattacattagggacaaaaaggttggcagttgctggtgttttggttgaataaataatgatgtgcacacatggaacaatttttttttcccccaagacagagtcttgctctgtcgcccatgctggagtgcagtggtgtgatctcagctaactgcaacctctgcctcctgggttcaagcaattctcctgcctcagcctcccgagtagctgggattacaagcgtccaccaccacacctggctaatttttgtatttttagtagaggcagggtttcaccatgttggccaggcttgtcttgaactcctgacctcaagtgatctgcccgccttggcctccaaagtgctgggattataggcgtgagccaccaagcccagtcaaacaaatttttaagtgtatgtaagaacatacaaatttacttaagtgctttatagaatttatagttatcctataatcattttctagcgccagaagaaccactactactgaaggaaagatctttggaatttatttaccttagaaattacttctcgtatgttaagaggttgatgactgctttaagggacctaaaatatagaattaagcattactttctaatgtgacattagaacttttaagcaccgaggtttcttgattcttctaggtgtatgtatggatctatgacccagttcactttaaaacatttgtcatgggattaattcttggtaagtagtgagatgttaatagctataaagtgcaatctaaaatttagaaaacaatatgcagatactgtaaaagaaaatgttcctaaatttaacataaaatagttgtcattttaaaaatactttaaataaagtcagaagataaataatacactaaggaaaatatttgaaacatattaaagatcttttaagagattaacaaactgatagaaaaatggtcaaggtagttaacagataaagaaatacaatgaccaatcatcatgagtgatacttaatcacactcatatacaaattaaagctgtagtgattaagagtcttgcaaaccttaacattaaaggtcttagaaaaaaatcagctctctctaacagttgataggtatgtctattgttttaatttttgtaaagggcagtttgtcagtatctttgaaattttatgtgtctgcagtgacccagcaattctaggctgttcccatacagttgcacaaagtgtgtgcattgacacattatctgtttttttccaaatcccttagactatacttgagtataatctagcaaatatctttcaaattcaaaatgcttataccatttgatctaataaattccactttaaggaatttaccctatgccataatcacagttgcacaaacgtacatgtgcaaggatattatacctagaatagataaaaaaagaaaagaaagttacagacgagtaagaatagtataagctcatttacttatttagaaaaaaagtccctgtagctagttaattatatataggcagtctctgagaatacaggtaagcttaatagtacttaacctctgggaagtggaataagaattagatgaagacttaattttctctataccttttgatttgcttgtttgtgacagggtctcattcctgtcacccaggctggaatgcaatggcacaatcatggctcactgcagcccgacttgctggggtcaggtgatctcccacatcagcctactgagtagctggaactataggcacactccactacaccccgctaatttttgtatttttttgtagagatggggtttcgccatgttgcccaggctggtctcaaactcctgggcacttgcctcgttgtcccaaagtgctgggggtttgatttgtttttgatttgctttttaacgtgtgtattccaggaggttttatggggaaagaatgatttaacaaacagaaaaaaaaaaaataggtagcagttaaaataagcttggtcaatatggtatgataggatcccattcaaaataactctttaaggctgggctcagtggctcacacttgtaatcctaacactttaggaggccaaggcagggagatggcttgaatccaagggttcgaaaccagcctaggcaacatggcgaaacctcgtttctacaaaaaattagccgggtgtggtggttcacacctgtagtcccaactacttagaaggctgaggtgggaggatcacctaagctcaggaggtcgaggctgtcgtgagccaagatcatgccactgtactgcagcctgggtgacagagtaagactctgtttcagaaaacaaaaagcaaaataactcttttataataagagtactagtcactttgctagatattttgcgtacaatatatcatttcatcctcacaacaacctttgaagaataggaagagacttattaaatataaggtaacttagcctcaaaagagttaagtaacttgcccagggttacatagcttataagtgatggagctagaattttaatcctggtcttattctaaagacctaataaccaggcttctaatttcttataattctttcttgtgtccccactttacttgcaaaaaaactggagacacttgtaaacagtttccctaagcaccaaaaaatacatctgtagcagaaatcacctggggaatctttcagtctgtggatgtcagagctccaccccagaagaagaatctccagagaggggtcttggaaatcattttttgttggctttgttgttctgttgtttcttttagctcccttacttagtaggcaaatatcttagtattttttaaataaagtagatatagcttgaaaaagggggcagttgataaattaaggaggcaacagttttgaatttctacatagcatttttttctaattatatgtaatttacactaataaaaactagtttaagaatagtataaaatgttaggttgaacaatatgaaattgctcataattgaccattttttacctataaaaatggcaattttatatttcactgtgtttatgtttctcagtttttcccccagggatatgtttctgttagtgcagccataccatttaagtttttattctaaaatttaacttttgtcatttcttgttccagtgattgcagtaatagcggccaccctcttccccctttggccagcagaaatgagagtaggtgtttattacctcagtgtgggtgcaggctgttttgtagccagtattcttctccttgctgttggtaagtattgttattataaaattgacctcaagaaggttggtattgagcagttggactgtaatttggagcttcagtaaagcttaagaaaaattaatggaggtaaatcaagaaatatatggtactactttctgagtcaaatctcaaaactcaggcttggtaagatgtgttctgtctgcagaaaaaggatttaatacatctttaaaaaaattttttaataagattattttttattgacagatcataattgtatacatttatggggtacaatgtgatgttttggtgtatgtgtacaatgtggaatgtttaaatcaagctaattaacataattagcatattgatcacctttcttgcctatcatttattgtgagacatttgaaatttacttattttgaaatataccatacattattatatcttaatctgcaaatagatgtgctttaaaaattagttatggcagaggcgtttaatatttttgcagtggtagatcatttattagacataatactttcagtaaaacattttttaattttgacttagaacaaatgcaacatctaaataatctatgcatatatttaataaatgattctaaacaattgatttgccattttgggaaaaatcaataattttcacccaagtaccaaaatactagatgcaataaggagttaatgttttaaaaatcaaataggaaaacataagtaaatgaattttccgcatttctggatgattggggtctttcatagattatttgtttagaggcagggtcttgctctgtcacccaagctgaagtgcagtggtgagatcatagctcactgcagccttgaattcctgggcttaagcaatcctcctgcctcagcctcccaagtagctaggagtactggtgcatttcatcatgcctggctttttgtgggggagatagggtatcactctgcccaggctagtctcgaactcctgacctcaggtgatctgccctc

SEQ ID NO: 9850 - DNA, 6000 bp, Homo sapiens
catttcactcactctcccaagggtttatctcctctggcctctccgagtctcacctggaggtgtgtgttcctgtggcgtgggttccttgggagcgtgggtgattcaccggctggcctcatcccatactgatcctctggggtgatccctattcaccttgtctcctttgctgtcataactccactgctgggggcagaggtggagatgttgagcttgtgggcaggaataagttccactgagccacagagcttgactctgctcaccttcccacaatagaactcagagttggaatcctttccccagccacctcccctcccatctgaggacagagggtaacctgcccgtcatctctggggttatctccaattttcagtctccctcatctccagctgacctcccatatggccaaatcgatcctgaggttgggaatccagttcttcaaactgagcccttcagactctgctgtggtacgtgaaaacagtttcagtatcccgccataaataccttccaaaattctaaatgtagtacatgaccattgatatggtttggctgtgtcccacccagaatctcatcttgaattgtaatccccatatgtcaagggagagaccaggtggagggaattgaatcatgggggctgtttcccccatgctgttctcatgatagtgagtgagttctcacaagatctgatggtattttaagtgtttggtacttcctcctgctgccttgtgaggaaggtgccttgcttcccctttgccttgcaccatgattgtaagtttcctgaggcctcccaagccatgtggaactgcaagtcaattaaaactctttcctttataaattacccagtctccggcagttctcacacagaagtgtgagaatggactaatacaatcatgaccttaaaaaataaataaataaataaataaaacatggccgggcgcggtggctcccgcctgtaatcccagcactttgggaggccaaggcgggtggatcatctgaggtcaggagttcaagaccagcctggccaacatggtgaaaccccgtctctactaaaaatacaaaaaaaattagctgcatgtggtggcgggcacccataatctcagctactcggaggctgaggcaggagaatcgcttgaacctgggaggcagaggttgcagtgagctgagatctcaccactgtacgctagcttgggcaacagagtgagactctgtctcaaaaacaacaacaacaaatatttgaggcctacttttttgagaacagaaaagcaaattagacgtggtccttgcccctaaggtgctcacagtccactatctatctaggtcagatattttccactgctggtcagtgtttatgaggcaaactgtttactaacttgcctaacactgcctgtcccgtgcagttcttcctggattgacggcagctagatcctgtgacagaggacagctgttccccgctccctcccatcactcccctcctctgtctcctggccatagctgtgggctgcaactctgacttgagtgtttgtgtccctagtgcgtttagcttcgggtgggggctgcctttgcaggtactcgataaacacctgcatggggagttgaaataacaagttcttaaaggaatctaattcgagggcacactgctggtgggccctgtttggtggcccttgggctgagcacatgctttgatagttcactctcagaaacatccagtctggttcttaagtggccagaatgacccgatggagttaagatttcccgtttttggcatagggtcacctgtacgtctttcattctaaacaaaaaagtcaagcatgtcttgtcctgttctctcaagcgtgttagcgagatggaagacataatggtggccagagaagctggaagcaaaactaaacagaggtgcagatttgcagaagctaccccttggcatcacggggtgcagtttttctctgcttctcagttagataacttgacagagttttatttatttatttatttatttatttatttatttatttatttatttatatgttttagaaaactaagaggcctaggtaaataactgtgccttaaagcccttctttccaaccaggagtagcagcatgctagaaaagaaaagggtgggcctgggaaactagatttgaattttggttttgtcactttctagctgtgtggtctttcgaaaatcatttgattcctctgagcttcagcctcttcacctgtaaaataatcaacccacagcattactcagaagatttacaataaaagagaaaacctagcacattacgttatgtaagcgatacttataacaatgatgataatgataataatcatcatcataataacaattgaatggtgggctctctgctgctgcatgtaggtagacatggctctacttcgtcatcagagagggtctctgtggcctgaagcactcggcaggctccttgccttccacatatttctatgtgttgggatgagattgtcttcaatccttaaatatcaactagtagaagcctagtacagcttcaccttggaggagaaaaatatgtcgattcagctctactcagcaacttttttaaagtggagagattgagagagaaagagagagtaattgaaataatgcccacagttctgacagcctcttgatcagctgaaagcccacaagtgcaggtggggagacatgaattcgagttctctcagtctctgtagggtgagcagcttgttggtccaggtgtgatcccagtatttaaatgtttgtctttttagtgtaacatggtagtaaactgaagacaattacttcttctggtgcacatcctgatccctttcagggctggagtctaacacagctgtgttagattcactgagtgaattttatatgagtgttcagggctgtataaacagaccatatattctgtatttcataggtgattcaaagtggggggactttttgtttgtttaactttcatttactgcacatgaatagtcatacaaaataagatgttattttaactgacttcaaattcagctgtttattttttcatttttgctgtagatatttcagtatgtatatttaaaagatagagaccctttaaaaataggccggggcgcagtgactcacacctgtaatctcagcactttgggtggccaaggcggccaaggagtttgagaccagcctggccaacatgatgaaactccgtttctactaaaaacacaaaatttagccaggcatggtgggcgcctgtaatctcagctacttaggaagctgaggcaggggaatcgcttgaacccaggaggcggaggttgtagtgagccaagatcacgccactgcacactccagcctgagcagcagagtgagactccctctcaaaaacaaaaaaaaaagagaccctttaaaaataaaaactacaagatactattatcacattcaaataagtaagtaagtaagtattccttaataccagatatggagtcaatattcaattttcctcaattattatatatatatgtgtgtatgtgtatatattagtgtttgagtgtatgtatatagatatgggtgtgtatagttttaaaatagtttgtgtattcaaattaggatccagataaaatccaagtgcaatagattgataagacctttaagattgttaaaatgggccaggcatggtggctcacgcctgtaatcccagcactttgggaggcctaggaaggcggatcatgaggtcaggagattgagaccatcctggccaacatggtgaagccccgactctactaaaaatcaaaaattagctgggtgtggtggcatgtacctgtggtcccagctacttgggaggctgaggcaggagaattgcttggacccgggaggtggagcttgcagtgagccaagattgcgccactgcactccagcctgggtgacagagtgagacaccatctcaaaaaaaaaataataataaaataaaaaaaaaataaagaaattgttaaaatgcaggctgtgcatggtggcggctcactcctgtaatcctagcactttgggaggctgaggtgggtggatcacctgaggtcaggagttcgagaccaacctggccaacatggcgagaccccatctctactaaacatacaaaaattagccgggtatggtggcttatgcctgtaatcccagctactggggaggctgaggcaggagaatagcttgagcccgggaggcagaggctgcagtgagccgagattgtgccactgtgctccagcttgggtgacagattgagactctgtcttgagaaaaaaaaaagattgtttaataaatgcttttaatcaataacttcccacgggcggggacactgatttgaaatataatctttgggtgaggtgtgtggctgccctgtctctgtataggtagacacaggcccacaggtgcagtggccatattatcggtgcgtgtttactcccatcgcatgtaccattcctctcacaaacacctgcttcctgatcatttgtctttttaaataaaaatatgatatttgagattcttttattctctttaaatatttgaatacagagtctatttgaaggaccagtatattgaatagcagtaatatttgaaggactagtcagctgtagaagccttgacttcagatcttcacccaagaaactctgtgtatttgcttttcctgggccactcagatagacaattgtgtttttgatacagtaagagtttgcagcttagcttaactagaaataatccggatcttattttggaattaggaagaaacatgttatgatgtagaaaagcctgctctgttacctacatgatggcatagctttgtgcttttcatgctttgtggccttggaagggggtagatagagtgtaggtggttaggagttgtttcctggctaaaaataggaacagcatactgtgagacaggagcttcttctctcacaagcctctgtgcaaatagcggagggttacgcatttgctgcaggtggtacttaagctccaagaacttacggcacacctgcttgagtggatcatgggtgagctggagaacctgaagtagcaaaggcaagaaggcaacgacgttccatctgtggaaggacctaccaaccaggtatctctggtgacagggctcatctcataggtggcccactgtacatcataccctgatgttttctttgcatgacgtgctatagaattccaggctcatgcacacctttctgctctcctgttttgcaaatgtctgcactctagagtccttcctgttggccactacatacgtgtcccccgcttcttgcccctctctgcttgggtccctgctacactggtatcctgcactttccaccttgtattgccagtttgtttccaaggccatctccactttgagcttgttcatgaccacctcacacagcacacttggtctgtgtggtggtttgaggggttctgtctgtacactgtgctttggctgtgttggaggcgggcaggtgggaaggaagaaatgtattcttggggagatttgtttttagagacatgagacatggaaaatagttaagtaataatataatatgggaggcatggactatcagaggaggcaggcaggactgcccaacctcctcactgggcacgttacgctacttcctcctgacctctatagtcctttgcatttatcaagcactgtcatacgtgttatctcatgcaatgaccagggtgtcaccccctgttttgtaagtgacaaaactgtcactcagagggatgaaatgacatgctaaaggtcatctagttagtaatggtggaatcagggctggagcccagtcttctaagcctagttcctattctgctcttcatcatctgtctcaggatggtaaactgaggcctggaaaggagaaggaactcacccagcctaaagattaagggttttatgctggccacggtggctcatgcctcccaacattttgagaggctgaggtgggaggattgcttgagtccaggagtttgagcccagcctgggcaacatagtaagaccctgt

SEQ ID NO: 9851 - DNA, 6000 bp, Homo sapiens
tcgctcacgctgggagctgtagactggagctgttcctattcggccatcttggctgccagctgattttttttttttttaatgagtggatgaaacaaagaaaaaaggaaaaagaactagcttttggttaagtgagtattgagcactaggattgtctctctcaaaagctcaaactcttacctctgtatatgatacgtattatacatgtactggctccaataagctagtatgacctaaaatatttttataatgtcttaagtacattacagccattaaataatgattgtgaaagccatatagtgaattcaataatgactactataaccaatatatagagacattagaacatagagtgatacacacattaataattgcaactttgtaaagcaacttatatataggtatacataaaaaaagattttagaaacctatgctaaagtagtctcaaatatctccaatttttataattataatttaaagcaaaggttttcatgtgccaactgacatgacgttatcacaaattgcttgtatttgtgagactagatcacgcatagaccttttattaaactataaaaaacaaaaacaaaatctctaaatatctgtgaatttgggattcttccctactagccagttcaacactaaatgtcctgtttcaccctgcaaactctgggcgttttaaggtgatttcgtgtttgctgttttggcactgttttttaagttttgtttgctttattttggagcttattgatattgtgaaaacaatttaacactgtggtctcattcttcatgggtaaaactagaattattgcaagtgctggaaataccggtatttatacattagcaagtccagaggatggctagtaggcagagtactttggggatactattcgtctttagcttcttgaccttctttactgtttgcaaacagaacaaagacaaaggcagaatcaaacatgaagcacagaagtagcagctgcctttaaaatgttgtgttgactgtagctgtgacctatccctaatagcatttgacttagaaacatacaaattcatgtcttctatttaactgaacatctttcttctctttactataatatcagaaggtaagaaaacaaagttaatgattactacataatgtataaaatttaaaatcattcgtattcatctcacaaaatttatagatacatagtgcaaagagtgttatattttatacagaaaaaagatttgccagttactacttgatttggacaagtcacttgaacttctagagtttcagttccctgatttctaaaatggaataataatattttatagccaaatttataatttccaagatacaatatttgcagtttgtaaatggatgacaattatgctctttatctgcgatgtttattggtgtataatgtgactttttgtacgtgaactaatcaatgtgtgtatattctgttctttttctcttaaaattatttcctaaatatatttatgtatattaacatagacttcatgatcgctatttttgaggtgacaaattacaacattctgattatatacccttattttggacgggttttgaagtctttcactaaatgtggggaaaagatagctaaacttttataaccctgctgtaatatatgtgtgtatatatatatatatatatatatatatatatatatatatatataaaatatatgtaacctagctgtaatatatatatatttatatatattatatattattttatatattttatatatttatattatatatatatttttataacaggtagtgtaaccttgctgtaatatatatatatatatttataacaggtggtgtaaccctgctgtaatatatattacagcacctgttatacctgttacactgcttataccatcactacctccaccactattatttttatactgacaataatgagctacagtgactaataacaagttataggataagcttacctagggccaggcactatactagaaacttttcacacatgaacaatttcaaatctaaccatatctcattttaccagtgaagaaactgaggcagtgaatgtgaagatgtgtacccaacttacaatgataagtagcagaactgacatgtttgcaccctccaataaggtagctacttaccatatggggctatttaaatttgaatttaaattacttaaaattaaatacaattgcatatccaattccccaattactctagctacacttacatgttcagtagtcacttggtgctgttggctactgtattggagagagtagatatggaacatttctgttgtagatatggaacatttctgttgtatggtgctaacattttctgactccaaagtccgtgcatttaatcactttgttaaacatttctgattcttacacttcctattttatttctggataattcattctaataattccaacagaagatcctagacctgaatataaggtttgtctccttctaaattaagatttgactcataaatgcagtacattctttggtgtctgtaagtgtaaacattttacgagtattttattctacttcatgacatcaaaaactttcatttctctacctggaaacatcaaattgctttaataaacccttaaatatttctcttttttttttttttttttttgagacagggtctcactctgtcacccaggctggagtgcggtggcctgatcaaagtccaccactgcagacctaacctcctgggctcatgtgatcctcccacctcagtctgtcaagttgctgggactacaggtgcacaccaccatggccggctaatttatttttatttttatttttatttttgtggagatggggttttgccatgttacccaggtgggttttgaactcttaggcttaagcaatccaccttacttggccacccaaagtgcaggattacaggcgtgagccccagtgcccggccaaatctttcatctctgatttacataatagttttttttgttgttgttgttgtttttaccaaagaggacactagtgatactacagtacataatatgtctagccttttgcaattagccaagcactcccttatctgttccatttaaatatgcataacaataccctgcctgagctatttagaaaaaaatattattatgcttagttgatggatttaaaaacaatacaaaactgaggcttagagaatttaaggaacttgcccaaagacatatggcagatgctagagctgatctttttcttttattgctttatttttgttaagtatacattgtaaattataccacaaaaatggcatcaataactggtttgggatggaatggggaggtgtggatgacactaaataaaatacaaatatcaaagaaccataaagatagagaacattgaatatattcccagatattggattgtttctaaatatgataagactaccaaatttaaaccattcttctactggacttaattataatcagttataaagaatattccttctgccaagtttcaaactctagccttctaattcaccccttgatattgcaaatttcaccctggtaaccaagacaaagaagagaattggaagagtagagtggaaatgcacagctgctgatttcactccattgctttcctgtttatcttttctttttttttttttagtttgcatgcacaaaactaatatttattgcatgacaaatgaggagcaaattgaagtgtgactccagcttgtgaaaatctttggtgcataaagcttggaacatgacagatccagctttgaaaattattgcttccaaaatttagttactctgacaaccacttttctttaaccaggcaacttagaatctttctttgtacatttgtgtcttttaaaaatttttcattaacatccagaattttcaagttgaatatttaaagaaaatttctgaaatttggtttttaagtcattaaaaaaaaactatagagtttcatataaattgcctaagtcaggggatgggaacacctcttcaatgtaggatttattctagttccaacacagttgttctatgttttcccctaaaaaagacttcatgtcagataaagtttttagattttagatttttttcatgtaatcatagggttaattgtatttacacataataaaattgcctctcgttgttattttccgtagtatgttataactattatctaaggtaacggagttagcagaggcacattcccaatcccattaatcccaatagagaagtatggtgtttgccaagttagaacatcattttgacttgtctctttggatcagccaaacaacaatgtatttgggcaattttccaatttctttgaattcattacagttgggtaattttctcccatgtatattgtaatagaaagaattacaagataaaaagacacagggaactcaatcacactgatttattaaattacgaaatccaatgcacttttttggatccaaaattgttaaacatgctggtatggtaccttgtttctttttttctgttgtacaagttatgaaatgtcaatttggctttgcttcatttattaaaatttatctcatatgtttccttgagaggaatggtctttttgttatgttgtgttttttcatgtttttgagtttaaaaagtacagtattccatgatcacgtctctgtatctacttcaccatccacaatcctaattcccgaactctttaaataggcctcttgacgatgcagccagctcagtgagtggctggtcatttgaaagtagcacattgtgtctcattttagtattctgaatcagtgcatcatataaatgcattttgaataatgcatgtctgctactttaattacttgtttaattatctttagtttgtttcaaagcctagaacaactgctgttgcttggatgattagaaaattgcttccagttgcagaaatctatttcctgttgtttcttctggcagtgattgcagatcggcctcccccagttattcgacaaggtcctgtgaatcagactgtagccgtggatggcactttcgtcctcagctgtgtggccacaggcagtccagtgcccaccattctgtggagaaaggatggagtcctcgtttcaacccaagactctcgaatcaaacagttggagaatggagtactgcagatccgatatgctaaggtaacttggaatggcaccttgcgtttcttgttttgtttcactttgtttctgcctccaacaactggcattgaaatttctaactttgcaattaatgaagtgttaaatgaagagtagtaatatatttttaatttgatgttttatttttttcagatatttcattgtatatgtttgagatgatttaactcataatttagtccatggcaggtaatttaaggttgtatggaggagaagaaaggatttctaagaacctaccgaggaaagtaaatgagggtttgtgagagaataaatatcttcaaagtagtggtacgaagcagtccttccataaagcatcttttaagatatttacctgtatcattttatgtgcaatatatttagatagttcttctattgtaagtgtttgtttcagcattttgcaatggcaaaactatacatgcaaacaaaagccataaagcaatgtacacaccgagtgtacaattcaaatcagaatgctcaatgatggaaagcccacaggtctgtaggaaccatttaaggatttactttcacagggcatcatatcccatgcctgctctttcaggactttattgttttgatttttcttctttttttatgtcaagatcagacgagctcctgaggcatatgaaagaatagtcctgacagcaataaacatgaatttcagttgctttatctcctagtgtgggtggttcctttggagtattggatcagcatcacagttcactttaagtgccacaacagttaatatgttgtgctgctttgtgactgttgtgacttggttcctgcaattgccagggcaagatgacaacattctttctttatcaaatgttacttgaagatagtta

SEQ ID NO: 9852 - DNA, 6000 bp, Homo sapiens
aacatctgatgagggctgagctgctttccttggcagctctccatgcagtaactcagggatccagctccttccatcttgtgatgccattctcaattcttggtcttccagctgccaccaaggggagagagctgttcttaaatccctgagccctcccctctccacaagtcctctttggtagccttcagagctcctagctccaagttgggctgggtgataggagcaagttagtgtgctggtggcataggctcttctgaatccctccagatccttctgtatactctcccagaagctgacttagatcttttcaggtattgggaactgacactggtggaaaaacagacaagaaaaagttttaaatacaaatgaactctaaattctttaaccacgaagaggcactaggcatcatcatttgctgggtttagcttcctcctggcgacaggtggccacagggactattactactttgattctgtctccaaggcccttttcagctaagtctgggtgtcaaatgtttttgttgaaattttgctgcttaccaggagcaacagcatcttaactgcaagccttaagccttttttcaattcatctgaaatagtgattttatttgcttcttttcacctctgtcctaattgggccctgtctccagacagatagggtgtgtccccactttcattcttccaaggcccttccactgaccgagacactagattggaagctggcagagaatcaagggctggctctaggcgctcagcatttaaatattcaaagttatgacacatcattacttattcagagctcactctctaagtcctctaaggcagagcctgttgcagacagtaaaactcctgacagtgagtacaaggcacactgaaaagctacttgtaaggcaggaagtccagtgaagaatgagaatgtggaaggaaacctcgggcctgagttatgtgaagctctcttctctgagctggggaggcacacgcagcgtgggggcacactgtggcttggtgagcaggccgagctttgtctccccacgtccaggcagcacggcatcctgtgtctcctgggttcaagtgattctcctgcctcagcctcctgagtagctggtattacaggcacgtgccaccacacccagctaatttttgtattttttagtagagatggggtttcaccatgttggccaggctggtcttgagctcctgacctcaggtgatccacccacctcagcttcccaaagtgctgagattacaggggtgggccaccacgcccagcctaaagtattttaaattattctgtttctgtttcttgaattgtggatccttcaggtggatccacagccagtcagtgtattggacctgctgacatgccttcatgaattgtttttcatgcaatttataagcttttcattagctcttccttggaggttgtgggggcatccctgcagagcagttttatgtttgccgttgtcgagaatctccaggttcaccgtgggactagtttttctgttaatttttcaaatggagatgtcttcaccataaaagcagtgtattccaattgctcaggcctggagttacagtttttatgggtaattcatctcattcatggtagatggtcagcttccgtgctgctttcctagaccagtagctggagtttttctgtttctggttttagtagcacagcagctcattgtgctgttcggctttatgcagacagccctattccagtgttcagccctctgcaggactgaggctcagcatctattcctggtagaccctgctccaagcctgtagggcctcagtcaaggcctgacccattgcgggggtccttggcatgagtgcctgcccatttcctaccttttttttttgagaccgagtcttgctctgttactcaggctggagtgcagtggcgggatctcagctcactgcaacctccacctcctgggttcaagtgattatcctgactcagcctcctgagtagctgggattacaggtgcccaccaccatgcccagctaatttttgtatttttagtagagatggcgtttcaccacgttggccaggctggtcttgaactcctgacctcaggtgatctgcctgcctcagcctcctaaagtgctgagattacaggcgtgagccactgcacccagcccccacctattcttttaagtccattcatttgttttttggtgttttctttttttttttttttttttttttttttgccaaaaccaaatacttctgaaaggtccattcatttattgaatggtttcctcttcgtttctgggatttactttctaagcttccagcctaggctatatattaaaaaattttaaattacattttatccagcagttgtatatgtttagagttagaagaagcagataagatgttttcattcctgttccatgacatggagagcctttccatgtcagcttgatccatgatattctcctgaggcattagattgttttctggatttgcctaggtctggtgtcttcaaattggattcactttttatacatacagacactcccttggctctttaaccatatatattttattttttatctcccttgttaataatccttaatttagtaactctgtatgcatggcgcttatttggggtctcacagcacagacacatgagaggggtaggatagtctcctggcatgaccccagaacgtccggatcttcaggccactcagacagctgctctggggttaagtcagataactcatcacaggtgacatcctattccagtgtcagtggagactctcctagcgtctgtgtgacaaagctcttttcctaagtgactctgacttggttatagtaaattctctacaatgaaggcttctctctggcaaacacatcttctaattcctaactacttaacagtcattctttgcagtaaaaatgtatctgctcattgctgtttgcgggagtgaaagggaggaggtaaaacatgctgagctgtagctgagtttgtcacagctttcctggttaaacagcaatcattattcagtttcttttctccctgtccgcaaccaaccggaccaagtgtaaaaaaaccacacacctgaagtcctaaatcatgggccagagccacataggccagggcaggatcttggaggaagagagagggggagagtttggatagacttacttccttctgggcctatgatccacttgccaaatagctacagatgggacctcagttccttcttccagctgggaatgtaatttccatgattgttcttttcatgacaaaatgaggaggtaatggaaagtttgggtggcccgaggctgaggttaaaagagagttccacctgtccaagtacaaggtgttcatgaagacttcgggaaaggagaagggagaaacacaaaggaaagccaggcagggagatcccatcgctgccgccggccccgagagggagagcgcgactatcacaggagtggggctgattgattctgtgcagggtgggcctgttgctggggactctgtgctgtgctgttgtgactgtgtggatggagaagggactgtagccctgagagggaatggaatagccccttagagaaccaaagattgcccctttacagaagggagcctgcccagacctgccctggtgagtctgctttttgacagcatttaaggcagggtcctcctagctgttgctaaggctgttttctttcccatgtatgcagcttgaattagattataaagcctttccctcaggcctgttagtgctcgttttccatcatttatcctgaaagagcgacttccttaacatggctggagaccctgcacagtctggcccagcctgcctcccaggctcctcctcgcccatcctcacccgttactctgcaccacagccccccgacctccctctgtccttgggctctgtgctcccttctgccacaggactcttgcacatgctcttctctggctgggacactctcccctcttccctttactttgtgaacccattggtaaaacaatataagctctctcttccaactttattagttctagatcaagctgaaactcttagagctgtaatggaaagtaactcccttcaggaatagggccacttggagtctccacaggagactgaaaaggagatcaccccatatttcaggagaaaggcttggtattaacctattattgatgtgtaatacttccttcttttgtaatttccagacataactttccatttgaagatgcttagtttctaaataatttttattgcatttagcagaattgatagtttgttggtacaatatttagaaacgaatgaagaagcagataagatgttttcattcctgttccattcagcatttgtccatgtgcctgcacatcctggtcactgagtggattgacatgacaagattatgtgatcctgtgatcctttgttgcgtggcagcaacattgatgtagaagctggttgcatggagtaactgcacttacattgccctcactgggcatcatccatgttccttagcccagaggacacttcctctccactctgcctaggctggcccacaccccgggtcccacatacctttcaatgcctatgtcaagtcttcctccaaccacagtagcctactattatctctgtttcctttgaacaatttgtccataccattcatttataacttggcatatactgccttgcctgcagtttagggctgatgtttggagaacaggaactatgttatttatctttgctctctctgctgtgcctgtcctggggcatgtggtaggtgctgggtaaatagttattggtgcctctcaaggcactcagtgaatgctcagaacacttggttaagatttacagacaatgatggaaaagtgactcttctcttcttcctctctagttacaagttgtttccaaattgcgtcccctcctttgggttccgccatctgctgcctctcacagacagagtggacagcttcaatgaggaagttcggaaacagagggtgtcccggaaccgagatgcccctgaggggggctttgatgcagtactccaggcagccgtctgcaaggtaactttcctttctggtcctgtccctgcatggggaggtcaaggtagagagcgtcagtgggtgttggtacttcctgcaggagtctttgagtgccccagcatgtggctcctgaccactctgaagtcagagggtgagctcagtggaacttctgggaaatctacagcagtcaaatcagccggagctcgggaatggattgggctggtctgtgtctctgtgtcagggtgtggttgtgtgcaatggagtactgtctgctagaagacagctgtctgcatttatacattggctttttggtttattttcaggggaaaaaagtaaaggtcaagtcataggcatagaagcttgtagagctttctggaccaattttggcaaaccttagagattgctctcttgggaaacccagttgaaaaagaattgtgtgaggccgggcgtggtggctcacgcctgtaatcccagcactttgggaggccgaggcaggtggatcacgaggtcaggagttcaaggccagcctggccaacatagtgaaaccctgtctctactgaaaatacaaaaaaattagccgggcatggtgacgggtgcctgtaatcccagctactcgggaggctgaggcaggagaatcgcttgaaccaggaggcggaggttgcagtgagtggagattgtgccactgcactccagcctgggcgacagtgtgagactctgtctcaaatttaaaaaaaaaaaaaagaaagaaaaagaattgtgtggcatctttggttgcaattctagttgttttcctcctgcttctctgtgatatatgaatccagagggagggcctagacttagatcagaaatgaactcatgcttcgagaggttccaatcttagcaaaatatataaatggaatgttggtgataacatagtcttaaaataattttctactgttgaaacaacccaataacaataacaaaaaaaaaacactcttaaattcact

SEQ ID NO: 9853 - DNA, 6000 bp, Homo sapiens
attcattttacccatttcatttgtagaaatcacttaaaatacacttttcacatctactttcttagaattatatatccatttaaattcaacctcacaaacactgtgtaaaaaacaggatacatattgataaaactatctaaaggtaaggggactctatcatgctgttaaaatcatttattaaagccaaaatttgttataatgcaaagactaccattcatgtctcctgacttaactctaatatcttccttctacaaaacacaacgcagcttaaatcaaataaataagagtgtgtgtgtgtgcacgtgtgtgttccagttcttgaccttgccagtaactacccttgtgattcctagcaagttactgggtttccttggatctttctttccttatttgtcaaatgagcatgttggatttgatgatctacatatagaatgtacggaatgatgaaagagactgagacatcatgtaatcccactcccccaatttatagataaggaaaactgatttcttctggctccaaaatacatttttaaaggaacatatggcttcctaacagaatcagctcttctgaatactggggctaccccacagtcccatccctgccacttgtcaaatgtgtgatcatgatccactcatacagtttctctagacttcagtttcctgatatgtaaaattgaaaaagttggactaagagccctttcaggtttaaaactttgaggttaagaaaggcatctttgaaaactgacatctttgccactactgggatatgactcagaacataacgaagcataatatagctctagaaataaattggtgtcaagaacaattaaagagcaaccatccagagaattctgattgatcatttgtgtaatctgttcaatgagtacctggatttgaaaattgcttgattggtgtcttcttttaaaaataagagccatacatcatttgttgttggcttagagatacagaaaaaagaaccaattaagtgagcttcagagttaatttccaatagatttggatgctgcaaaccaaaaaaaccattgctaggcctttcttctttaatgagtatcacaatacaactagcctcagtatttttcagttgagccccagaagtttcacaatccatttaatatgttgcattccaagtatctgtttactcagttgttaaaaattgccaatgggacagaaactgtctgtcacttccagagcaattagtgtgtgaaaacttatcaaaagaaatctgtcaagtttgagtaagtataaatattgcatgaaagtccctaaggaaatcaaactgagtaggatacacttttgcgagttgcagcacagaaaagtttattttgttttatttacttggctttatttttcagaatgttgatagtgcttcatgtaacccaatggattaatgttttgctctgataaaaacagattttggttcttaagggaaatctcaattgtatattgagcgatataaaaataccagatcttggtttcaaatatgaagagctcttactttgtcctagatgggacactggaatgagagttaagctagaacgagtaggttatagtccgcctcacccctttttggtgctccagcctaaccctttctagacctcagaattttcttatctttaaaatgaagaaataggacaagcgatttgttgggtatgttttagttgtactacactttttgcctgctttgatgtctacattctcattacattatattcctcctgctccttcctgattgccctgaagagataaacaaataaaaatacaatattccaggtggtgatatttgatcgtgaaaaaaactaagttaatatcttggtgagagatttcccctgttttaggagcttagtgcttaggccaacatgttctcaccagtacaccagccaagacttttctgctgaccttcccacttcaggactccacagtatttacaaatgtcagatgttgaaccatgttggttaggttccttagcatcttctgtttgaggctcttcttggcatctatggtttcttcttttttttttttttttttttcagcataagaaatggttacgctgttatattgttattacaattggggaaacattacaactttaattcaatatttgttgttgttttctgttgttctatttaatattaatgattttgtagaaactgaagtaatacagttaataatccgtatattttacttattgttttttgaattgaactaattggtacagcgtttcccaaactaggttttttgagctgtgggggttagatggttgtggtggtggtaattccatgagcaaataagtttggatgcttaaacactctctaaggagtttcaaggacattggcatgacaaaatctcttgccagtcctgaaagaaaaaagttgaaactccgttttactttgtttaatccagtacttctcaaagtaatttgatcatgtaaccctttgagttttagggaggtgggggtagaaaacaaagaattaatcatcaaagaccactgtttaggaaatgctgcaggaggcacttccggttgtttgcatctctcactaagttactttagtcacaaaagcagtgaaaccaaaggaatcaacctatttttaattagatcaaatagcatgttaattgaattttcaaaaaagtttttacttctataatgattaacctgttgaagtgcaacaccaataataactaacatctgtacagccctttagagaattcaaagtgctttcacataatcggttgctcaccacttacctgcatcacatttaaaattgtcctcattttatggaccaagaagctgaacatgaagtttaaatggcttccctaatataacgcagatttgaactttagtcttactttgttgttgttgttgttcctctccaattagaaaaagaatgaagcagatgccattttcccaatatcgactttctggttgctaaatgagcctcccgcagaattcagagagccttgcagccagtagctactactgagagttctgaaaaatattgcagggaaaaaaaaatcatttcctagccaggcgcggtggctcacacctgtaatcccagcactttgtggggccgaggagggcagatcacctgaggtcaggagttcgagaccagcctggccaacatggtgaaaccctgtctctactaaaaatacaaaaattagccaagcgtcgtggtgggcacctgtagtcccagctacttgggaggctgagacaggagaattgcttgaacccaggaggcagaggttgcagtgagccaagatcgtgccactgcactccagcctgggcaacaaaaagcaaaactccatctcaaaaaaaaaaaaaaagtttccggtatttgattccaactctccttggagaaatgtgagttgattagtattgtgctggtaaattacattctaacttccatcatgtgactttggaggtgctaatttatacttaaaactctcttataaataattaggggataggtaatcttctcattttgcataggagaaagcttaggtgctgatagattactaggtttgcttgaaactcacctgttgagtatgtaaggactgcattgcgatgctgtttgttgaaagcctgccatacgggatagtacttcttcacaatgtattataggggcttttcctcccccagattttagtttcttgaggaagctttctggaaagcacttgtatatttacactgagtatcctcttgacaccagcatggggttacttgtaatgacatgcacatgcgtaaataaaatgattagccattctcatataaacataattatatctttctaaaataatacatgtggaaatgttataatccagtgataaagggaaagcaatgtgcatgacccctcctttgtgcgtaaacagtggatttaaggcagaatatgtttcctgttgcacattcagttgttaaggtcaagtacaattgggacacattgaaggattacagtacaaaaaatgccttttacagtaattagcgttctctctacaaaactgaagtgacctttctgctattttccaaggacactttatacatttagactttagctcaggatcatatgaaaaagtgacatataagaactcagtcaactagttctgaaaccagaggccccattgcatttagttgttcccttaccctcccctcaacaaagtaatttttgaagataaagtgggacatgttggctactcagtgccagtagctagtatatcacttctccagctttggacaaatctggaaattacactttaaagagaggaatcgtggaatgcctggagctgaagcagtttgatttccttggagcacaatagttcactgcagcaaatcatttatactcactgtcatttagtggtcttctctgaaatggaaagcatgggctcatgtggtccttcataaaacatttacctaattcttataaaagttagaactttcaaaggaacatttttgatacaactgcctatgaaattcatcccactggtcttatgggataagggtgtgtgaaaatgttgctgttttatcactatctcatatccactccctcgtggatctaattttttttaatatggatgtatatttgtggaatcagtcaactagtcagtcagtgtatacttaatgagtgtttgccacagtgttaaactgctctcttactaaaatgatggaaaagtattcaacctcacaagtgagaagaaaaaatttgagttgatagtaggaggcattgggagaagactgcattgacactcaggaattattctgtttctaactagagctaagaatttgaataagttactctgttcctaggtgcccgtttctcagttaatggaaataaaactatcaaatatattggaaagcataaagtgctatgcaagtatggggcattatgatgtaatataatgattattatctataaaacaaaagaaatgatctaaatagtttccagggtggcttccagcattactatatcaagattataggcaccctgggtctgtaatttgagcattactcaatacatgttacatagtgcctgacacctgattagcaaactataaatgcttagcccttgacttaaagaggttggacatcgcttaatcagctatcagtgtatcttttacttctctggaaataaaaccttattgactgatagtagaaaggctggtaaaatgccacgggggactgtgattacttcctatctgtatttagtgggctgaaaaagagtcattggacaacaatgtatacatttttaacctgatcatttctttcatgaaaacagtagagttccagtgccaaaagacatatttgtaatgaagatttttttcctttcagagctgagttatgcctggatcttcaatgaatacccttcctatcaggataatcgccgctttgtttctcaagagactgggaatctgtatattgccaaagtagaaaaatcagatgttgggaattatacctgtgtggttaccaataccgtgacaaaccacaaggtcctggggccacctacaccactaatattgagaaatgatggtgagttttcaagtaattttgttaattttgtttctgcaatcacaggatgaatgtggaggtatgttatgttgttggcacatgaagctttgttgtctaaattaaatgtaagaaaagtttactgcagcctatatttggtacccatattttctccacttgtgtaagagataaacccatgaatccattttggaaaactaattagaaatctaattgctaatctcaacaggaatagaatgaggatttaggtgaatataaataacaaaggaaggtatttcttgtttctctcccacttaaactgtatacacagtcagaatgaagtgaaaggttgaacaattagctcattaatcaattctgtgtaatttagtattctgtgtccaattatccaaataacttctggatgtacagtactgaacgcatagttcccaccacagtgaaatgtagacataacaaggcttgtttgagacagaaatttt

SEQ ID NO: 9854 - DNA, 6000 bp, Homo sapiens
ctggcgttgaattggtgtttcttaattgtttcttttgttctgtgtagtgacccacttggaaaacacttctttctttcaattctagtatttggcatgatcattactatcggccagtctatcgtgtatgtgatgaccgggatgtatggggacccttctgaaatgggtgctggaatttgcctgctaatcaccattcaggtaattattatgctaacatctccctttgagtagcccctcacacttacctacaattctcacataacgaatctcaagcacacctaaaaggaactcctactgaaaggaagcagaagcctaagactctgggttagccctctgaattcagcagagaaaggctttactgaccgctctctggggctgaggatgtgatctcattccgtcttcagcgtttatatcagagaacccaattactgaaggacggaaccatgtccgtggggagcagtaacacatagtcttgtatttttgaatttttacagctctttgttgctggcttaattgtcctacttttggatgaactcctgcaaaaaggatatggccttggctctggtatttctctcttcattgcaactaacatctgtgaaaccatcgtatggaaggcattcagccccactactgtcaacactggccgaggtaagggccctgtgctcccctggtggcgacagctttcagcaaaaacaattgagcaatgcaaagcagaagacaaaaatccccccattccacagaaaaataatgtcagttttaggtttatctcttctggtgtttgggtccatctgcaaagttttaaaaacacaaataggcttgtaattatgatgatacctaacttgcacttttcatataaaaatatctcctggacgtttggcacgtcagaatacacaatcctgcctcacttttcttagcacagtataagcttatattgcaacgataaagcaacgttaagtcatttccaggtttttttatcgttaacattgaaaccatgactgtcctcatatgttcatctttgtatattttggcagctgctctcagtgaataagtttctaaaaatgaaattcctaaaccaaagcacttggtcatgcaaggggcagctttctgaaaaaggcctgaacttggagcttagcacctgcgttcaaatcctggctgttcctgttagtcatacatacgtggctttgggcagattcctgcaccactgaatcttggttaccaggatgcagtgagaagcaacatgaaattacatgatgcctggctcctggtagatgtgtatcaaacattggcatgctgtgctacatccaccaagtgccgtggaaatcttgtaacagcatgtttttaataaaaagttcaaaacatacaagggaagccttagagagtgtgacttattagggaaaggaaataaacattttttggcactaaatatcttcttcactgaggagcattccaggagaaataatcatgcatatttgagagttttcttttaattgaatgttggaaacagagtccttggcctccagagaccatattatctcattaatgagatggaaaactggtccccaaacaagtgaaggctgcatgtgcctaacaggttacaaaggagagtggagcttgagatagggagccatagagaagagtgggcaagatcacatttgatgcttccttgagtactttgtataaatttaggaaatccaaggtaaattgggagaagcaggtccagaaggcaaagtttgacaggatgtgaaaaggcaagagggggatggcattgtaggagttcaggtatttgtcaagaccatcatggtgactggcttttggggagtgcctgagtgggaaggaagtaaagtcagaggggagcccctggtggcttagcagcccagtagtagccgccagaggctcatgttccattctgcagcagggcattgagtaatgggagccagagtttggaagaagtgatttgctctgcactgaaaggcagagagagcagctaggtgcgtgcagcagtaatccagccccaattaagccatcctacaggagagcactgtgtgagggcatttggaggaagcaagttgagagaggggaccagagaggcactttcaaggtgggggaaaactaagaagcaaaggtggatttgtctggccttgaagtcagtgtgtctacatgtcagttgctcgtgtttgggacctggctgacacgagatgcattcaggaagggctgtgccccatggcctgcatgtgggcagtgagtggtgctagagggagagcctagggaggggcagggagagccacacagagggcacagctgggacggcagctttgcagctgtgcctggagatgttgcagcttggcttgggacaggggaggctgttgaatgagattctacaggcagagacagtaatcactgctgcttccctgggcagcaggaacaatgcagaactgggaattagtcccaaatttgaaaccgtggggaaacaggccagccttgtcacacaggaccaaaaggtggaaaggatgggaattgacgaaagaccgccacagggtgagatgaggacatgatggccagttaggatatggtgtctctttcacagaagccacagcagaggaggtcagtggtcatattggttagatggtctgcctgacatgtcatctcggaatggtccaggaagatgtagcaggtggtcctagctatcacgtgttagaaacttgggaacagtgcttttgagttctttagtttcaccttttcctagattcacttgctttttagtcatgggaggagtaaaagtgaaagttggaagatttgttctatgaaaggaaaatcagggagcagaacctactcctgacagcatccagagacacaatctggagatgtcacacctgcagcaccgaaactcaatgtcaggcacttggggtctggatggctcctgagctgaactacagatttgggccacctctctaggctcaccatccagatctgggtccagaggacagaattattacctttgggttaaagtgatcccttctcaagtttttatttaatgtgcttttaaaaggcaaaccccacataccatcagtttggttactcttcccattccctcagctaccaagttattttggttgaatagaagctttcctttttgtagggtgtcttcatttcttacatctcactctatttcactgttaggcacaagggaatggacacatttgacaagttccacagtactagatgggtcctctaagtacagtctgaccttcagtttcagctttcctatttaatctgtcatgtaaaattaattgtactccaaagtggccatcaaatacagtccctatttgactttttgttgttgttgagacggagtcttgctctgtcacccaggctggagtgcattggcgccatctcggctcactgcaacctccgcctcccgggttcaagcagttctctgcctcagcctcctgagtatgggattacaggcgcccgccaccatgttcggctaatttttttgtattattagtagagacagggtttcaccatcttggccaggctggtcttgaactcctgaccttgtgatccgcccgcgtcagtctcccaaagtgctgggattacaggcgtgagccaccacgcccgactcctatttgacttttttaaaagtgctcctcagagtactgataccatgaccccacactgcccacagagaccctgtctctggaagtaatgccagcttcctgccagtagaagcagcgtgagttgccaggcttccattatgggatggttatgctgtcctggaacggcagaggttatcacttgtttctttttttcgctttttagttttttaacgtaagtaaatttcttgctgatgtctaaaacttaggccttaataatgcaccacactccccgccttcctctcacttgttactctgttgtctggttcttagattgggtccctttcctatatccctcagtccctcagtaagctcactccacccctaggcctgcctccctcaggagcatctcctggcagggtgtcatttggatgggaccacatggtggacgcaagcatatcctctgtacttgtatccttggtgtgagaagcagagagctggagcctccccactcaccagccaagggcagcctgcacttcatagctgttgaatgggtacttgtacttctcaagattgtccaggaaagtagatttgccagctctgagccccctcttcagtggatgacccctttcagctagagttcagcagagtctgcttttatttttataaattatcatcgttccacacctctggtggccactgactcatgtgcctaagaaatgagaccaattaattttaaaaagtggaatagtggttgggtgctgtggctcacacctgtaatcccaacactttgggagggtgaggcgggaggattgcttgaggtcaggagttcgagaccagactgggtaacatagtgagacccccaactgtacaaaaataaaaaataaaaaattagccaggcgtggtagcatgcctatagtcccagctattcggaagtctgagataggatcacttgagcccaggaggagaaggttgaggctgcagtgagctgcaaccacaccactgcactctagcctaggcagccgagagagagggaccctgtctaaaaaaaatcaaaaacaaaccagaatagcccgtttctgtagtttgaattctctacagaagagaagggagggatgagaataatacatgctgtatccctgtggctatgggcaccatgagtctaataacttaagtttgttttcctctttttatttgtctgctaagaaggctagaagcaaattgagttgcctgttcgttccttcatatatgtctcctcctctgccaacaggaatggaatttgaaggtgctatcatcgcacttttccatctgctggccacacgcacagacaaggtccgagcccttcgggaggcgttctaccgccagaatcttcccaacctcatgaatctcatcgccaccatctttgtctttgcagtggtcatctatttccaggtgtgtccagatccaaccccagggagtttccatggtctggatttaagtttcagaatgccttgtgtgcagtcccccactctgtggggtgcactgtcatcatattgtgttgaaacgatgagatggtatttgaaggcagcaggtttccagatgagctggacaagcatgttcattgagtcatgggacctgccattaacgaaacaaaattaaggcagttctaacgtaagtgaaatcatgttcttctgggttgggcctatcgacaggtaagatacatttttaagttcttagttcaagagaagcaaaaagtactctagctctgaaacctcattgctctcttatagaaagtttgtatgatatttataggtaacttctgcatctcggaaacggcctatcttcttaagctgtcttacctttaaaagtattccatctcttaaacttgcttctgagtaagagacctgaactgctattgttttcctgtaattggattgatctttgtattttttgatggtccactttgtattttggtgtttatttaaaagaagggacagagatgaaaggcagtttgatgtttgtgaaaggtatttatacgagctacatgcttttcccattccttctgctgagactaagccacattcttgcttaataaaaagctatctctttaggggctttgccagaatttgcagtcagatcattaagaattttttttttttttttttttttgagacggagtcttgctctgttgcccaggctggagtgcagtggcgcgatctcgactcgactcactgcaacctccgcctcccaggttcaagcgattctcctgcctcagcctcccgagtagatgggattacaggtgcctgtcaccacgcccggctaatttttttttatttttagtatagacagggtttcaccgtgttagccaggatggtctcgatctcctgacctcgtgatccgcccgcctccacattacaaagcgctgggatta

SEQ ID NO: 9855 - DNA, 6000 bp, Homo sapiens
ttagtgtcagtgtaatacctgcatcaagaaggaaaagtcataaactttgatctgacattagacataataaaattggtgctttttgcctttcaaattcctgaaatttagaaactccttggaaatttttagcaaaggtttagctccactgaatagaattattctacttgcttatttttaaattaaaccagtgttcacaatagtttatggttattatgtagttttgctgtttaaaatattgtttcttcagtagtctctttaaataaattttcattgtaaatatgctgtggatttaaatatgcattatgaaccaaatagtcttctgaattataccaggaaacaaacccaacattttattttgattctcttagaaaatgcaattccaaatatactttcaaataattagatatttcttttatattattctttgaagtctttatatatattatgtatatcgcatataatatatatcatgtatattatatatgaatatatatgatatatagatatatgatatatcataatattatatatcatatatatcatataatatatatcatatgatatgtcatatatattatatgatatctcatatttatatgaaatatatttttatatatattcattttttggagacagggtcttgctctgttgcccagggtaaagtaccatggcagaatcatagctcactgtaccctcaaactcctgggctcaagcagccctcccaccttagcctcctgaatagctgggactataggagcatgttgccatgcctagctaatttttttttttaaagtcagggtcttgaaatattatgtattggtcacaattatatctggtgtttctttgaatatgcattattaataatgccatttaaaataaaacctttggcagttttctaaaatctgtcgcttttagcataggaatgttattatagtacatgtcacagcttccccataattcttcccttttcactctcggtaatctagtgccacatagcgaaaaactgtaaaacatgaacattttgccataccatttgtatgtgataagaaattaggttagtgccatttctatattgctttttctttggtttgatacaagatttcatattatgaatcatctgtcttacaatcctgtaaaacctatcattgcatcataattggagaaaaaaatgtacagcctccttaaattcattatctctgtttatcagtggaatttattcttaaatcataattttaagcatatttaccttttccgtttataccacgaaagattctaatgtgtacaggagtctttcagaatatttatattcttgtgaaaataaaaattgctatttttaaaagtcaagacagctataacgattttcttccatttatacaaagcaaaataatggaagacacatagattagcttatttcaggctttatatgaaaacagtgacagaattgtctaaagaaaacaaaaaccaaaactcctgtcataattgattagtctgtaacattcacataatcatcatgaccttttaaaaaacaggaaaaaatcactcagctctacataattggtaaattcagagaaaactaaatattggggtttgtgataactcattactacaaattttaaaattcaaattccatttttctacagttttttcataatacagtgttataaaagagtaaaccttatgtatttaagtgatcttgctttcattaacattgtatttttcctaatattgagaggattggtctttaagcaaaaattacatagtttacctaactaataaaacaaaaaggtcaggttcagtgactcacaactgcgatcccaactactcgggaggctgaggtgagaggatcacataaagccaggagtttaagactggcctggacaacatagcaagaacctgtctatcaaagtaggtagataggtagagagagagggaggatagatagagagagagagattagataaataaatgatagatatagacctgtaatccctgcactttgggagtttgagcccaggagttcaagaccagactgggcaacttggcaagaccccatctctacaaaaaatacaaaaattagcggagcatggtggcacgtacctgctacttggaggctgaggtgggaggattgcttgagcccaggaggttgaggctgcagcgagtcatgattgtgccactgcactccagcctgggtgacagagcaagaccttgtcctcaataaataaataagaaaacaaggattaaaagatggaaactttctaatactggggttccttatccagggctaatttatcctttaggcatagtaaacgtgtgccttggaccaagatacatataggggtccacagaaatattttcatttttatttcttttaaatcagaagtagtaatgtatatacatgtatgtaatagcaaacctatacagtattttattcgtgtttatacagatgtacagaaaatatagtcataaatgtatagaaaatataatatttaatagtttttgtggagtaagtgccttacaaaggcaaaagggcctagggccttgggaagtatgatgcagccctgcttttccttcttaaaggcttccttcctaaacacctttcatctctttattttattcttttcctacaccatgatcttatgaatacttaaattcccaactgattgctatgtgtattgaagcataatatcacaaagtacataaatcagaagtgtatatccatgtaagtgtacacccagatggaaaaaagaagtaatttttttcagtgacattattgcattgtgacctcaagttcagagcaacattctgtgcccctagaataccgtgatagctgctaaactagtcaggaattttttgttttcaggcatgcagtggtgtaattatagctcactgcagcctcgagctcctgggctcaagtgatcctcccaagtagcttggattagaggtttagccaccacgcccagcactaatcaggatttaaatattaatatttaaggtgtatgaaatgtgcagataataaaactgttttcccagctttttattaacaaatactcccttctgaggcagtgtttgaattactcaattagagaaatttttctccccacagctcgatgcattctatttctcatcatttggctcataactggaggaaggcaccacttttggttcttgccaaatctgactgctgatgtgggcttcattgactccttcaggcctctgtacacacatgaatacaaaggaccaaaagcagacttaaagaaagatgagaagtctgaaaccaaaaagcaacagaagtccgacagtgaggaaaagtcagacagtgagaaaaaggaagatgaggaggggaaagtaggaccaggaaatcatggaacagaaggctcggggggagaacggcattcagacacggacagtgacaggagggaagatgatcgatcccagcacagtagtggaaatggaaatgattttgaaatgataacaaaagaggaactggaacagcaaacagatggggattgtgaagaggatgaggaagaggaaaatgatggagaaacacctaaatcttcacatgaaaaatcataatctgactaattttgggactgaatgaataagtacaagaggttggattttctatgttggctgattaccatattgaacacatggcatttgtagcattctttaaatctatctactgaaatgtatttgacattcaagcagttatattcggtccttcattttatagaatattggcactattattggtacagtttaaagccattaatatgttttatccatttgataattttacagtaagtaggtctcattcattttgacagttatcaaagatgtactttccacagttaaatttacattaatggcaatttttgatagttttatggctttttactgttagactaatcaaaaataactttaaaaggaacaaagaaactccaacatttcacattatgcatagttatgtagccatttcacagtttctttaagatgtgtaaactcattgtccttgatagtttttatttttcattataaaattataccaggagatttcttttaagattctgagttagcagagttcaaaactattttgtggaaacaagccaactagtaacaatgcagcaacacttctggtttagctaaattatttttccaatgtaggaaatccacactgatttgtacgtctgactgagagaaagatggtcgtctccagcagagaaagtgaacagcatttgttggaaggtgatggctctccctcctccctccccatttcattggcgtaacgtaaagtgtattctgtacataatttacaaataaaacattttattttaattgttacttattatttagatatttctcaacacttaaattcataaaattaagaccatgtaagggtatgtttttagagaaatggaagtttgagtaacccacagaacatctgtgatctttctacagcagcttcagttttgtgccaacattccatgtattttgaatatgagcaaaaactgatcttaagagcagacttaaagtagctttgtacgccttaatgttcattttgatttattttaaatctttacattcagaaatgagatactgtattatcagaccaggaggcattgctgtgaaagataatttcctattctaaaatatcaaatttaaaataaagataatgaaagaaaacataagagaactattggactctaattgctttgaactagttttgcagtttgactttacgtcttatacatcttagttacaagtctttggaaactcttgtttacttatgagcataatcattccttggagttatactaactaataatgaatattaaatgatttttcttcagtcacagtgagagcatcttgctttgtggttgaaataggtagtgtatgtcagtctttgctttaggctgtttctcatctaagtgtttgaattaaagatgttaaatttttctaattgtgaaaaatatgttttctgtatcgacacattttattaaacttggcttgattgcttctttatagtagtccctgtaagtggacataaatgtggctatttgatgttaatgcaactatgtcaaggctgcaatcactttaatagtttctttttagcaaataaatgttcattgatgaagtgcctgggtattttcccgtcccatttgcagagctctactacttcatttccacagtaagcatatatataatgatcacttctgagtttatcaccagtaacattgatacctattttggggtataaacatggtgtttttcagaaataaaaattatttcattaacctttactattactgtgataatacccaggcactcaatattcatcctgaaattttttataatatatgtaatttgtctagtcttaaagacatttggagcatggccaacaggaaggtcagcttcttactgatgtgtgtggattcttacagaatgttagtacaaatttttataaatatttggtgatccctggggggaaatatcattcttactatggttagaaagtgaattagaaatttcagctcagtttctattttactattcaagttgtgtactttaaacaaatataaaaatcaaaaggctgcctctattacaatcctcagtggaatagatggctatctttcttggctaacattaaatattcttgtaccagagcatggaaaatcgtttataattgttaatagaatggcgatttttttttaagaacttcagatttgctatgctgctgtaagtagaaagcatgaagctttttgatcatgtagggcttattgtagagggtatcaattggcctaactaagcaggattgaatttaccagaggctaagttcagatagtaagaataatgcatatgtgattgttcttaaagtcaatgtattaaataaggtatttttccttttccctcttactggatttttcaattttcaaaccatatggcctaggtaactttaattgaaataatatagatttagttgaatactattcaggaagtaat

SEQ ID NO: 9856 - DNA, 6000 bp, Homo sapiens
ggtctcctggctgtcagtcctcactggcttcttttcaaacttcttttcctcctcatgttggcgggctcttttgtgatttatttattttttatttccatgccgcctctggagcaagtgagaaaatatcatagctcttttggctgttttatccaccattatgatgataagtaagagaggatgataccctctactcttcatctgtcgtaagagagcaatagcttttaacctgtaaggtctgtgaatccagtctcctatttcagtagcaagtgtgcaggtatagaagactctcagcagtgtttaaatccttcatttattcatgctgctaccgacgcatttggggatgcccgttcaccattactatgaaggcgaccatatcccagtgtttcttgctctgtatcaaggtctagctgctcctaaaaatgatgactgggagtgtttttgtgtagagttggcaccacagtggcagagtatgaaaaatgtagagtccttcctttccaatacagactgtattcagctgtgcctccatctgaattctggataaatttcagatagtggagcagaaagggagaaaagggatctgattgactttaactaccaatgtggctcaaataacaattggaatggtttatatctaccagaatagacggcaggttttacaaaccctcaaaagacagacccatctattggtcatttgagtgctctgttctgattgactcaggtctaatggggggacttaacaatcttaaccatcatcttagactagctagcccagccaaccaggggatgttgttgggggaaaggttaaaagttgttctggggaaggaagaatagctgaggccaaaaggggaagcatccaggaggagcagctctcaggggtcatcagtgaaaggagcagagaagagtatgatgagctggagggagggggtttcaggtgcattggccaaagtgggcaaagacttggacatttgtctgtgtgcatctgggcttccccagtccaggctgcgtctcttcggagcctctgtggaatccctccccagtggttttgtgagtgtgccccaggtacacatggcaaggggaatgcctctgattcaggccgtgactcctggagaggggccagtgccctgcatgaccagggcaggactgggcagaaagactggtgtacccatccaccttctgtccttcaggagaagattggctggcgaaaggatgcactgcatttgctggtgttcacaacagatgatgtgccccacatcgcattggatggaaaattgggaggcctggtgcagccacacgatggccagtgccacctgaacgaggccaacgagtacactgcatccaaccagatggtgagtgccgggaaccagatcccccctccctgttgcctctcttgtgaccctgcccgtggtcttagtacttgcccagccttgaaaccttcctctggccctcagtattcactggctttctgatcccttcttggggttgggtttcattattcagtcttctccaactgggtttccggaactcctaattgacttacaacatttctcagggatttctgtagctggttcatctttctgtcaatgtgcgtctaaatgggaagtgtttggttgggatacgggtggcccaggggaaacaggatagatctcatagtggggagggtgtcttaaaggagggtgggtgctgtgcccctgcagaagtcacaactggtatagaagttatggggcaggacttcctgacttctagacgtgggctcccagaggtggtgagttgcctgtcagtgttagtggtggtgggcagaagtgttctgcatggaatgagaggtcccaaggaccatctactcccaacagtctataaccacaactatgcaatttgaaagaatttgtgcaaaatttcaaagatatataataatagaccagtaaaatgaaccctacatgcccatcacccagacccaacaatgatcaagatcttgcatactcactgtgcaattttcctgccaaaatctgcatccttttctttctcaaatccattctggtggccaaagaggaattcttcccaattttcttccttagagaagcccattttctccagtttcaagaggtggtcagtgcccaagccttccatcttgtttaagaataatggaatctgaaaaaaggactataactgtaggacctcaccagatgcgggcccctgtacccatcattagtcctcaaaatccctcaggacactgttaaactgcctcttagcttcctctcttcttcctctttctgcacccctgccccatggcccaacttttagtccagagctcggcaccctcctctgcccgtctgagccacaagcaggatgaagcaggacctgtgggggatgttggcagacctaagctttaggcataggagaaggaaaatagggcaaggaggcagggaggaaaagtcttagaggagagaggacaggtaagaggcactgatgacagagggtaggatgtggtggctgttctctagggcgtccccactagtccccctccctgctgaaaggatggagacacagacaagatatggaaaacctccactcatcacctctccactctggggtgagaggagtgaatctagtttggtgaatgccagagggtcctttccttgagggtctcctctactcagttccttagttcaggagctaccaagaaggcttagttattaagggactctaaggggccacctaaggaaaaggtgcttccctggcaaatgctggctgctgactgtgcattggagccaggtgctggtatctacacctgttaggaatgtcatagccttgacttttgccttggccctaggactatccatcccttgccttgcttggagagaaattggcagagaacaacatcaacctcatctttgcagtgacaaaaaaccattatatgctgtacaaggtatgctgggagggagggaggctagtgatttgtggggtgaagtgggtggtgaggagtgtttacaactctgcctatctgggggaaattcaaaggaggggtggaatatagcccagtcttgatctaatggaaaataataggaggaaacaattaagcattcgcatagcagtgaataccttacaagaaatttgaacatatagtatctaatttgattctgagaaaaaccttgaaaatagcatgaattcccatttttttgggtgatgaattggaaacagagaggcacactctactagagaaggaaaatataaaatgaaatgaagatacacacaaagaaaagtaaggcatctcatcaggctacgtcactaatctctgtattccagagctttatgcctgagcctgcagactataggagaccagtgggctagtctggcgcagaaattcccaaagaaaccaataaatgtcctgagtgaatacagcagtctgcatatggatctgttccatttaaagaaactgttcctgggtcaccctggactgccgcatttagtctggggcaggaattcccaaagaaaccaataagtgtcctgagtgaatagagcagtctgggtatggatctgttccgtctaaagaaactgttcctgggtcaccctggaccatcttcaaaaactccccacatgaacgtgctccttctcacaatcacagatgagccaagtttgaattacagatctcctcggtgtgctcatgtaagctaaatgtaaactcgtctctgagattcttttacgtgatgaagcaatgagaacttaatctggaatccctctccaccctccacccccagaacagctggccatagttccctctccttcttgctcttgaatgtccacaaaagaacctttgtctgattgtgtttttctattgctcctgcctgagattatcactgataaaatgccacttatattttcttgagttctttatcctcctttagttcaaatcaatgttagaagatgaaacaagggaaaaggattgtttttctttttttgtttagtggaagatagcaggataaagcctattcagggcgtggtggtgtgtgcctacaatcccagctaccggggaggctgaggcaggagaatctcttgaacccagggggcagaggttgccgtgaaccaagattgcacaattgcactccagcctgggggacagagtgagattctgtcgcaaaaaaaaaaaaaaaaaaaaaaaaaaaaagcctatgcacttacaaataacgttttatgtttttagagggctcaattgcacagactgtattgggtttccagatatttccagagggaagaagtccatactggcttaagcatccttcctcagagctaaatacaccttgcttgggggaggaagcccatccagtcccaaggcaggcagagggtgggagatgtctctgtcactgttagaagtggaagactcaggagttagtacagatgaaagaggaaaggtgggtacttcaaggctgcccctttgccacaggacctcagaggtccgtgggagggcgccattcgttctctcagcttcctattaaagaaagggtctatacttgagacccttggaaaagttgcccttttcacgccttctgaacagattgagcagatcctgaaagctgaacctgtgaatacctcagagaccgggggagaaatggcaagaaactgtcaggagctgtcgaccttagaagatgggcttttacagagctgtctgttaccgtgggaggggcggggtctcaagacattatcttttagagaaagatcttgtgagcccctttcctatggatctatagggctggatattccacggcgtactgtagcaactcttcttctgtgccatttcttcttgcttttccctgtgggatcttctttagttcatggtgggagaaggtggcaggatatggttctaggagcctttactgttctagcccagtatagcaatgctcactctgatggttggcagggcaaaatgaacttatttcttttctttactttttttcccaagaattttacagccctgatacctggaacaacggtggagattttagatggagactccaaaaatattattcaactgattattaatgcatacaatgtaagtcatcagtttcttcccccactgccacctcccttccaccctctcccactgaggccctgcagctgccgcgggctcaggtgggcagttctccgtgctgctcttcttggctctgctcccccatccccttgagtttggtatcttcttcctgcttcactcagggtcagggtggagaaacccatccttgcttgatgagtctccctctcacctctgccatcttgactctcatctgcagatctcagtgagccaaggagtggctcagactcaggctggtggcctgggaagtgcttaggttctgacacctcgcataggcaggcagtggtattctccacctacccagtgcccaggctaacgctgccaccgtattctctgcctgagggagcagagcatccaccagccacaggaccacactgcaagaagtgaaaagttcgcatgctgagctcacctcacagtggcagggcgggaatccctcaggctcatggagctcagggtagagctgcagactaacatgggagaatcgacaatccatttttttatttttgtttttaatttaaaaatatatatagagagatgaggtctcactatgttgccctggttggtctgatcttgaactcctggaagcagtcctcccacctcagcttcccaaagtgctggctttacaggcatgagccatcatgcctggccaaagaatcaatgtttttgcctacctacttaagatgtgattgtaatgaagtcctttcagagggttcgtgaatggggctattaaattctgtgctattgtaacatatcatgtgaaattggccctaatataataagtgtaagttcttatagaggtggtttaggaatcactttcacattccaagccacgcatccacagactcacctcccaagcctttctctttcctaccctcctttccctcgattcataacaccccaaaagtacttgactcagacctaccttc

SEQ ID NO: 9857 - DNA, 6000 bp, Homo sapiens
ggataagagtggctggaaacaggagtgctgactgttttgctctttgcctgttcccagattcccctgtttgggatcatgtcttcagattcagctgaccctttctattggatgagagtgattctagcctctaacagaggtaggactctggctctgtcttttctctgtagagtgtaggcttacctagcttcacttagttaaattaataggctttggctttatatggaacttagagagtgacttggaaaatagagtgaagaatgttaaagtgctgtgttgaatagccttattaaatgctgagttcagcaccaaggcataccatcatatttggaattgtatttgaatgcagtacaaaacctgtaatgagaagataagtctatgctatagagagaataaaaaacatggaaaaactagaatactttttgaatacctgaaatgatgacatttccattgataacattcttcagaatatgtaatttgtttttcagctgtatctttttcatatctataggttacatatagtgtcaaaaaatatgtaacagtgttttatatcctctaaccagttacttatgggactggggaggattctgaatgtgtaggttgatactgcatttgattaactcatttaaaaaatatagttcaattaaattccaaatcagttggaagtgtagctcattttaacataatgggaagtagaggcttattcacaactagatacaattgtacaggctccttttccagactctggaaattatttgaatgttatcctttttttattaactgatgaagagacgaacatttcttatctctaaaaccagaatgaatctgtttatggtgaatttaaatgcagcagtctgtttagacaccatgtgacttcctaaacagaataagctgttgcctggcaggctgaacagaatgaattgaattatatactaatcgttgatattttggggttctaaattaaacacagctaggaaactgaaacacattggttttatataaggggtacccagtcaaattttgcgtattcatttttaaaataacgtactacgtttccaagctgatattgactgttttgcttccccgtttcctcaaggcacattgatggagctagggatctctcctattgtcacgtctggccttataatgcaactcttggctggcgccaagataattgaagttggtgacaccccaaaagaccgagctctcttcaacggagcccaaaagtgtaagaaagattgtgaataatctgatgtctatagttggaaaatttgaatttgctataagattttggtatcagtttttctttttttatttattttttatttttttttttttttttgagatggagtcttactctgttgcccaggctggagtgcagtgacgcagtcttggctcactgcaacctccacctcccaggttcaagcaattctgcctcagcttcccgagtagctgggattacaggcacgtgccaccacacccagctaatttttgtatttttagtggagacgggatttcactacataggccatgctggtcttgaactcctgatcttgtgatccacccgcctcggcctcccaaagtgctgggattataggcgtgagccaccatgcccagcccaaacagtattttcttttgtgctgcaacctccttggcctgccaaccctgcaggagctccatgccctgtgttagcgtgagagagcacttctggtagagcagaggtggtgggtgctggggatgggctgggcaaggcaggggagagtgtctggagtgcccctgaggccatgtaatggaggagaaggatcagagcttggaggtcttagcacccttggccaccatttcattattgcttaaaaggaagtaatggctacttcagagctgtcataaggattaaataatcactgtcacaatgcctggcacatagtagttatttggcaagtgttttataaaagaatttaactgactggggggcggtggctcacgcctgtaacccccagcactttgggaggctgaggcgggcggatcatctgaggtcaggagtttgagaccaacctggccaacatggtgaaaccccatctctactaaaaaaatacaaaaattagccaggcgtggtgacaaggtgccttaatcccagctacttgagaggcagaggcaggagaattgtttgaacccaggaggcagaggttgcagtgagccgagataaagccattgcactcaaacatgggggacagagcaagacttctctcaaaaaaaaaaaagaatttaactgaagaaaaggtgatcctgtcagtccagctgtataatttaccagctctgtgatctggggaaaagttagatgatagctcttatgtttcactttcttcatctgtaaaaatggggataataatggtatttgcctcatatctaataagtgttactagtaacaattactagtcatcaaaattagccatatttagcctctgtttgctgaaaaacattaattaggaaatgatatttacagtctcctatccagtcatcttttcgcctacaccagcatgttttacaggtcttaaattagtatggtggataattgaatgagaaatacgtctatttttttttttttttttttttttttgagacggagtctcactctgtcgcccaggctggagtgcagtggcgtgatcttggttcactgcaagctccgcttcctgggttcaagccattctcctgcctcagcctcccaagtagctgggactacaggtgcccgccaccacgcccagctaattttttgtatttttagtaaagacggggtttcactgtgttagtcaggatggtctcagtctcgatctcctgacttcgtgatccgcccgcctcaggctcccaaagtgctgggattacaggcgtgagccacagcgcccagccaagaaatacatctatttaaacttgtcagttttagataaaaattaggattctaaaatacacacatgtggctgggagcggtggctcatacttgtatcccagcactttgggaggccaaggcaggatgattgcttgaggccaggagttcgtgactagcctgggtaacacagtgagagagaccccatctctacaaaacaacaacaacaaattagccaagtgtggtgatgcacctgtagttctagctactagggaggctgaggtgggaggatcacttaagcccaggagtttgaggctgctagtgcaccactgcactcctgcccgggcaacagagcctgtctcttaaaacaaaacaaaaaacactaagaaaacaaaaaaagtacaagcacaaattggctgttttctctttggtcttcacaatgttttgaatgttttcctgcattaagaactaattgttgtggagcactttttaaaaagtcaaatagggactgtatttgatggccactttggagtaaaattaattttacatgacagattaaataggaaagctgaaactgaaggtcagactgtacttagaggacccatctagtactgtggaacttgtcaaatgtgtccattcccttgtgcctaacagtgaaatagagtgagttgtaagaaatgaagacaccctacaaaaaggaaagcttttgccaggcgtggctcatgtctgtaatccccgcactttgggaggctgaggtgggtggatcacgaggtcaggagttggagaccatcctggctaacacagtgaaaccctgtctacactaaaaatacaaaaaattagctggctgtggtggcacgtgcctgtaatcctagctactccagaggctgaggcaggaaaatcgcttgaacctgggaggtggaggttgcagtgagccaagatcatgccaccgtactccagcctgggcgacagagactccgtctcaaaaaaaaaaaaaaggaaagcttctattagaccaaaatagcttggtacctaagggaatgggaagagcagccaaatcaatggtacgtggggttttccttttaaaagcacattaaataaaaacttgagaagggatcactttaccccagagctaataattctgtcctctggacccagacctggatggtgagcctagagaggtggcccaaatctgtagttcagctcttgagccatcgagaccccaagtgcctgacattgagtttgggtgctgcaggtgtgacatctccagattgtgtctccggatgctgtcaggagtaggttctactccctgattttctttgaatagaacaaattttccaagtttcacttttactcctcccatgactaaaaagcaagtgaatctaggaaaaggtaaaactaaagaagaagtgtgcttttgttaaaaggcttttgattcatcatgtactttgctgatgtgatggtttagcgcgttctcagccgagccccttggaggtagtatcactgctcttcatctttgttctcccccgtgcctggcgttgaattggtgtttcttaattgtttcttttgttctgtgtagtgacccacttggaaaacacttctttctttcaattctagtatttggcatgatcattactatcggccagtctatcgtgtatgtgatgaccgggatgtatggggacccttctgaaatgggtgctggaatttgcctgctaatcaccattcaggtaattattatgctaacatctccctttgagtagcccctcacacttacctacaattctcacataacgaatctcaagcacacctaaaaggaactcctactgaaaggaagcagaagcctaagactctgggttagccctctgaattcagcagagaaaggctttactgaccgctctctggggctgaggatgtgatctcattccgtcttcagcgtttatatcagagaacccaattactgaaggacggaaccatgtccgtggggagcagtaacacatagtcttgtatttttgaatttttacagctctttgttgctggcttaattgtcctacttttggatgaactcctgcaaaaaggatatggccttggctctggtatttctctcttcattgcaactaacatctgtgaaaccatcgtatggaaggcattcagccccactactgtcaacactggccgaggtaagggccctgtgctcccctggtggcgacagctttcagcaaaaacaattgagcaatgcaaagcagaagacaaaaatccccccattccacagaaaaataatgtcagttttaggtttatctcttctggtgtttgggtccatctgcaaagttttaaaaacacaaataggcttgtaattatgatgatacctaacttgcacttttcatataaaaatatctcctggacgtttggcacgtcagaatacacaatcctgcctcacttttcttagcacagtataagcttatattgcaacgataaagcaacgttaagtcatttccaggtttttttatcgttaacattgaaaccatgactgtcctcatatgttcatctttgtatattttggcagctgctctcagtgaataagtttctaaaaatgaaattcctaaaccaaagcacttggtcatgcaaggggcagctttctgaaaaaggcctgaacttggagcttagcacctgcgttcaaatcctggctgttcctgttagtcatacatacgtggctttgggcagattcctgcaccactgaatcttggttaccaggatgcagtgagaagcaacatgaaattacatgatgcctggctcctggtagatgtgtatcaaacattggcatgctgtgctacatccaccaagtgccgtggaaatcttgtaacagcatgtttttaataaaaagttcaaaacatacaagggaagccttagagagtgtgacttattagggaaaggaaataaacattttttggcactaaatatcttcttcactgaggagcattccaggagaaataatcatgcatatttgagagttttcttttaattgaatgttggaaacagagtccttggcctccagagaccatattatctcattaatgagatggaaaactggtccccaaacaagtgaaggctgcatgtgcctaacaggttacaaagga

SEQ ID NO: 9858 - DNA, 6000 bp, Homo sapiens
agcacagtttgggactcaaactcactttagcattggggtttggtacaaattatttagctcttctaaggctcagttgtaaaataaaggtaatgctctgtggtgtgaggtgagctggggtgatgcctgtaggtccttgcattgtgctctgtgcagaggaagttacgcagtacatggtacttatgtttggtacatggtttggcttctctgctgaacagagaaaagagtctggttggagtccatttttagagaaaggggtctgattggagtccatttttattaatttgcttttcaaagtaactccctgcttcaattcattctctcctactctagattcagtttaaggagaaagtgctgtggaccgctatcaccctctttatcttcttagtgtgctgccaggtaagctcaggcttgtatttcgtattggggagggggataagagtggctggaaacaggagtgctgactgttttgctctttgcctgttcccagattcccctgtttgggatcatgtcttcagattcagctgaccctttctattggatgagagtgattctagcctctaacagaggtaggactctggctctgtcttttctctgtagagtgtaggcttacctagcttcacttagttaaattaataggctttggctttatatggaacttagagagtgacttggaaaatagagtgaagaatgttaaagtgctgtgttgaatagccttattaaatgctgagttcagcaccaaggcataccatcatatttggaattgtatttgaatgcagtacaaaacctgtaatgagaagataagtctatgctatagagagaataaaaaacatggaaaaactagaatactttttgaatacctgaaatgatgacatttccattgataacattcttcagaatatgtaatttgtttttcagctgtatctttttcatatctataggttacatatagtgtcaaaaaatatgtaacagtgttttatatcctctaaccagttacttatgggactggggaggattctgaatgtgtaggttgatactgcatttgattaactcatttaaaaaatatagttcaattaaattccaaatcagttggaagtgtagctcattttaacataatgggaagtagaggcttattcacaactagatacaattgtacaggctccttttccagactctggaaattatttgaatgttatcctttttttattaactgatgaagagacgaacatttcttatctctaaaaccagaatgaatctgtttatggtgaatttaaatgcagcagtctgtttagacaccatgtgacttcctaaacagaataagctgttgcctggcaggctgaacagaatgaattgaattatatactaatcgttgatattttggggttctaaattaaacacagctaggaaactgaaacacattggttttatataaggggtacccagtcaaattttgcgtattcatttttaaaataacgtactacgtttccaagctgatattgactgttttgcttccccgtttcctcaaggcacattgatggagctagggatctctcctattgtcacgtctggccttataatgcaactcttggctggcgccaagataattgaagttggtgacaccccaaaagaccgagctctcttcaacggagcccaaaagtgtaagaaagattgtgaataatctgatgtctatagttggaaaatttgaatttgctataagattttggtatcagtttttctttttttatttattttttatttttttttttttttttgagatggagtcttactctgttgcccaggctggagtgcagtgacgcagtcttggctcactgcaacctccacctcccaggttcaagcaattctgcctcagcttcccgagtagctgggattacaggcacgtgccaccacacccagctaatttttgtatttttagtggagacgggatttcactacataggccatgctggtcttgaactcctgatcttgtgatccacccgcctcggcctcccaaagtgctgggattataggcgtgagccaccatgcccagcccaaacagtattttcttttgtgctgcaacctccttggcctgccaaccctgcaggagctccatgccctgtgttagcgtgagagagcacttctggtagagcagaggtggtgggtgctggggatgggctgggcaaggcaggggagagtgtctggagtgcccctgaggccatgtaatggaggagaaggatcagagcttggaggtcttagcacccttggccaccatttcattattgcttaaaaggaagtaatggctacttcagagctgtcataaggattaaataatcactgtcacaatgcctggcacatagtagttatttggcaagtgttttataaaagaatttaactgactggggggcggtggctcacgcctgtaacccccagcactttgggaggctgaggcgggcggatcatctgaggtcaggagtttgagaccaacctggccaacatggtgaaaccccatctctactaaaaaaatacaaaaattagccaggcgtggtgacaaggtgccttaatcccagctacttgagaggcagaggcaggagaattgtttgaacccaggaggcagaggttgcagtgagccgagataaagccattgcactcaaacatgggggacagagcaagacttctctcaaaaaaaaaaaagaatttaactgaagaaaaggtgatcctgtcagtccagctgtataatttaccagctctgtgatctggggaaaagttagatgatagctcttatgtttcactttcttcatctgtaaaaatggggataataatggtatttgcctcatatctaataagtgttactagtaacaattactagtcatcaaaattagccatatttagcctctgtttgctgaaaaacattaattaggaaatgatatttacagtctcctatccagtcatcttttcgcctacaccagcatgttttacaggtcttaaattagtatggtggataattgaatgagaaatacgtctatttttttttttttttttttttttttgagacggagtctcactctgtcgcccaggctggagtgcagtggcgtgatcttggttcactgcaagctccgcttcctgggttcaagccattctcctgcctcagcctcccaagtagctgggactacaggtgcccgccaccacgcccagctaattttttgtatttttagtaaagacggggtttcactgtgttagtcaggatggtctcagtctcgatctcctgacttcgtgatccgcccgcctcaggctcccaaagtgctgggattacaggcgtgagccacagcgcccagccaagaaatacatctatttaaacttgtcagttttagataaaaattaggattctaaaatacacacatgtggctgggagcggtggctcatacttgtatcccagcactttgggaggccaaggcaggatgattgcttgaggccaggagttcgtgactagcctgggtaacacagtgagagagaccccatctctacaaaacaacaacaacaaattagccaagtgtggtgatgcacctgtagttctagctactagggaggctgaggtgggaggatcacttaagcccaggagtttgaggctgctagtgcaccactgcactcctgcccgggcaacagagcctgtctcttaaaacaaaacaaaaaacactaagaaaacaaaaaaagtacaagcacaaattggctgttttctctttggtcttcacaatgttttgaatgttttcctgcattaagaactaattgttgtggagcactttttaaaaagtcaaatagggactgtatttgatggccactttggagtaaaattaattttacatgacagattaaataggaaagctgaaactgaaggtcagactgtacttagaggacccatctagtactgtggaacttgtcaaatgtgtccattcccttgtgcctaacagtgaaatagagtgagttgtaagaaatgaagacaccctacaaaaaggaaagcttttgccaggcgtggctcatgtctgtaatccccgcactttgggaggctgaggtgggtggatcacgaggtcaggagttggagaccatcctggctaacacagtgaaaccctgtctacactaaaaatacaaaaaattagctggctgtggtggcacgtgcctgtaatcctagctactccagaggctgaggcaggaaaatcgcttgaacctgggaggtggaggttgcagtgagccaagatcatgccaccgtactccagcctgggcgacagagactccgtctcaaaaaaaaaaaaaaggaaagcttctattagaccaaaatagcttggtacctaagggaatgggaagagcagccaaatcaatggtacgtggggttttccttttaaaagcacattaaataaaaacttgagaagggatcactttaccccagagctaataattctgtcctctggacccagacctggatggtgagcctagagaggtggcccaaatctgtagttcagctcttgagccatcgagaccccaagtgcctgacattgagtttgggtgctgcaggtgtgacatctccagattgtgtctccggatgctgtcaggagtaggttctactccctgattttctttgaatagaacaaattttccaagtttcacttttactcctcccatgactaaaaagcaagtgaatctaggaaaaggtaaaactaaagaagaagtgtgcttttgttaaaaggcttttgattcatcatgtactttgctgatgtgatggtttagcgcgttctcagccgagccccttggaggtagtatcactgctcttcatctttgttctcccccgtgcctggcgttgaattggtgtttcttaattgtttcttttgttctgtgtagtgacccacttggaaaacacttctttctttcaattctagtatttggcatgatcattactatcggccagtctatcgtgtatgtgatgaccgggatgtatggggacccttctgaaatgggtgctggaatttgcctgctaatcaccattcaggtaattattatgctaacatctccctttgagtagcccctcacacttacctacaattctcacataacgaatctcaagcacacctaaaaggaactcctactgaaaggaagcagaagcctaagactctgggttagccctctgaattcagcagagaaaggctttactgaccgctctctggggctgaggatgtgatctcattccgtcttcagcgtttatatcagagaacccaattactgaaggacggaaccatgtccgtggggagcagtaacacatagtcttgtatttttgaatttttacagctctttgttgctggcttaattgtcctacttttggatgaactcctgcaaaaaggatatggccttggctctggtatttctctcttcattgcaactaacatctgtgaaaccatcgtatggaaggcattcagccccactactgtcaacactggccgaggtaagggccctgtgctcccctggtggcgacagctttcagcaaaaacaattgagcaatgcaaagcagaagacaaaaatccccccattccacagaaaaataatgtcagttttaggtttatctcttctggtgtttgggtccatctgcaaagttttaaaaacacaaataggcttgtaattatgatgatacctaacttgcacttttcatataaaaatatctcctggacgtttggcacgtcagaatacacaatcctgcctcacttttcttagcacagtataagcttatattgcaacgataaagcaacgttaagtcatttccaggtttttttatcgttaacattgaaaccatgactgtcctcatatgttcatctttgtatattttggcagctgctctcagtgaataagtttctaaaaatgaaattcctaaaccaaagcacttggtcatgcaaggggcagctttctgaaaaaggcctgaacttggagcttagcacctgcgttcaaatcctggctgttcctgttagtcataca

SEQ ID NO: 9859 - DNA, 6000 bp, Homo sapiens
agtccaataaaaatattttaaactagtgattctcctaaagcaatcagtgatttaacacacgtaacttggctgcagtccctgcagtgacacaggccagattgtgtcataatgtggaaacaacaggaggcctgttatcaatggtactgacatcctacaactattagcacaaaccaatgagtttatattaaaatttctattaactaattgtaatatttattgtaattactatactatttaccctcgaaatatttcaacattttaaccatcaatatggtgcagggtgcataatggctaaatatcggatctagtctatatgctgaacttagtccaggggctgccagttttagcttcaggccaaaactccagaagagatcatcagtgggtcctggaagtgaagatgggttgcatttcagactctgaataaagagtcaatgtcttctttttcccctttttggtgggggatggatatcaagtgatgtcacacctagaccacttcactgaagttacctgcctgttcccagtagtcctttgaattttccaccagtgggtttgtattccaaaaaagacttcctgtcctgtccaactttctgagccaagaatgtacaaaacctgattatctgctagaaatgggtgagaatggaaaaatccaaatagttgacacctaaattaaaagcaaaaaagcatcttgccacatatgtaccctcaacttctacctgtcctggtcaaggtttagctccatgaaaccttgcctgatcccacaaggcgtgcccacctcctccctgctaaatgctcacagcattaagtctgtttctcttagatgacatcatacctactgactacagatgcctgaaagtaaattccaacccccagccccagcatcccttgccctacccgttatccccctttcccacaccgatcttaggcaatcacaccgccatgctttgcccacaacagtctcctcaacctgttccctcattccttctcgccagaatctatcaaggctcggcacaaaggtactctcccaggaggccttcctgaattcttctgtgaggcagactacttcccgagctgccccggcccttctccggccaagtctctccagaaactcatcccattcgttctcagatggaaggggacccacacccacgacaagcctccgggtttgcttaatgactcagacagcgagggtgctcggtaagccccaccagcccgcgccctactcagcaggtaatgacggagacctactaggtgacgggcgccgcggtagacgctgggataaggtccctgctccagggagcttacggtctattcactaacgtcaaagagcagtgagtgctgttacgtgtatgggagccaccagggtctccgcctgcctgcagggccacgcgcgcactcgacgcttcgcgcctgcctcagtttctccgtgaggccgcacagccccagtctcgggaggcgtgacacaccctccccgcgcgctctcgcgttaccaagtctgcgcagccgcacacccccagtcccggcgggccccgcgcgccaggccccttcccgacaggccccaggagccccgctgcatgccggggcttgaggtctcggcgaagcggcgcggcgcggcgaagcgcggcggccggcgggcgcgcgtggcaggaagcggaagcgatccgaggcccggccccggccccgccccgcgccgcgccgcgccgcttgccgccgggctagcactgacgtgtctctcggcggagctgctgtgcagtggaacgcgctgggccgcgggcagcgtcgcctcacgcggagcagagctgagctgaagcgggacccggagcccgagcagccgccgccatggcaagtgagtcctgtagggaagccctattgaggccgggacggaacagatcccccttccccacacccgtgcggtcgggcgcccgccggccaaccctgaccggccccctgcagaacgcggcccgtgcccccggcccttctcgagtatccccacgcgtccggggtgcggccggctcccctggcccctgctctcactcgtcgtgggcagaaggcgtccctgggtagcgcggaaggttacttctctgtgtcccaactcttcctgttttgtttctcccatcaaagtcaaatttctggaagtcatcaagcccttctgtgtcatcctgccggaaattcagaagccagagaggaaggtaagtaccccaaatcgccaacaaagaaggtttcaggaaactgtctggactctggaagtttacagtatgattaaaaatggcttcagcacggcaatggaaactctcccttctcttcccttggagtgtagttgtgctctgttattccggagagctgtcgaaaggtgacctggttgtgtggaaatttccactgaaatcactgtgctttatttggagcatctttggtggatgttgctccgagaacaaagcctccggttgccctgtcccaaaaatggatccgggccatgaatgaataaggcctcagttaggatagcagattgagttaccctccctttttcacctccaacgggagcagatcacgggttggttttttttcccaggagatgccctttgtatccagctgctaaagggaagggctgtcactttagtatttacaaatgattttgtaccttttatgtaggctgtcacaatagggggaataaaggctattcttttgtgaagtctgctgcttttcacagacggtgtattaaaacaaggaaagattaaatttagagctgtgctgaatcagaaattgtgtggagtgagtgttgccagtgtaactacagctgtcaacgaaaaaaagtttcattaggttcctaggttagagagtggggaataaaatgtttgtgtcctcacattatttttcaaactgttgttaaagcattcacatggacacttgggtgcttggaatccactttcatttttttacgtaaaatagtttcatataaatgcccatgtgctgcttttaatggacgaatttgtaaagctttaccccctcaattccagtgtagcgaaggggcatggctctggaggcaggcaagcctaggtcccaccctttacatagcaccttaatagctatgtgaccttggccttgtaactcagtgtggtagacggaacaagggaaatacgtgcaaggtatagcagtggctcaggaagggattaactctgggagacatgatgtcttatggtggttttgaaggagaaatagaagtctccttgaagggacggaaaggaattccaaataaaaggagtatatagtttgcaaaggcattggtgacaagagtgtagcatgtttggatgggaggttattagatgtagttgctattgatagaacataattgtaggtggggaacattaggagatgaataacaagggccagacatgagaatgtcactttggaagaaaaggagaggactagagttggtttagaggcttttcacatcagaggatgaactgtggtactgagcaagaatggatttaggggctactaagaagcagaggagacaggacttggataaagagcttttggggttttgatgttaaatttgattgtaaccaggagagaggacttggtgattagaaagggagttttgaaaaaattgtctgctctttgtttcccatcaagattcatttcagacaggttactctgaaatggcgttgccttctcttggccactttctaatttcttagtgtggtgggatggtaggtgggaagaggaccattctcaagagaagaagagtcctgtgaatgcccccagctttggatggagtatctgaacactgattcacccactgttgtgtggccgtatgactgtgtcctactttgcctgcatgtatagttagaggactgtgactccagttctggccagagggccaggaatgctgactcagtgcctgcctagaagtgtttttaaagaacacagttttgtcacttaatactgtcagtctctcacaaggtatttcaacctcagaatcttccgtctgtacaataattaatgtttgttaagccctctaaagccattaatgtagtgtaggcagcaggtattagtgaagacactcagtttcagaggcagaaaacctggaagagttcccactctactctttagtgacagaggttttgggtgggaggttttctaatgatacttaatacttaatagtcatctttacagtgattcttgtcacctatgcaacctatgtacctgagaagatgtgaaaatccttaaacaaatgttactagtaggttaaacatgcaactctcctgcccttccccaatatggtttattacactgttttacccttaattcatagaaaatacactattgagcaattccaaattacttgactctagaataacaaggttttgtgactgaaactcaaatgaaaagtggttgctcgtgtgttttacaagtcatgttctattgtgacattctttgttcttgagtcttaactgttaatgctaatggttaaaagcacagtttgggactcaaactcactttagcattggggtttggtacaaattatttagctcttctaaggctcagttgtaaaataaaggtaatgctctgtggtgtgaggtgagctggggtgatgcctgtaggtccttgcattgtgctctgtgcagaggaagttacgcagtacatggtacttatgtttggtacatggtttggcttctctgctgaacagagaaaagagtctggttggagtccatttttagagaaaggggtctgattggagtccatttttattaatttgcttttcaaagtaactccctgcttcaattcattctctcctactctagattcagtttaaggagaaagtgctgtggaccgctatcaccctctttatcttcttagtgtgctgccaggtaagctcaggcttgtatttcgtattggggagggggataagagtggctggaaacaggagtgctgactgttttgctctttgcctgttcccagattcccctgtttgggatcatgtcttcagattcagctgaccctttctattggatgagagtgattctagcctctaacagaggtaggactctggctctgtcttttctctgtagagtgtaggcttacctagcttcacttagttaaattaataggctttggctttatatggaacttagagagtgacttggaaaatagagtgaagaatgttaaagtgctgtgttgaatagccttattaaatgctgagttcagcaccaaggcataccatcatatttggaattgtatttgaatgcagtacaaaacctgtaatgagaagataagtctatgctatagagagaataaaaaacatggaaaaactagaatactttttgaatacctgaaatgatgacatttccattgataacattcttcagaatatgtaatttgtttttcagctgtatctttttcatatctataggttacatatagtgtcaaaaaatatgtaacagtgttttatatcctctaaccagttacttatgggactggggaggattctgaatgtgtaggttgatactgcatttgattaactcatttaaaaaatatagttcaattaaattccaaatcagttggaagtgtagctcattttaacataatgggaagtagaggcttattcacaactagatacaattgtacaggctccttttccagactctggaaattatttgaatgttatcctttttttattaactgatgaagagacgaacatttcttatctctaaaaccagaatgaatctgtttatggtgaatttaaatgcagcagtctgtttagacaccatgtgacttcctaaacagaataagctgttgcctggcaggctgaacagaatgaattgaattatatactaatcgttgatattttggggttctaaattaaacacagctaggaaactgaaacacattggttttatataaggggtacccagtcaaattttgcgtattcatttttaaaataacgtactacgtttccaagctgatattgactgttttgcttccccgtttcctcaaggcacattg

SEQ ID NO: 9860 - DNA, 6000 bp, Homo sapiens
cccggcccttctccggccaagtctctccagaaactcatcccattcgttctcagatggaaggggacccacacccacgacaagcctccgggtttgcttaatgactcagacagcgagggtgctcggtaagccccaccagcccgcgccctactcagcaggtaatgacggagacctactaggtgacgggcgccgcggtagacgctgggataaggtccctgctccagggagcttacggtctattcactaacgtcaaagagcagtgagtgctgttacgtgtatgggagccaccagggtctccgcctgcctgcagggccacgcgcgcactcgacgcttcgcgcctgcctcagtttctccgtgaggccgcacagccccagtctcgggaggcgtgacacaccctccccgcgcgctctcgcgttaccaagtctgcgcagccgcacacccccagtcccggcgggccccgcgcgccaggccccttcccgacaggccccaggagccccgctgcatgccggggcttgaggtctcggcgaagcggcgcggcgcggcgaagcgcggcggccggcgggcgcgcgtggcaggaagcggaagcgatccgaggcccggccccggccccgccccgcgccgcgccgcgccgcttgccgccgggctagcactgacgtgtctctcggcggagctgctgtgcagtggaacgcgctgggccgcgggcagcgtcgcctcacgcggagcagagctgagctgaagcgggacccggagcccgagcagccgccgccatggcaagtgagtcctgtagggaagccctattgaggccgggacggaacagatcccccttccccacacccgtgcggtcgggcgcccgccggccaaccctgaccggccccctgcagaacgcggcccgtgcccccggcccttctcgagtatccccacgcgtccggggtgcggccggctcccctggcccctgctctcactcgtcgtgggcagaaggcgtccctgggtagcgcggaaggttacttctctgtgtcccaactcttcctgttttgtttctcccatcaaagtcaaatttctggaagtcatcaagcccttctgtgtcatcctgccggaaattcagaagccagagaggaaggtaagtaccccaaatcgccaacaaagaaggtttcaggaaactgtctggactctggaagtttacagtatgattaaaaatggcttcagcacggcaatggaaactctcccttctcttcccttggagtgtagttgtgctctgttattccggagagctgtcgaaaggtgacctggttgtgtggaaatttccactgaaatcactgtgctttatttggagcatctttggtggatgttgctccgagaacaaagcctccggttgccctgtcccaaaaatggatccgggccatgaatgaataaggcctcagttaggatagcagattgagttaccctccctttttcacctccaacgggagcagatcacgggttggttttttttcccaggagatgccctttgtatccagctgctaaagggaagggctgtcactttagtatttacaaatgattttgtaccttttatgtaggctgtcacaatagggggaataaaggctattcttttgtgaagtctgctgcttttcacagacggtgtattaaaacaaggaaagattaaatttagagctgtgctgaatcagaaattgtgtggagtgagtgttgccagtgtaactacagctgtcaacgaaaaaaagtttcattaggttcctaggttagagagtggggaataaaatgtttgtgtcctcacattatttttcaaactgttgttaaagcattcacatggacacttgggtgcttggaatccactttcatttttttacgtaaaatagtttcatataaatgcccatgtgctgcttttaatggacgaatttgtaaagctttaccccctcaattccagtgtagcgaaggggcatggctctggaggcaggcaagcctaggtcccaccctttacatagcaccttaatagctatgtgaccttggccttgtaactcagtgtggtagacggaacaagggaaatacgtgcaaggtatagcagtggctcaggaagggattaactctgggagacatgatgtcttatggtggttttgaaggagaaatagaagtctccttgaagggacggaaaggaattccaaataaaaggagtatatagtttgcaaaggcattggtgacaagagtgtagcatgtttggatgggaggttattagatgtagttgctattgatagaacataattgtaggtggggaacattaggagatgaataacaagggccagacatgagaatgtcactttggaagaaaaggagaggactagagttggtttagaggcttttcacatcagaggatgaactgtggtactgagcaagaatggatttaggggctactaagaagcagaggagacaggacttggataaagagcttttggggttttgatgttaaatttgattgtaaccaggagagaggacttggtgattagaaagggagttttgaaaaaattgtctgctctttgtttcccatcaagattcatttcagacaggttactctgaaatggcgttgccttctcttggccactttctaatttcttagtgtggtgggatggtaggtgggaagaggaccattctcaagagaagaagagtcctgtgaatgcccccagctttggatggagtatctgaacactgattcacccactgttgtgtggccgtatgactgtgtcctactttgcctgcatgtatagttagaggactgtgactccagttctggccagagggccaggaatgctgactcagtgcctgcctagaagtgtttttaaagaacacagttttgtcacttaatactgtcagtctctcacaaggtatttcaacctcagaatcttccgtctgtacaataattaatgtttgttaagccctctaaagccattaatgtagtgtaggcagcaggtattagtgaagacactcagtttcagaggcagaaaacctggaagagttcccactctactctttagtgacagaggttttgggtgggaggttttctaatgatacttaatacttaatagtcatctttacagtgattcttgtcacctatgcaacctatgtacctgagaagatgtgaaaatccttaaacaaatgttactagtaggttaaacatgcaactctcctgcccttccccaatatggtttattacactgttttacccttaattcatagaaaatacactattgagcaattccaaattacttgactctagaataacaaggttttgtgactgaaactcaaatgaaaagtggttgctcgtgtgttttacaagtcatgttctattgtgacattctttgttcttgagtcttaactgttaatgctaatggttaaaagcacagtttgggactcaaactcactttagcattggggtttggtacaaattatttagctcttctaaggctcagttgtaaaataaaggtaatgctctgtggtgtgaggtgagctggggtgatgcctgtaggtccttgcattgtgctctgtgcagaggaagttacgcagtacatggtacttatgtttggtacatggtttggcttctctgctgaacagagaaaagagtctggttggagtccatttttagagaaaggggtctgattggagtccatttttattaatttgcttttcaaagtaactccctgcttcaattcattctctcctactctagattcagtttaaggagaaagtgctgtggaccgctatcaccctctttatcttcttagtgtgctgccaggtaagctcaggcttgtatttcgtattggggagggggataagagtggctggaaacaggagtgctgactgttttgctctttgcctgttcccagattcccctgtttgggatcatgtcttcagattcagctgaccctttctattggatgagagtgattctagcctctaacagaggtaggactctggctctgtcttttctctgtagagtgtaggcttacctagcttcacttagttaaattaataggctttggctttatatggaacttagagagtgacttggaaaatagagtgaagaatgttaaagtgctgtgttgaatagccttattaaatgctgagttcagcaccaaggcataccatcatatttggaattgtatttgaatgcagtacaaaacctgtaatgagaagataagtctatgctatagagagaataaaaaacatggaaaaactagaatactttttgaatacctgaaatgatgacatttccattgataacattcttcagaatatgtaatttgtttttcagctgtatctttttcatatctataggttacatatagtgtcaaaaaatatgtaacagtgttttatatcctctaaccagttacttatgggactggggaggattctgaatgtgtaggttgatactgcatttgattaactcatttaaaaaatatagttcaattaaattccaaatcagttggaagtgtagctcattttaacataatgggaagtagaggcttattcacaactagatacaattgtacaggctccttttccagactctggaaattatttgaatgttatcctttttttattaactgatgaagagacgaacatttcttatctctaaaaccagaatgaatctgtttatggtgaatttaaatgcagcagtctgtttagacaccatgtgacttcctaaacagaataagctgttgcctggcaggctgaacagaatgaattgaattatatactaatcgttgatattttggggttctaaattaaacacagctaggaaactgaaacacattggttttatataaggggtacccagtcaaattttgcgtattcatttttaaaataacgtactacgtttccaagctgatattgactgttttgcttccccgtttcctcaaggcacattgatggagctagggatctctcctattgtcacgtctggccttataatgcaactcttggctggcgccaagataattgaagttggtgacaccccaaaagaccgagctctcttcaacggagcccaaaagtgtaagaaagattgtgaataatctgatgtctatagttggaaaatttgaatttgctataagattttggtatcagtttttctttttttatttattttttatttttttttttttttttgagatggagtcttactctgttgcccaggctggagtgcagtgacgcagtcttggctcactgcaacctccacctcccaggttcaagcaattctgcctcagcttcccgagtagctgggattacaggcacgtgccaccacacccagctaatttttgtatttttagtggagacgggatttcactacataggccatgctggtcttgaactcctgatcttgtgatccacccgcctcggcctcccaaagtgctgggattataggcgtgagccaccatgcccagcccaaacagtattttcttttgtgctgcaacctccttggcctgccaaccctgcaggagctccatgccctgtgttagcgtgagagagcacttctggtagagcagaggtggtgggtgctggggatgggctgggcaaggcaggggagagtgtctggagtgcccctgaggccatgtaatggaggagaaggatcagagcttggaggtcttagcacccttggccaccatttcattattgcttaaaaggaagtaatggctacttcagagctgtcataaggattaaataatcactgtcacaatgcctggcacatagtagttatttggcaagtgttttataaaagaatttaactgactggggggcggtggctcacgcctgtaacccccagcactttgggaggctgaggcgggcggatcatctgaggtcaggagtttgagaccaacctggccaacatggtgaaaccccatctctactaaaaaaatacaaaaattagccaggcgtggtgacaaggtgccttaatcccagctacttgagaggcagaggcaggagaattgtttgaacccagga

SEQ ID NO: 9861 - DNA, 6000 bp, Homo sapiens
cgaagttcagtctgtggatcagaagcaccagcatcatccaagagcttggatgaaatgcagagtcccaggccccgccctagacctgctgaatctgaatctgcattttaacaaggtctccaggtgattcataggcacattaaagtttgagaagcgctagactagatggttgataaaatccatttgaactcacagggtgtacagcacagagcagagaatctggcattaaatgtctggattacagtttgtataacctcagaaggctgagcttccaaatatatgagtttccttttttgtgtcttagttccttcatctgtagaaaggtgataaaacagtagtttcttcatgaagttgttgtaaagattgcaaagtgccgagaataagcaaataatacagtgcctggcatattggaagttcctcaatcatgaaatatacatttactgcacacccattatgtacatgtcagattcgtgctgggagctctgaatgcaacagtacagaaaacaaagcccctaccttcatgaagcttacattgtagtgaaggaaatcagcaataattaaaaaaaggcatgtaaagaattgtcacataaccatttgctctatgaagtaaagagaatgacagcagtgctattatagacaggaaattcagaaaacgtctttggagaagaaaagaaatgagtcgatacctgaattagttattatgtgattagtatgtggagctaagttccagtcatagtgctaagcaattttatatgaatgcatataaagaatttttgacactattatgcacttactgtaacaaccttattgccttactccaatttggatgctgaaaacttattattactctttagtctgactcaaaaaacctctcagagccatccaccccagcaatggagataatataacagtatcatacaccctacaatttaatcacagcatctagatataaactagaactttggatcagtaccatggtgataacaataagacttctatttccatatgtggaaattaagactccctaaccccttttatagaaaaagatgtgtttaacttagtagcttggctatattccaatttatacttttacctaagaatttcagtctttgggtttagtagatatttttcttcatttccctttgctacacaataaacatgcaaacaaataactgttatgtggtgtcactggcatgaaatagcttctatattccaacacagatggggtatcttaataatgggaagatgatctcacactttaaagtgcttgatataaaaggtgccatataaaaaggaagttattattattagttataataccctaaaaaagggatttgccatctaaatggctgctgaaacttaactgcagaattgcttataatgctacaatcagttgaggccaaattcaataaaaattccatccggcattcacactgagaagacccacatgtgcctttaatttttttttaatttcctgggcttccggcccagaaattggatggaaattgtattgaaaactgcccttgtgtatcaacttttggtaaataccaggctttcagttgactcacattatgctttacattttgggcaaagggagggtataaaatgattcacgtctctctatatacatatatttatacaccttttacctgtctatgagactgtggcttatattaaatgttcatcattatttctacaatttttaggatctgccagcccccaccaacccccccactgcaaccataagactcaaaattccattaaatccctttccagcactaatcagcttttactagcacaggcaatgtaatctgagtttagaaatgactaattatttggagagggctggaaggggttagggtttagatttctttctaatttaaaggagcttctttcctgtctttctccctgtcattttgctgcctgtggccagctccccctccttgatgaaaatgctctttcccttcccattagacaaggtatatatgtatgtattagaagaaaaatgtattaggagacatcaagttgaaaatattaaaagaagagccatgcctgtgatggatgtgggcatggcagtaattgcacctgctaggggcaaggcatgggcataatttgcatgtaaagttctctcggctccttccagaacacaccagttctacccaataaaacattttgtcacctgcagggggtttgccaacatgttcccagattgcaagcaaaaagattatttacagtaaccagtaacaactgaaacaaccataaacaacctttctgtacctgttctatttctttttcctttggctaagtagaggaagcttaaggagtccaaatttactgcaatttaattctgatggggaaaaagcacatgatttttatttatagcagcgtgctctatctattcctgtctcccccaacctctttttaaaacataaataaccccggaattttttgtaatccagctattactcttgtagggatgagcagtttcctgataaagtgagagagggcaaatgtggccagaagttccctaatgtattcaagaatcctgttgtatgctcatagagtaagggggactagggaaaaatcacctggtcaagccattcatgcaatttctttttttgttattgttgttgttctgttttgagatagggtcttgctctgtcacccaggctggagtgcagtggttcaatcatggcccactgcagcctggacctcccaggctcaagcgatctcctcctgccacagcctcccaagcagctgggactgcagacacacaccatcatgctcagctaatttttaaattttttgttgagaggcggtctcactgtattgcccaggctggtctcaaactccagggctcaagggattctcccacctcagtcttccaaagtaccaagcaacttctttgtggcaattggaaatgcagggggcctacatgctgactttgctgtagggagcggcaccttgcatctgactgacctgggtcttacctcttgtcctcaaaccccctctaggagagtttttccagaagttcagatttcattctgaattgcagaggaccacgcacgtatctcttgagaaaatgatcaaacgtgagaaagtgcagttaaaccaggcctggtttgcccaggttgcttctcttgatgaggtgttgcttcattccatctgcaggaatcacagggagaggatcaaggagaggaaacagggccataaactgtcaagtctaattaaatgtgactagattatttaatatgaagggacaacgtgatacattttaaaaacaatgtcagagaattataaaatgaaaagtataaagtctcctctgctccaatttcagtctcactcactaggactaacaattgttaacagtatccttagacatcctttcagaaattgtgaatgcataaatatggatacatacacacaaaagggtgcgtgcgtgtgtgtgtgtgtgtgtgtgtgtgtgtgtgtgtgtaagtgcttgtaagcacaaaaacggtacaggtaccaactttcctgtgccgatcaacagtacatgtcccaagttctcctaacaataccgtttatttatttttttatttatttagagacagggtctccctcagtcttttggtctggagtgctgtggcacaatcatggctcactgcagcttccacctcctgagctcgagtgatccctcaagtgctcctcccacctcaacctctcaagtagttgggacaacaggtgcgtgccatgacgcccacctaatttaaactttttgtttgtttgttttttgcagagacaaagtctccctatgttgcccaggctggtctcaaactcctgggctcaagagatccacctgtcttggcttctcaaagtgctgggattacaggagtgacccacctccgcccagcctctaaggatacctcttggaggtcatttatgccaatactagtagatgcacctttctctctgccgctgtatgtctccactgtattttatcagccactctcctaatgaaggacaggtaggttgttcccaactgtttttcgtacaactaaagttgcagtgtttgcacgggtttgactggaagtaagtcaccagcggttcagcgcaaaggctcaggactgcaacaggcttattcaagtccgggttctccaacccaccactgtgtgtatacttgggcaaataaaggtggtaagatctacttcacagggtccttgacagaatatagttgcgattattctcacaactgactcattgaaactttaagcaaaccaatttcctcatcactaaatccgggaataataatagatccaggttgctctggggactgcatgaactaattgatttagcgcagtccacgacctgctacctagtgagcccttaataattatccgctttaatattaaaattggcaatctttgcgcacttgtgggagcgcagctgcaggaggcttttctagaagtggaattcctgccttaaccccgtgttccgagggccctaactgcgtggcacgaggccacccggaggtgacacggtgaccgccgcccagcccgcgccgccgcccagggccctgcggaggccggacacacgtgggtgcacgcggccgagcgcagggccgcgcggggtccggccggcgcagaggcgctgggggcgccgcagacgcgaggctcgggacccagttggctgctccgccgcgctccccgcccctccctccctccagtccgcccggtctcccctccctccagcgtccgcgtcggagccggagccggagccggagtggcggaggcacgggcagtgctcgctaggcgccggcagcagccacagcagcctggcgcttggcggcggcggcggtggcagcggcgggcgggctggcgccgtggactgggccgggaaccgtgcggacgagggtgctgcgcctgcggcggcggcggcttacgcgggcgcgcacggcggccccccgggcccggactaactgcggcggcggcggtggcggcggcggcggcggcggcggcggcggcgagtgggccgtcggggcgggcgtctggcgagctgcagagaccaggtaagtccgggatgcccgactcctggcgccggccgggccacagggatgagccacctgccagggcaaactttacgccctggcttcatggctcctcagccccgaagtttgtttgcagggaaatgcacctgacgggtcgagaataaaagatgcttctctcatcggacttgctctggggagattatttttccccttctggggcgaggattggtttcgggttgggaaggctgcatccccagctggagcgctgaaaattgagtggtaggtcccttgggcttgcccttcgcgcagtggatttgaccagttaaagttgggggaaaaaagttgtgactcctagggatgctgaggaacaattccaggtgcatgatgcagaatgtgggaatgtgatacctctttgctggaaccaccccccaggcccagattcccaggtctgagaaagctagggtggccgattctttcattagcgatcaagttttctaagctgcattttctttctactcacagatcagcagcttgggacggagttccccgtcgcgtttatttgtcaggtttaccctgctgcgctgtagtccaggtttcctgagctcggaccctggtttcagctgtttctgtgttctctgaggagcctgcaaagctaaccaagcaggtaacagaatagcagaaacagaaaaccaggaagtgccaaccgggcaccggggtcatagcaccatcaggaattttttctggtcgcgtgaaatgaacgaacagcttctgggctctgcttgtgcaaagctccgtacaactctccaatccgtatgtctttccctgtattgcatttgcttattgatttacaacaaggagatgtgtccagaggtattatttaataacaaacggtgtccgctacggtaaggacagcaaacctcctttcagaggcaaagaaaggggaacagagctctgggaaaggggtagccagtctgcta

SEQ ID NO: 9862 - DNA, 6000 bp, Homo sapiens
cataaatataattcatttctgaagtatcgaaattggagatgactttttgtagatgcaagagagggtggtgtattaagcaatccttacagttaaaattgctgtagggtttttctctttgagaaagaaaatgtttgttaggtacatgttatctgaaagaaatgttgccaaatcattctcacacctaaactttctccacataaagaaatgtaactctcagcatttgccaagatgatattcaaggttgtctgtatacattaaaaataataaatacatatcaatatttcatgatatctgcagtcttagtagcagttttgtaaagtatatgactagccacaaatggtttcttccttcttttagagcaaccaggcacaactatttagagcatttttggttttgagtccaaggtctagcattttttagctcagctgacattaagaatagatagtacagttgtcaatatgcattaaatttgggggctatttaaagattgccatgagaacgtgttgtgaatatattaagctttagcccttaaatgcaaatgtctattagcacggaaaattctaaaggttatctattttttctttggcttaaaacattcctgtgaatagtagaatattcttattgtagcagatgatattttgatttgtatttgtcttgcttcagtagcttcctttgtatttattttagctttgtgatttcagaagtggggagagctttaatatgtcacctctctccgtgatgatacatggcaatgctgagaagtcagattgtgatagtattaattaccttcattatttataaagccaatgtcctactttaacattgattaaaaataagcaacataatttaaaaaaaacttcctgaatgacatctctttttatcttcaaaccttttacagtgtatgcatgtgtgtacgtataaatgaatattatatgatattaacatatcttttcttttaaatcaaattctttgtctattgttttctagtttctaatttctacgaatttgtgggtgagagtaacattggtatgttgcaaaatgtgttctcttttcatcttgttaagccagacacagattataatatttctaatttgaatgtttatttcaaatatgattatttcacctccctgattaaacttgcagttaacctttcaagggtattattctgcgactaatacccttagccagacatacaagattgacccccatacatctgcagtctcatttcataccacgctgagctttgccacgtgtatttcatctctttagtcttctttctgtttgtgcaacccgagagcaaaaacataccatgagcacctaagccacagggcctttgcatattctatttcctatgcccagaggtgattgttaaaatatttaaccagcagtagggcatgcatactgatcaatccaaagtgacatgggctagagcagaattctggaggccctctgctgagccttttggttggctccagagaggtgtggtggggtcctgggacagcatggagataagtagtagttgatgggggagtggtgtccagacattagctactcacaagcctatctgccacctaataaatccataccaagtacttgtctacactaggaaaatttccttccctcactctgcagcacatacacacacctcattatttcatctcttcttttcttcctctgtaccccaattcctcagagaagttttccctaaccttcctgatgaggactgttctcatttaggctttcatagaaacgtctaccctctactgtacctttcatgtgggcaatttataaataccccatactcatttaaacaaggtgtcactcgcaatagttgataaactctatgagtacggggattatcagtctcctgacaatctcatcaccacctccacctccctctagaattgtaatcccagcaccgaagaggtactcagtaaatttttactgaatgagtgagttttcaaaaataatttagagcttcttggaacacatttatatgttttaaatgtaaccaatgtacatgttatcttggggatggattgttgggaagataacgttttttgaaaacaatcaccttctttatgccttctcatacactttcctgaaacaattttcacatggtggccagttcccatgctgtgacttatcctttggttccagtagaaatgcttttcactcacttgatgtccggtgcaaagatttaatctcctgagtgactcattcattgttcttaaagctcagcaagaaacattgcttgaaagcctcctgtgaaagggtatttggaacattggagcaaccagtgatgggttaactgtggttctaccttcagagatttatcaatcaatctagtaatttactccttatttataagagtttataatattctcttttcccattacaatattaggatgcagaccatgtatttttttccaaatgacatagggcagagcttcatatatttatttgaatagtttttgatattaaagatgaggatgataatggcaaggttactgcacaattgtttgctagagtttccccttcctttcctgaaattcccaactacctattctttttaagtctgttattctgttattgccgaattccttctaagttagatttcgtgtatatactggatagctataacttctgtgaagaaggaagtaccagttcaatcaatgtactcctcaagcctttgcagtgttctagtcttacccattgtccctagactttagtgcatgttactatcatttcctagcttctcatgagtcttagacatatatatgtatcagattaatgtatctcatgtttcacatgccttttatgactagttagcattgtattttattagataatttaaaaaacattattggttttccactcttatctatctatctatatgtgtatgcatgtttgtgtgtgtttcatctttctcctgatttttggaccacggtttcctcaaatgcatgattagaagaaaaactatggctgccagttataaattaaatctaatctagaatgatttcagttatcatttaaattagtaattgaaaataattgtggacataggatatgtcattgattgagcagaaggaaggaaggaagaaaggaaggcaagatacctgagaccctttggtccaagcagggaaaatcagccactggaaaggcttgagcagtataatgattgattgaggtggaatgtgtgtctctccctcgtatatttaaattattcagtaattttggccatcaatcacgtgggacctggtgctgttaaaaataacttcaaaaagcctgttttctatgcacagtgtagcagacactgcgtgtgccctactcatcctcttgccttcatcactccagtgcacacaccacttttaatagctagcatatatgtttctttccttttttttttcctttttccacctctggagttatttactgccctagtaggaggttacaagtactgggcaattactactattatgggaactggtgctgccttgcccctttgcaagaataactcagggatgactcttggatgactcttaggcattggttctataggaactggacttccagtcacccatggtgttagaaggctttatatttcaccctttctaggctgccttccttttcctatcttacttctccatcctgtctgtttttgtccttcacttcccaagtaaattacttgcacttgaattcattttgtcttatttgtgttgtggaacccaaactgagacatgcagtttgcagcagtggggatattgagtgaaggttaaaggtcaatgttactactgtaagttgttaacctgcaattcttagaacagcagttctcaattgtattttcatttgtttcagattccagtggacctagagggagtgatgcctaggcattctagccgcaattccatctcttacaacctacccaagaatatatattagattgcaggcacctaagaatattattataggaatgatgacttaacatattattttaagtacatatttttcaagttgtcatatttttattatttgagttcttattatttgggacgtacataatatctgattgcatacgccacatgtcaggaacccattgttgggaaccactgtctacaggaggccaagttctctctttgggtcagtgacaactaaaacagctcaatcagtagcagctgctgaatcagagagttgtacccgttccttactaaagtagcaaactttaaaatcattaattccccgtgtggtaccaactgaattgtaggagtccagagatttaggtctgtgtatcgcgcatacttgatcattaaccatgaagcttaactagttttaagtggccactcaaaatgacacaagactttcacatacttatttcctctcaaccaacatattcaagtttatgaaaattaaagcaaaaaagaaaatggtttcatttgcaaggttctcagactgaacatttctaccattagcattttaaaatctgttttacacagcatacataattgggagctttctgcagttttctaaaaaaataggtctaagatggacattgataatgctatctataatttgcatgctttattaggaattcagaaactgcaaaaattagtgcttcaagatatctgcttatttgactctgttagttttgccagaatgctatcgttagagaaaatggaaaaagttagaattttaggttaatgttttctttcttgaaattatctagcaaaatttttaataattaatatattaaaatttaatattttaatattggtaaacatttcaaattctataagatcgtttccatctacctatgagttacatgttttttaagtatctacatttcaagcgtcctctattttgtatcaaaacagatttgttttatctgagggttttcagtgtctccaaatgataaacagtttttacgaaaagaagaaaatctcttttttaaagcagcttttttttttttttttaacgaacttctttgtacatatattttacagattaaaggatttacctgaagagaaagcattctattcatcagagactggacaagagttactcttgcatttggcaattaaagatgatgtttccatggaaacagttgatcctgctttcattcattggctgcttaggaggtaaaaaaaaatcctatattttctaagttgaggttagaagtatactcgagtcatatgcttacataatttttagatgttgaaataaaactccaccagtagcaaagaaaaacaaatgtttttcctcccaaaaggaaaatttaaattctctaatctgataattgggttcttattccttcccttatttttgtaagccatttttatttccatagcaaatataatgacatctgatattacagatctactgtaatattatgctttggtattatgaatataacatcaaatttgagcatgttaatttgtgacattttttttccaaaggaacttaaagaggtgagatctcacatacaaaggagcatataaatttaaaaagtgctggtattttcatatgttttacttttagcaaataacttatctaaaggaccaaaactgaatatagatacaattttattttttaattttggaaaatttgaaatttagaataaagtagaaagaaaaaatgaaaaaaaattatcgtctttgacacatacaaaagcaactattacaaatcatttgttgtattttcttttgttaattttattttattttctggagaaataagtaagtgaagagtttttttaaaatagtgtatatataactaactttttgtttattttattttgttttccctctttttatgatattctcaagcaccaaaaaagctgaaacaataatacaatgaatgaatacatctgtaggtattattgagatgtagctattgtaccattttactgtatttcttctgtatatatgtgtgtgaatgtgtgctttttccttttttttttatctgtctacttattttggctaacccatttgaaagtaagtcata

SEQ ID NO: 9863 - DNA, 6000 bp, Homo sapiens
ctcagcctcccaaggtgttgggattacaagcctgagccaatgcacttggcaagccataacttttttttttttttttagtgagacagggtctcactgctgttgcctaggcagaagtgcagtggtgagatcatggctcattgtaaccttgacctcagtctcaagtgatcttctcgcctcatttttttatttgttaatttttctgtagcaatgaggtctcactgtgttgcctagtctggtctcaaagtcctgggctcaagcaatccacaggcatgagccacagtgcctggcccagcgtaacttttatatgcacttggaaaccaaaaatgtgtgtgacttgcttttttgtaatattctctttatagtggtggtctgaaatccaacccaaaatatccctaaggtatgcctgtattttgttttattattttttttttattgacattcttaagcaaataaaaagcaagttactgactgggtgaaagtatttgcacaacacatatctgagagagaacttttatccaaagcacctaaatattttttacaattcagtaagacaaacatattgatttttaaatgggcgaattgttattattttttcagatggagttttgctcttgttgcccaggctggagtgcaatggtgcggtctcagctcactgcaatctctgcctcccaggttcaagcaattctcctgcctcagcctcttaagtagctggaattacaggcccctgccaccatgcctggcaaatttttgtattttaagtaggcatggggtttcaccatgttggccaggctggtctcgaactcctgacctcaggtgatccgcctgccttggcctcccaaagtgctaggattacaggtgtgagccaccccgcccagccaagaaatggaaattaaaatcacaatgagataccatttacactcactataatggctagaattaaaaaaaagagtgacaatatcaagtgttggccatgctgcggaatatctggagcccatgtatattgccactgggaatgtggaaacaaatattatgaccgcattgggtaaaagttgggcagtttctttgggaaatatggaaggtaggcttcaagagctggccatttaggccgggagcggttgcttacgcctataattctagtcgtttgggagggcagaagagaggacccctttaggccaggagttcaagaccagtctgtggaacatagtgagacctggtctctacaatttttttttttttttttaaattagccaggtgtggtggcaagtgcctgtagtcctagctacttgggaggctgaggcagattccttgagcccaagagttgaggttgcagtgagctatgatcatgccattgcacttcagcctgggcaacagggtgagaccctatctctaaaaaaataattaaaaaaagagagctggccattcacttattctattcagaaagcaaaagaatggcttctaaagagaaaatacaagcctaacactttgacagagaagtgagagttaaaaagtgaccgggcgccgtggctcacgcctgtaatcccagcactttaggaggccgaggtgggcagatcacgaggtcaggagtttgagaccaacctgaccattatggtgaaaccctgtctctaataaataatacaacgacgaaaaattagctgggtgtggtggcgcacgcctgtagtcccagctattcgggaggctgaggcaggagaatcgctggaacctcggagctggaggttgcagtgggccgagatcgtgccactgcactccagcctgggtgagagcgagactccattaaaaaaaaaaaaaaggccgggcgctgtggctcacgtctgaaatcagcactttgggaggccaaggcaggcggattgcctgaggtcaggagttcgagacgagtctggccaacatggtgaaaccccatctctactaaaaatacaaaaaaattagccgggcgtggcagcgtgctcctgtaatcccagctactcaggaggctgaagcgggagaatcgcttgaatccgggaggcagaagttgcagtgagtcgcctgggcgacagagcaagactccgtctcaaaaaacaaacacacaagaaaaactaaaaaaacccagcaagctacaggagtcgagtggttccgaaagagaatcagagggcaagaaaagaagacggggtgaagaagacaggaaaaggtgaaggaggcgggcaaaggtcacctggtgtaaacttggctgcccagctctttatgcactcagggcagcatgggagccctgtcgccccgcgcgcatctacgggcctggcagccggggacgcggggcaggcggggaaaagaggggtgcgcaccccgcgggcgctggcaccccccaggtaccgcacacagtagtccctaggaaggaggctcactttgcgcgttcttgcctcctggagcaggatgggggtgggtggagctgaggccggggcctccccgcagctctggccgccgccccaggctttcagtagcctcctcccgcagtcactcatctccagtagtaggaaaaaacggaggtcttgatatgaaactggggatgcaaggaagtacttatatatcatgcaaatagtctttcagcaccattgaaaagtctcaagaatgtgggtgaaaatcagattcactctgtccacttgaaaaaaatgaactaacagccctatagaccagtttcacttggccagtatattttaccaccaatataggtcactgtaagcactgccagctagtttgaaaataggactggtgtgattatctgaaactgatgttgaatgggtaaagccaaaaaaaaaaaagatctctgggcttcagcccaggagttgaagatcagcctgggcaacataatgtgacccccatctctatccaaaagaaaaaaataattgccgggcatgtggttccagctacttgggaggctgaggtgggaggatcgcttgagtttgggaggtggaggctgcagtgagctgttacagtgccactgaccttcagccttggcaacagagggagaccctgtcgcaggaaaaaagaaaagaaagaaaacaaaggaaaggaaaggaaaacaaaggaaaggaaaggaaagggaaagggaagaaaaggaaaagaaaaagaaaagaaaagagaaaaatccctgtttgggatttaggctacacttaggtaataaggattaatttaaaaagctaatattctgatctttatcaaacggaaattgttcttcttttctacgtctatatcgtgccagaaatatattaatgtgtattttttaaaggtgatctaaaggaatggttaaattctgtttcatgaatcatcaaaactatttgtttttactttagaattgatgcattgcagttgtttaggaaatcatgcacaccctggatatgatatttgttaacgagaaataccttgtattctgaacacactggaaattgtttcctatggctgagcataccaatactatacaattttatggtgatgttattagcattgctattatggctctgactcgtagaatctttcttatctgcagttttgatttggatgtgccaagtctgttcaaaggctaattagaacttcgtgtgcctagatggatgagttaaagaaaatttctagcctgtttattagtaccacagtttataagcaacattacaggccttccgtttcatcatagcttttcaatctgctgtacaaacataagactccgttactgttagcctttacccttttgctcaatgcgatgtctgctgcttctgtatacaggctcaagtaattcccattatgccatgccctgtgtgcaccttctggaagttagcccacggacatctaagatctgggatatttccaaatctggttgtggaagggcttggaaatctataaccgcaactaggtggaggacacctgtttcagcaggaggttataaaatatgaagcgaaactaggaagagggagttgtgatcacggttccaagggctccacacagatcctggagttaaggggcactcaggtctccatttcgtgacccctggccctacctctcctagatccaggtatttagtaacccaggcttgagatctcaaaccccatcccccaatgccaaactcccttgtcccagctgggaggcccccagggcatttctgaacatggccatctccaattcacagaaatctgtgtgttgttgcaaataaaggatgacaagagaccacagcctacgaatgcgagcagcgtcaagtcagcaacaatcttccagttatcgagaagtcggaaacgtctgattctttcttctccacatttactaagacgtatcttctcaccttcctgccctccacgttaagaggggctaactattccgaaagacttccgtgccctcttccttttcaatttttccacttccaaactcctaccgaaagacgaagaaaagagaccacagaagaagatacaaagaagtttcttaaaacaccttcttttctaggttctcaaggcgtcccctttaaggaaccaggcccacctctttcccattcacctactggctttccttcctgtccgtcactctacctttaagaatatttcctgtttcttcaacccaacttgcacacctccgccccccggccctcctcattgggccgcccgatccccgttcactccttggtttcctctccgcctcctcccgccctctagcgtagtgcaacggcattctgtcttcttattggctaccacggcagcgttcccgcagcctgattggcgggttgagtgaaagaggcgggaacgcggcgcgcccagggtaggctgttcgcttgctgagctgcggccgcgggaggggcggggaggggcggggggaggggggctgggaaagttgaggccgcgctgccgccgggtctccggccttgagggctcgggctcgcagcggctgcggtggccgcaaaaagaggcggcgggggcggggggagaggagggcctgggcccgcgctcccccagccccggaggagcaggcggtggccgcggacggagagattcgcccagacggtcagacactcctgccttcccctcctgggatcatgacccaggcgggggtcgccgccgtcgccgccgccaccgcggccgagaccgcgcagccggcgggtaagtgactgcgggagggggccgctgacagccggggcggggggcgggggccagggctgcgggggcggctccggagggcggccccgggctcagctccacccacccccttcctgctccgggaggccagggctgcgctaagtgcgcctccttcctggggacccttgcgtgcggcacctggtggggcgtcagcgcccgcggcgagcgcacccctcatctcccgcccgccctgcgtccccggctgccaggcccgtggggggctcgcactgcgccccagctcctagatgcgcgcggggcgagaggggccccacgctgccctgggtgcataaagagctgggcagccaggttcacaccagatggcctttgcccgcctccttcaccttttcctgtcttcttcattccccttctttccttgccctctgaatttctttcgtacccgttcgtcagactcatgtggcttgctttttccctctcacccctctgtcgaagtgttaggcttgtgttttctttttagaagccgttcttttgctttctgagtagaagcagtgcaagtgaatgaccaactcttgaaatctactttcatgtatccggatgaaatataagattcctggactcttgttcatgtttacaattttgatagttgaattcaccccactcgttcttgaagcttgtcctcccaaccctcctcgttacattgggatatggtcctttgcgtttattaactttatctggaaatatgagactgcataaaccaaagtgcagaatttcaacttccgttcttgtaacatttttaccatcaagtagatacagtaacctaacaccacacagatcaagacagtcgtggccaactgtgtaggcaaagaagacatttccttacctataaaca

SEQ ID NO: 9864 - DNA, 6000 bp, Homo sapiens
gatgaagaaaggcttcaggaaggaaatggaattggaaaccaaatttgataaatgaatgagcttttattcaagaggagtggggagagagagtacattccaagaagaggcaagagtatgagtataacttgggctgactttggggaataattaaaaagcagggttattgcaaaaggtagagaacatacagaactgaaaaaagacagggtcagtctatggaaagccactgtattcataagtattcttttggttgcaagtgaccaaaaatccagtaaaccagaaaagagatggcactagctgaaataaagattactttagactagcttttaagtgtggtttatttagtggctcaaattttgtctcctggagcctgcctggattattattcccccaggttggttttcttttcagagttggtgtgctggattctggcagttccaagctaacatcagtagaacatccagtccagaggaagaatcaatctgctcccgagtagtcctggagctgagttcatttccctgattgactgacgtgggtaatatgcccatctccaactgtgaccaatggggacggaatgcactggttggctcagcctgggtgctatgttgcaaccccaaagcctggtagtaaaatgtttcctaccacacaagtggaccagagtgaggaagagatggttattcaaagcaaagagccttgagaaaagaggcttcctgccactagaagaggatgttgctctgggcagcaaacgatattccatgactgtgaataaaaagctgaagttttgggacattagtgggcaatggaaagccactaaagatttctgacctgagcagcattgtgattaatgctgacctttataaaattaatctggctgcgatgtatatgacaggttgatgtaggagatgaacggaggtgataaaactagctttaagtgataagaggtttagggaatctgggctaggatggcagtggcaacagtagaaaggagtagtcaaaagcaagaaatatttttgttcacaaatgttttctcaccaggaataagaaactctagaaagtacacttaatattaaaagcaatattggatcactgaaaaaacattgtcctaaagagtaaacaaatatagtgtaatttcttaaattggtttaataggaggcccagctctgaagcatccagcttgtttgttcatttggaagaacattgctgccatctcctcgtcatcagagtccacatactcttattattcataattcttcctggcagcctggggttcccaaattttttccagatcaaatgccctgaaacaccagctaatctcattctatgtgtcgaagagacaaaaagggtaagtgggcaaactttaacaaaatgttcctccttctgattgaacaacaaataccaattagtcattttaattttggtctacaattattttgacttttgttctctcctgcaccatctttcagcaccagagtttgaattctacagattatgaaagaatgattgaatcatcaaaagactcttatctctgatttttaagtccacaagaacactaacctcatcatttttactaagttttttcaaagatttaataaatcctgaattttcaatacccatttgaaatgcaggaggattcgcttactaataagcaaaattaaattttgtcaatacaaaatagattctactgctacctctcaattatttaattgtattacagtgattaaaattgcagtggtactaagcacatttcttgctgtaagaaagctgaatgtgctatgattttatgccaagtccactgaccactcaaaatacagtgagattattttataaatggagtgcaatatgcattcttcttctctagtggtactgaggttgctcatgtgttatcactgcaaaaggcaagagctagctttgccacatatttacatgaataaataaaccttctaggccacagtgctggtcaaattttatggtgcatacaagcacctggggatcttgttgaaacgcatattctaattcagtaggtcagaaatggcacccaagagtctgcatttcttacaagctcccaggacatgctgatgttgctggtccacacaccacgttttgagtaacaagggtcttcaaatttaattacaaaataaatcttttgtaaaatatttttctggacctagcttattagacatgcattgtttctgaggaaaataaagataattcaaatctcattcctagtctaagaaatagtctaggaaagtgaaagttaagcttaaccaatcagaaaccacaaactaacctctaactatggactttccattagaatgatccaaataaatccagtattcctctttaaccaaataatttctttgctctgcttccacatttaccctataaaatctttccctttaacgacttccgacagagtccccaactgctttcggtctgctgctgcctgatgcatgaatggctatttgctcaaaaaaccctttaaaattttaatgtgccttagtttatcttctaacagaaggaataagtgtgaagaggaattcttcacaaaggaaagctttcactcctgagattttgagaatgtaggcagtaacgaaatcagtgactcaggtttaagaagagaatatattgagttctagcttcaacactaggcagttgccattctgatccaaatgcttttatggttgttggctccttgaacctgccgttagataataacaagcatataatggattggaaaactttgaccctattgttacttcacagatttctagtacttttaaatcaaagcactatacttttcccagtttttatataacatgatagtattatatgataattagtaccattttaaaatctgcagtacttgaggtctcagaaaatcagtcctcatcttttctgaactgggaaaaaaaagtctgtttgcatattcatatatcatggttggtaatttacaacttcctttgcatacattcagtcctcagcagctctgtgcagcacactaggtagatatttgtcttatttcaaaattgaggaaatagagagttggtacacttgcccaagagagcattgaggtagtgagatggaactagcacctcttgttgctgactccaagtcctgtgctttgtcctataaagaacaataaaataagaactggatgacattttacagtttacagtgcttatgaacatatctctattttcagggtaaaaaaaataagttttttatacagagtttagacatgaaaaaactgatgtccaaagtagtaaaaggaaattgtccaagggtaactactagtggaatctaataggaatccatgtctcctgcttacaggtcttagtccttttgtgtttgtttggttggttgttttaggacctcagatgcattgaattggttcatttcacatccttttgttcatttcacattctcctcattagtccatacatggttctattttatttagttacacagtaatttttaataggatattaggtgtcctatgaatcactacccggcatagaagataagacattaacatctaaacttcaagtgaaatgcttccccatctatttccctgcctcccttcacccagggtcaccaacactctgaacactatattcattgttccactgctttcctttttatattgttgtatatgaatatatgaatacacattgacatttctagggattttttaaactttataaaaagcatattatgctatatgcaatattttggggatatcatgctgtacataatatgaggggcctgtagaattggagatgtttttaccaacaaaattaggtaatcacagtatacaccaccccgtggtgtgtgtgtatatatgaacatttattgtgtagacacatcaaactacccagtctcaacttgagacatatttaaatgcactcttcatatatgtgtgtatgtgtgtgtaagtgtatagtagtaaaggtctattcattcagcaaatatttattgtgtgcctgccatgtgtcaggaagtactaaataccttactgtgcacacacgtgcaaaaccaagtgcaacactccacccccctaaaaaaaagtccctgatctcatggaaataacattgtacagagggagagacagacagtacataaaataaatatggaaaatataaaggatgttaggtgatgttacgtgctagggaaaaaaataaaacatgccagatcctcagggactagggtttgccgttttaaatagaatgctcggcgatgaactggggatgaggggagcggggagtctttatttaacgggtgatacggacgtaactttcgagagctgaatcagaaccgaagtaaactcttcggcaacccctgcactcagcctataatgtctgtaggataacaggctcagccgcggtggatggcccccggagagacgatgcatgtcttcccgcctttcttccggccggccatcctctccgctagaatcgccctgcccgccgacgccgcacctgaacgccgcgctgctgcgggcgttgtacaccagcgcgaccaccgcctgccggcacctcgccttgccgccgcgcgcgcgcagccccgaggacgcgctcggggagcgcgcaccgcccggggccgccctcgggccgctcccaggcccctgggaacgcgcgcgcgtgcccggtcccgcggcctctcggcaggcacgcggctgggagaacggcgcgcgccccgctcggcagctgcggcggcggctggtgtaggcgctcacgtcagggctgggaggagggggttcgcagctcagagagagagagacatgaggcaacctggcaggaagcgagaaagagttcggcgaagaaggagtgagttctagagacgccccgcgagcaggacccgcgcctgcaggagagcctggccgacccggctcctcgccttctctgcgcgctctcccgcgtccgctttcagcaccccgagcggagaacagttcccggcagcccgcagcgctgccgagtggccgccggccggccgagtacccggagctccagggggctcaggagcaccctctgagaacccgctgtgcacccaccttttcccctcttttggtgggcaagtaagcacgggggaaaagcatccggtggcctcagggagccctgaagaaaccgaagcagaatgtaccagggacacatgcaggtaagacatttctatagggctggagagaattcttgggggctaatttaagagcaaggcggttcaccaagtttctgtggtcaagtgctgccttcgcacagctcaacaagtgaagtgatgcaacatgaccgtgacatttctgtccggtgctgccgggaaaactagaccggtttccgaaggtgggagaaggggagggaagacctcagaacttcgattggggaagtttgttttctgtgcattccctgagcctgtttctttaaacaggatcaaggaatcgaaacagaggaaaccctagagatgaccgtgtttccgttgtaatcctattgatgcatctcagcatgtatgtcaactgaagggcaaacaataataggaaagacaaagcttttcctttaccatctgaaaaggttgcttgacttagaacactctgtcactttcgtttcattttttaaagtgttatatttaaaaaacgatttatagtgtattttcccccttcacattatgggacattgccatctactccaatagtcacaggatgacttgggaggatgaatttcaaacacatgtccaaggagctctaatgtttttcaggggaggtgctgcctccggttgttattaatattcatctgagctgagccgctgcttctttccgatgcaaacacactctactctcttgggcaagattactttaaccttgactccagttctcattcatacggttggttggttcttataaaggcagatatatgctttgggagaaaaataaaatactaactcagctttctaaagtatgaactggactctttatcgcacctaaatggtttagtcatcaggtttgatgtttgggcttccttt

SEQ ID NO: 9865 - DNA, 6000 bp, Homo sapiens
aaagagtatagcgatttgaataataaaacaatattagtctagattcttgagtcaagctgcttaggttttattcttcccccactgtcacccagttggatgttcttgggcaatttagttaaactttttatgttccaattttcttgttggttagattttgcaaataatatcaaacccatcaggttgttataaggattgaataaattgctaatgccaatgtaatgctgaagacactacctgacacataatttgagttatagaagttgcctatcaatatgttcatcatcgtcttcatcattgtccagaaaaaatataaatgaataaaactaactcagatctataagaaactaaaatgtctaaacataaattgagattagagaggtgattgtttcactaaaatcaataataataataatgtacacaacaatattttggtagaatgatagacttattgattttattttttcaaagcctttaagagaatctacagtctgtcatcatttaattcattaaaaatcaactttattgaggtatactttacatgaaatgacatatacccatttgtctaggttgataagatttgtccaatacatatacccttgtaatcactgccacaatcaaaaacagaatgtttttattacccgaaacattccctgttgcccatttgcaatttatctctttctccttatccctaaacaaacattctgttttctgtcagtatagaattgcttttttttttttgatatctttctcttagcataatagctgtggaattaatccaagttgtgaatatcagtaatttctggctttttattgctaacttgtattacaattatgcattcaccacaatttgtttatccattaacctgttgatggacatcagtgttgtttccaacttttggctgttataaaaaaaatttgctataaaatttccttgcaaaaatttctgtggacatatgctttcatttcttttgggtgaatacataagagcggggtttctcagtaatattactttaagagtgccagcttgttttacgaagtaattgtagcactttatatttctaccagcaaggtatgagttccaattgtcccacatactcaaaatcttttggaattttcaatgtttttattttattttattttattattattatcattattattttgagatggtgctcactctgttgtccaggctggtgcacagtggcacaaacacggcttaccacagcctccatctcccgggctcaggtgatgctcccaccttaacctcctgactagctaggactacaggcacctgtcaccacgcctggctaattttttgtatttgttgtagagatggggtttcaccatgttgcccaggttggtctcaagctcctgggcttcagctgtctgcccaccgtgtcctcccaaaatgctagcattacagctgtgagccaccagtcccagactgaattttcagtggttttcatttgagcctgtttgattagtgtctagtagctgtgtcttgcggttttgattggcatttttaaaataatgatgttgagcatcattttaatgggcttaaatgtcatttggatatctttgctaaaaatgttcatttttttttcattttctaatgggttgcttatttttttgttattgaggtgtaaaaatttcttaatgatatatttcaaaaatcagtctttttaaatttaatgaagtccaatatttctatttattctttatgttctgtgtttttatgtgtgtgtatgcacatgagttttaagaaatctttgcttaatcctaggactcatacattttctttcagaagtttttttttttttcaacttttattttaagttcggggtacatgtgcaggatacgcaggttttacgtaggtaaacgagtgccatggtggtttactgcacagatcatcacatcacctgggtattaagcccaacattcattagctattcttcctgatactctccctcctcccacccgccacgatgggtaccaagatgtgtgttgttccccctccatgtgtccatgtgttctcatcatgcagctcccacttataagtgagaatatgtggtgtttggttttcttccagaaaatttaatgctgtacctttaagtgtgtgacctatttcacgttagctttttgtgtgtggtacgaggtaaggattaaggttaacttttttacaaatgaatattcatttgttcaagcaccatttcttgaattatgatgcctttatcattgaattacctgataactctgtctaaaatccattcacctaaaatcggcacatatccattagcacaatatccattgaattacctgatacctttgtctaaaatccactgtatatgtgctgatctgtttttgaacacttaattatgttttgttgacctatcctgccaacatcacaccgtctttatcgctctattactagtagtaaattgtaaaaatcacaggatatgtctgccaactttgtttatcattcgattttactttcttggttaattttattgctacataaattttagcctcatttgatgattgctacaagaaaatctcctgatattttcactgagattattttaaagctaaaaacctattgggagataattgacttcttaaaaatattgagtgtttttgacccatgaatgtggcatatttctttacttatttaggtcttaattaattttccttagtaattctgtgtagcctgtagtgtacagaccttgttttagatccttgatacccacacctcctcccccagtgtttaaaaattaataaaatgagaagatatcagcaaagggatctgagaaggagcaggtagtaaacgagaagaaaatttaagaaattaagcaaaagcaatgcttaaaggaggagtacttggtaaactgtattacttgtgagtgatacatcaagtaaaattaggactaagttgaccattgcattattctatgcgtaatttaatattgactatgaccagaaacacttatgtggaacagtggggacaaaagactaatcaaagcagattcaagataaaatgagaaaagatgaatggagacagtaagtacagagaattccttcaaggtgttttactataaacagaagcaaggaaatgcagtagtagacagaggaagacggtatgttaaaggggtgctgatttttaaaatgggccaactagcagcaaatctctttgttgtgatgctacagaaggtagggagagttgatgattccacagagagagacaagtgggtagaatggtcccttgagtagaagactatctaaagcacaggtggatggcttggtctaaggagggagcacggttcacctcaagtaacaagatgaagggagagtctgtggtcacaggggccaagtatgtgactagatgtagtgacaggagcttattgaagttttcttctggttcttattcctttttgggtaaaatagaaagcaaagcaatcagctgtccttgaatatgagtcagactgttggagatttgagtaaagggatattctttaagcttgaatgaatttctttccacaaaaaaaaaataaagcctactacataatgattatttttcttaaaactctgcagaaaaagtcatcttggcatttttacaaataaaatatatttttattcctacagagcaagaaatacttctattttttttaaaaaaaaaaaaaagaggcaataaaaacagatattctttctataaaattattagtctagtttgccttcttatgaattgggagaaacaatagggtagcccattttgagtttaccttgtgttaggaagcatcatctcctttctaaagcctcttataatgttggttagaccctgtgaagaaatccataggacatagtcataaaatgtagtcatagaaaccttcttgctcatcagatgaaagtaaactgaggccaagaaatatcttttgacttatttccatttgatttggggatttcattttctcagtatccacttactttaagatgctaagagtataatttctttgtatgccaacatgaaaataagtccaaactatcattcttttctcatgttatagttatgtttgtatgcactagagtctcagtgtgcatgtatgtgtaattcctattccttagttttcatccttcaagcagttagtcccttcaaaacccgatgacaagacccaaacatattaaaaagtttagttggagggcccagggtgaaacacaaaaacaattcttcttcttacagagctcttaggcaaacacatagacacttgttctctgcctctggaattacaaatatgttactcggaaagcagcaatactcttttggacttgtttgacttcactttctttacctgtctttaagaagcctcatacacacatttaaaaaatacaacttataaaggttttagtgatagtgcatacaatcatttgattttatttcccttttctcttcaccttcactaataggagttactggcatgcttcaaaaagcttacatttgaatactgtctaaatcagtgcagacccttgaccagcttaatctttgcttgcaaatgacaatgcagtgaaaccagaggaagaaaaaaattacttcctttcctgttggaaacctaataagtagttagtctgacccagttttcaataagagagattttctgatgacccgacaggagtgactatctccagtcaaagaaagaggagggtgaatttaatctttcatggccctggaatggcagctgctctcagctctctctgattctgtgaaggttgatgaagatagagctggctttcaatgtagaaagaattttccttttgaatattccaaacgagagctttgcacatgtgcctcaagaactgattgtctggctccgacaggaatgcagcaggagaggagcgtatttcatgcttaagaccagagaagagccacgcaatactcagtggataaaaggcttgcagtcccagctgggaaaaagagtcccattatctcccagctgcatagacattccatacggcttggttctgcctggacgcacagcatgcctggctgagagcttgaaacagagttctgcagaaaaactgtaaagatcccgagacatttccctggtaagatctgtaagtacaaaattgtgctgtgtctgctgcaatgagaatattgctgggcaagctgcagcttttcttcctttcaatgtctttgtattagcataacaggtaaaagctggggttgggggagaagtcactgctttattgatgctgtgtttctatgatgctgatgtttaaaatgcatttattccttgtgtgggagaaatgtattgaatctgtattccgggaggttaggatcaaaccagggaaagaaagactacaggtatatttctcagtgtttcactagtctttgctgcagtaaaactaatgggcaagacgggatgacagtgctaattctgggactttcagatggctacacgccctttctgtaacggcagatgggaaaatgtgatcgctaaatgttttttgtcttttttttttttttaatcaaagggatgaggggtggggtttgcagttctcaccggatgatttaaaagaatggttataaagtttcctaggggagaatttggtaaggggagcaaagcaagactggaggtcatatgggctcaccaaattttgtctggcattttgctttatacccagcttctagataacagcctctggagtttcctttaccatttacaccagttaagttgtcagtattaaggttcttataatactttatgaaaactttcagaagttgatgacttgggaacaaaacttttaagagctctgagattagccacgtataacccattatgttaatgggatactgtaacattggggtttggggggaaaattggaattcatagtttttgcttctccaaatgaaaactacttatgtttaaataatcagcatcctgactatgtcctctgagaaacattcacagaatgactaaatagaagttatactgagaaaaaatagagtgaaca

SEQ ID NO: 9866 - DNA, 6000 bp, Homo sapiens
gacttccaaacttttggctttggtaactgggaagatggagattacaccagccaaggtagaaaatatagatgaaaaaacaagcttatgaaaaggagaagcagcaagagggtaagaggaaacacagaagggacaagcctgatggtgatggtagaggggtagtagcagatgattttgtttttggagatgttgaaggtgagatgcctgtgggccattaaggagggccattaagggaagttgcccagttggccattaaggcaagtggatgtattaagattaattgtttttttttcccccattggtagtgtatttaaaaaaacaaaaccctggcatagtggctcactcctgtaatcccagcaatttgggaggcggaggtggacgaatcacttgaggtcagaagtttgagaccagtctggccaacgtggtgaaatcccgtctttactaaaaatacaaaaattagttggcttggtggcacaggcctgtagtcccagctactcatgaggctgaggcaggagaattgcttgaacccaggtggcggaggttgcagtgagccgagatcgcgtcactgcactccagcctgggcaacagagtaagactctgtttaaaaaaaaaaacaaaaaatactaactctgtagaaatgtagtgtcaggccctgtactagcactgactgggatgcatgacagacatagttcttggccctgctcaacctgagagcccagtggagatgctatagtctagagcaggggtgtctaatctttttgcttccctggaccacactggaagaattggcttgggccacacataaaatacactaacaatagctgatagccccccccaaaaaaatcacaaaaaaatctcataatgttttcagaaagtttatgaatttgtattgggccacattcaaagccatcctgtgccacatgcagcctatggggccgtgggttggacaagcttgatctagagctcaggggaaaggtgtaggctggagttctcaacatacagagggagagcgttatgagtgagaattaaactcttagaattgataagtttcatttactgtgaattgtacgctttacgcatatcatctcatttgaacttcacaacaatcctatgaaatagtattaaattattaaagatgaggaaaatgaaatgcagagagctaagactcagaggtcacaatctggcctttgggctgaattttattctaagagttgttttgttgcgttgatttaaaaatgcctctagatgtgttcacactgtcatttgttaccttcctacattttccattgtcttaaatcctatgtatatgtgctttactcataacctcttgttccctttaggcatttgattttgtatactgtggtttgcttaagtgccaaaggttaaagaactagaaaatggatgactttttttattttttattttttgagacagagtttcgctcttgttgcccaggctggagtgcagtggcacgatctcagctcactgccacctctgcctcccaggtccaagcgattctcctgcctcagcctcctgagtagctgggattacaggcatctgccaccatgccttgttaattttttttgtatttttagtagagacggggttttgccatgttggccaggctggtcttgaactcctgacctcaggtgatccacccgcctcggcctcccaaagggttgggattacaggcatgaaccaccgcaccctgcctaaaaattgatgacttttgtgtaaaccaaagactgtgctcttaaccattatactatactgttgtggttggcaggtacaaggattcttgataagggttaagaaaatgcattgtgtggtgacgcaaaaggactgatgatacgtttctggtcagaaagtaggaaatcagttgaaggtttcagatgtgtattggttcttgactagaagcattttctgacatgctattttgttaaatctaaggcttggaaagcaatctgaacccctagcaattatgttattctgaaaattttctgaaacatggagatagtatttgcattttgtgcaattggaaggggtggaagaatgacagttggtctataactactagaattgcttctttgtgttgaaaaaggtgggtactagttccactgggaaaataaattcatgaggcctttgatcattatgactgaaatgcaagcctgttttaaatatcctgctctgcggtgaggtgtgctaatccttgagcagctagataggaaatgagttcaaattactaacagaaaacgggggcaggccgtgtgcttcagctggattggtgcagaattctgagaagtgggccaaagcctgagactacaaaaggtgatttgcatccaaatttgtgccacccagaggagctgaagaattgagtaatttctaggtttaagagcagtcagaaagactgctctttccgactgaaagaatgttaatttgcagagacctgaagcagaatgtggctgtgaggaggtttaatgttttaacaacattgtgttacatgtgatgaagggtttcaaccctgtctccttttttgtgtcctggcaaagctatcccttttcacataattagcactcttctgatgtctttctctaagtgatatcttggatcctttttatttattatttagaatagttggctttgatagggcccacatatatgtacaaacacagatatatgcatatatatgtatacatataaaattgacaaactttgatgcaaaattgtgaaaattggggggaagatgtatattgggcatctggagctgaaagcagttgaaggcctattgaacttccgtcagttgagagttaagtactctttttatttttattttgagatggagtctcactctgtctcccaggttggagggtagtggcacgacctcagctcactgcagcctccgcctcctgggttcaagcaattctcctgcctcaatctcccgattagcttggattacaggcatgtaccaccagacccagctaatttttgtatttttagtggagaccgggtttcaccacgatggccaggctggtctcgaactcctgacctcaaatgatctgtccgcctcggcctcctaaagtgctgggattacagatatgagccactgtacccggctgagagttaagtactcctgaaaaacaaaacaaaacaaaacaaaaaagcccagaaaaaactctcagtaactatataaggcagtggtccccaatcttttgggtgccagggacctgtttcatggaagacaattttttcctgggggtgggggctaggtggatggggaaggatggttttggacgattcaagtgcattatatttattgtgccctttatttctattattattgcattgtaatatataatgaaacaattacacaactcaccataatgtagaatcggtgggagccctgagcttattttcctgcaactagatggtcccatctgggggtgatgggagacagtgacagatcatcaggcattagattctcataaggagcataacctagatccctctcatgcctagttcacagtagttccagctcctatgagaatctcatgccacagctgatctgacaggaggtggagctcagacgataatgtgaaccatggggagcagctgtaaatacagattaagcttccctggcttgccagagattcacttcttgctgtgtagcccggttcctaacaggccatgggctggtacccgtttgtggcccgggggctggggacaccttacatacataaggtgttcactacgagatataagaggacttagcccaggtgttaaggcagtgttccaggccccactgtggctctaatacatttagggatcagaatatggactctcgagagcaggttgctcctattattgctggtaaacaaaatttgctagaacgtggagatcagcatatactgttagattctgataccggagacaatgtaagcagtttcagatgatatcaaaggtacagcatgcaaaagtgggttgctgaaatggacctgaggattcacaggcagccaaagttcagggttttagataaatgaggcacataaacattaagatcttgtaggatgattgcaggtgttaggagtaaatttggactaattaggaatctgtgtcttccactaggctgtaaattcttttaacatctccaaggcctgataaaggtttttgaatgaattcgtgaaatacacgatttcggtgaagaaaagaataaagcaggtgtccaaacacttgaggttttacagtattggcataaaacatttggacccctggcgcctggtatcagggacttcccgacgctggaagagttcagggaagggaagcgggcccctctggcaccgaagacacagaatcctagctacagctactaaagaaaagaacactatcaattagggcccgcgtcaggttctctggatctccccttctcccatccttgacgctcatccctgtgttctttgcggtgggcccgtcggccctgctgccatcgatagaagcagcactctccccgtctgatttcgcagggccaaagcccaggtgagagtcagggtagtgttcagactagcccacgctccggttctgagccgcgacggcggtctccgcacgcaacgaaatcaggcaggaccgaaccttgcgtcctccagtgcagcgagttcggaagcgaccggccgagcgcgcatgtgcgggacccgacattgtgcttgtcccatccggtgctccgtagttagcctctgtgagctccacgtaggccgcgcaagcgcccttggcgcacagttcacctgctgccgttgtcgtcgccgccgcggctcccggggctggatggggggccgaggccagccagtggcacccggaagaaagagacgcggcggcggcgacgccgacaccctcaggacgagtgtccggacttgcccacagcctcaaggaggagacggcgaggcccggcccccgctgtccctggtgtaaagaagtcgccgtagccgtcgcggccgggactccccgggctctcgcccttcaggtttcgttgacactcaggaccgtacgtacgctgcgccatgttcaagaaactgaagcaaaagatcagcgaggagcagcagcagctccagcaggcgctggctcctgctcaggtacgatggccgccgctctcctcccctggttccgaatacctcttgaaccggcccgcggacgaaagaggcggggggagtggggaagttcttccgtgacctttaacccctaacccgcacttttcccaaactccggacccagaaggagctccgggcggtgcaggtcgtccgtaactcctgacctggattttcccatcgcaaaacttcatccagtcaatgagtggatgggggtggctggatccctcgtgacattccatctccgttaagagttttctcctaaggccagagtccgaacttgcatgatttctgatccatatttgaggttttcccactcatctgagaccccacgctgggaatgagggcggggtggaaaaacccgggtcccttgtgatatctgacctctgctcgaggggtccccctctcttttgccagtcgtgagattttgtatggaatggccaggatcccgcacaattgaccctcgacggaagtctcctaattccaaacccaggtccagggattgaaggctggggagtagagccatcctgggtcaggctgctggtaggagcggtgggacctgaaagacgtggcggcgtggccggcgtccagcgcccgaggctgtcacgagttagtcacttcgcataacttggttaatccgggactggcgggcggaggggcagacactctgcctgtccggagctctgctctgctttttaagtcttgctgctctgcggacagggttatgcttgtttttcaggaatgctgttgctttaggaaatgcgtttccagggaaaaggaggcgtgttaagtagtattaatttaaagaaacaatttcctaagcgttcactggagatgtttcgatgctggcagcacagggtcttaacagcgaaga

SEQ ID NO: 9867 - DNA, 6000 bp, Homo sapiens
actcacaaaaggcaaatgacaacctggctttggctaaaaatcaagctacagagaacttctgctccagtcccaaaggttttgtgtatcgtggctcagcacttcaaagtaggggagaggttgagtccacaagagcagggagccaaggactctcgttgcctcattctggtgtccaaccttatcctccccaacctgcacactgagtttcctggggcctgggcccagtaaagtgtcaaaatggccaacccatggctagaactagaaaagtttacctcagaaactgggcgattcgggccatgattgccccggccccaggctgcagcacatttcctgtggacaacaaactttcattcagtgccaggcggtggtgttctgggcactaaagtatagctgtgaaaaccagagatgaggcattccagatctttcttcgggacactagcccttggcaggctcacttgcaactctggaacatcagggtttggggcagggagagccagccatacaacagcttgtcctggtcatccaccagctcctgtccctgagggtcccacgctcacttgcccatgcacccagcttttccaaatcagcacagatgggcaggttgtctgcccttaaaagtgaaatgggagtttctgaaaatgcacatctccccaggtatcctcctgtgagccctgctgtcaccccagagaggtggaacagtgattgccgacctaggggtggcatccgctggataagactcttgccatatcatattgctgtatttcaaggtgaggggtggaatagagggctggactgaagattgtggggaaaagaaagatcagattgttaccgtgtgtatgtagaaaaggaagacataagaaactccatgttgatctgtacaaagaaaaattgtttctgctttgagatgctgttaatctgtaactttagccccaactctgtgctcacaaaaacatgtgctatattgaatcaaggtttaagggatttagggctgtgcaggatgtgccttgtcaacatatgtttgcagacagtatgcttggtaaaagtcatcgtcattctccattctctattaaccagggacatgatgcactgtggaaagccgcagggacctctgcccaagaaagcctgggtatttgtccaaggtttccccccactgagacagcctgagatatggcctcgtgggaagggaaagaccttactgtcccccagcccgacacctgtaaagggtctgtgctgaggaggattagtaaaagaggaaggcctctatttcccgcacatccctgggaacggaatgtctcggtgtaaagccgactattggttctatttactgagataggagaaaaccgccctgtggctggaagcgaaatatgctggcagcaatactgctctgttactctttgctacactgagatgtctgggtaaagagaaacaaaaatctagcctacatgcacatctcagcacagtaccttcccttgaacttatttatgatgcagattcctttactcacatgttttcctgctgaccttctccccaccatcaccctgttcaccccgttttgcctgaagagggcctgcccctccacacctgtgggtatttctcgcaaggtggagacgagaaactgagaaaagaaatgacacagagacaaagtatagaggaagaaaagtgggcccaggggactggtgctcagcaattgaggacctacaccagcactggtctctgagttccctcagtatttattgatcactatctctactatcttggcaagagggatgtggcattatataccattactataaggtaatggtggggagggggtcaacaggaaaaaatgtgagcaaaggactcagtgtcataagtaagtttaaggaaaggtgctgtgcctggatgtgcacataggccagatttatgtttgactttacacaaacatctcagtgcagtaaagagcagtattgccgccagcatgtctcacctgcagccataaggcggttttctcctatctcagtaaatagaatgtatggttgggttttacacccaagacattccattcccagggacaagcaggagacagatgctttcctcttatctcaactgcaaagaggccttcctcttttactaatactcctcagcaccgaccctttacgggtgtctgcaaagaggccttcctcttttactaatactcctcagcacagaccctttacgggtgtcgggctgggggactgtaaggtctttcccttcccactaggccatatctcagacaatctcagtggggggaaacctggacaatacccaggctttcttgggcagaggtccctgcggcctttcgcagtgcactgtgtacctggttaatcgagaatggagaatggcgatgacttttaccaagcatactgcctgcaaacaaatggttaacaagccacatcctgcacagccctaaatccctcaaaccttgattcaatacagcacatgtttctgtgagcacagggttggggctaaggctacagattaacagcatctcaaggcagaaaaatttttcttagtacagatcaaaatggagtttcttctgtcttccttttctacacagacacagtaacagtctgatctctcttcctttcccccacactgccgcactccccttgccgagatagtgaaaatagtaatcaataaatactgagggaactcggagaccgatgccggtcacctgggcccactctacactttgtctctgcgtcttatttcttttctcagtctctcctcccatctgacgagaaatacccacaggtgtgaaggggcaggaccccttcaaaggtcaaggccatggaggttcccccagtgaaaattcggggcggggaggtgaggagagctctggacgaacggaagaacggggaaggcccagcgcagggcctgagtggttcgctcaccgacacagatgtcccccagctgttccggcctcagattcacgtccttgagaaccgcggtcatgactgccgagagaagctcgtcgggggtggtgtcctgcagcagaaagagcagccgcagtgacccccactcccccatgcccaccccagggagacaaagcgaccacagctgggtgcggagctgcctccggcgtccaggataaccaaacatacgaaccggaccccagcccgcgccggcgtcttcccacactcggcgcccagaccctcgggcctcaccttgaagccgccgcggcccgcccggcagatggccgtgcgccgcccgtgcaccaccaccacgtccgcggccgaggcctgcggggcaccgctcaggcaaggcgcggcctgcggcatccagccggaatcggccggacccctcaggtggcccagcactacctgcagcctctgcattgcgcaggtcaaccctgcagaccagccaccagtccgggaactgaccgcggagttaacagacagccgtccgcacacgcgcagaaccacatctcagcctccaaggcctcaactccgcccacagctctgcgaacagacgcgagcgaccctccaaaagtcccgtccacctccagcctcagccaaccacaaggagagtcggcctgggaacccgcccctccccgccaccgcctaccaagccctctataggagggcccacaggcaccgcccagccgagctttccactcaatgccccgcctaccttggcctaccgcagccaaccagaaggtgtatctttacgaatccccgcccagaaatgcagaccggaagtctttccaccttttgtagccaaacccgagacctgacccccaaatccctgtctcctgcccgcagccaaacggaaggctgggcagccaggaccgcttactgcttgggggctggagatggaagccgaggctctaattcctctacccacttcctaggaggctctgctatccctccggtcccagtacccgagctgggggacctaaatacttccgagacgcccgagtcctgctccgacgtggttgggctttcccattctttcgagaagacagggaatttgggcttccgggctggccgggagaacagattttacagacatgcggggtgtgacaagctctctaactggagaatgaacatttcacacttttaccagttttacacccaattggaatgattttattagtgcccatttcccgtgctaggctggggtctccaccaaggcagagaggtaccatgtatccggggagcctgcgacacccttgacacttagtagatgatcaataagtacttgtcgaatgagtaaatgaatgaaccagggctccccaggtcaggactgtgtccctaaacctaaagggcaaggccacgtgcccccttgactcccaatagcagggccatgtcttcacctgagaccctggagagtagtgctgggctttccacagacaccaaaggacagggtgccttgtgctccccaacctagtgtcatgacgtccccaaccatttcgagggcagggccacggcatgcctcaggctccagaaggcagctgtccgtttcccactcccacctcggggagcacagcaggggtcttcccatacccctactggcaggattgcgtgttccccagagacagtggagggcagagctggtgccttcccacttgtcccctcctcgccatcctcgagggcaggaccgtatgaacccctcagattcctccgtggaagaactgtggctccaccagatcccaaaaagcaaggcccgtttcctacaacccccgaaggagggtcgtcctcactccgccgccaacctactagcaccatcaccagaccctcgagggcggtgccgtggacctctccagatctcaaaaggcagattcctacttcttacgccccccacatcacccgcctcgagacctcaagggtagaggtgggcacccccgcctccgcacttttgctcggggctccagattgtagggcagggcggcgcttctcggaaagcgaaagccggcggggcggggcgggtgccgcaggagaaagaggaagcgctggcagacaatgcgacccgaccgcgctgaggctccaggaccgcccgccatggctgcaggaggtcccggcgcggggtctgcggccccggtctcctccacatcctcccttcccctggctgctctcaacatgcgagtgcggcgccgcctgtctctgttcttgaacgtgcggacacaggtggcggccgactggaccgcgctggcggaggagatggactttgagtacttggagatccggcaactggagacacaagcggaccccactggcaggctgctggacgcctggcagggacgccctggcgcctctgtaggccgactgctcgagctgcttaccaagctgggccgcgacgacgtgctgctggagctgggacccagcattggtgaggacgtccccttcctggcctcgtacctggggggtgaggaggctgactttccgcggcctcagcatcctgtctcccatggagagaccccatttcctgcctcgggggcccgaagaagcctgcagagggagaaccatgcgggtcccgttccttcttaataaccggtcgcggttattaagaaggactggagaaaggtccggataggcggagatgggaaggaagcagcttaggcagaggctttcaggtagggccaggagtcagaatcaggcttctgtgggggcatctgggctgtttcaagtagagcaacaggacaggtggggcgattgacagtggactgtcttagaaacctcaagtcctggggaaatgcagcccttctttctactcactggcacttacataatatacatgcataggcgttggatacagccgcccacagacaggcacaccttgctgagttggaatcactgcaccataaccagtgggtctcctgagcctttctggcatgcccagccccttgctcacatctgccctggatcccagaagaagcagacctaccttggtaccattcttaggatccctaggaagggacagagatacaaacctgactttgatggccttccagaaagccagaacaccactgacatccctttgggt

SEQ ID NO: 9868 - DNA, 6000 bp, Homo sapiens
gaatggggaaggtcttatgaagacgaaggcggagattagagtgatgcttcttcaaaacaagcaacaccaaagattgaccacagccaccagaagctaaaagaaagatctggaatgtatcctccctcagagcctccagagggaacaaaaccctgctaactgatttcagacttcaggttttcagaaatgtgagaaagtaatattctgttgttttaagctaccaaatttgttacagcaggcctaggaaactaatatatccccttagcctgatcttgaagatccctcttaatctggctttaacctacgttttcaacattgtctcttaccagtatcctttacaactccccccacttctgtatcctgccagtcccttgatcatgcagtgattatttgtgcattttgtcttttctaatgtgatccctttcccttttttaaaactcctatgtcttctctattcattctaatcctaatcctgaaacaaaaagcccatcttagtctacagtggtttatttcctattttgaattcttatcaaacacatttgacattgaatcatattttgtgcacacagtgtttgctttgcttttcatgtacgtgtgactttccttgagggaaggatgatttttgcaacatagaaactatagattaagtgaatgaaaacagcaagtatggacagagaaagcaggtgtttgggttgaattatgtcccccttatttgcaaattcatatgttggaacctaactcccagtaccttaagatgtgactgtatttggagatctttaatgtgaccctttacagagaaaattaaggtgaaatgaggccataggtgtgggccctaatccaatttgattggtgtccttatgaaggggagcttacgatacacagggacagagagcagaggtgcacatgcacacaggggggcaaccatgccatgtgcagaggcagcagagggcggccagctgcaagtgcaggaaagaggtttggaaaggaccttcctttaggactctcagaggaaaccaactcagccaccagcctgatcttggacttccagacttcagaactgtcagaaattacatttctgttttttaggccacccagtctgtgctattttgttacggcaatgctagaaaactaatgcagcaagtaaaaggcttagattaagcactgaaaaaataagagaagaggccgaggtgagaggattgcttgaagccagcagtttgagaccagtctaggcaacatgatgagaccttgtctctacaaaaataaaaaataaaaaaaaaattagccaggagtggtgacgtgtacttgtagttcacagaaggcttgtgtactcagaaggctgaggtagaagattgcttgagcctaggatttcaaggttgtagtgagctatgtttgcaccactgcactccagcctgggcgacaaagagaaaacctgtctcagaataaaatagaataaaataaaatataaaataaaatttaaaaaagggagaaataagactaacatcttttctacctgaattgatgacattgtcttctctcaagtaccagccataatcttaaaatggtagactattttacagagcccttagtaaaggtcagtgacttttggttttattatacaagcagtatcactttagtataaagttcaaagagatctgagcgtggaactgggatctggcctccaccactcttcatctttttctagaatgttattattgtctaacctatagtcaagaagttaattgatagtattatgagttaatttgctaatctaaaattgtaaaagggttagccatggggcttaagcctatgcattgtctaggattagttataaagtacaaggattagtgggtctattgtgtatttgcttggcaaaaatcgggacatcggttattttattttttatatattttttgcaaagctcatatcagtttgtgcttgtctctcccttattcttttgccatccataaccaccattgcttagagaaaaagatgcattagaattgattccatgttattcaaattaaatttggaatcttaggcttccaaattgggaggtaatttttaaaggttcattgacagaatgtagtatgtccagaggaaggcatccaaaatggtgaggaccttacacactgagacacctgagggtagttgaaggagcagacatctcatcagaaatacatagagggctctctattgcatgaagatatcagcttattctccatggctcttgaagtaagagttgggcctaaaagatggatcttgctgatttcatttcaacattgaatgctgatttcatttcaacattaaaacttccactatgtagtttaatctcttaaggactagaagtaatgaagagtagaggcctattaagtggtgattgatgtagcctagttgttaagagacatagagtcctagctttactacttcttagttctgtgacttagtcaaggcacttaacttcccttagctttagcatccccatcaaaatgggattactacttgtgcctacctcattttgagtattagataaaataatgcatgtaaactgatgaggaagctgattctgagctgggtggtttcacatatttagtcacaaagttcatcaatgcttgtgcccagttttaagccctagcttgtttaacttcattatgccactttgtttccaaggttccttcccatatataaagggggaaaaatataaatgggatggctgaggtgagtacatcgaaagggaaaggaattagtcccactctttaagtttggccacatagttaatgaaatggtcttatcaatggagttatcctgtttaaacaccaaaaggtgcaatttcttctccatcatccccaatccccacattctctgcctcctcccttcattgctctttagccactagcaggctaggtagggtgttcctaatctgcaaccggaatgtttctggtaggagccatttctcacccactctttgtcctcttttatcacttaaaatcacggaaggctgttctgaaagcggctgggctccttgtaacattaaaaaattattaaactcagaaactaattctgttttttaatcataaatatgaaaactaggaagcaaactgagaagaatgaaagaccaaatcagcggatctgaagcaggccactctcaggaagactcctgaggaataattaaggctaattttaaatatcacctcctgggtatcatcatcaccatcgttcccaggtacctgtctgagatagtccattttgaaatagatataccttaaattatgttaaaatgtactaagcacttattgagctcagtgatcctgaaatatgcctaacaataagctgcctagttgccacttattagctaggtttatgtctaggaggtctaggagggactatgaagaatatgagctgtttaattaggggtacttgtcatcactaatgaacaacaagaaatagtttgaaaacttctttgagatattcacttgcaaatgtcacccgaatttcagaaaagtacagtctctggagtaaagctattatacactcagagagactgttgtgctttgcatgcgttatatcatttagtcctcaaaacatgttgtcaagattggcattattatctccattttaaagatgagaaaattaggtgcaaagagcttcagtaacacactcaaactcattcaacaataaataactaaaaattgtgctatacacactttaagagtcacatgttcctcccccaaaattatgaaaggccatagaaggaattcaagaagtaggcttcatgacttatcgtttcttctcatctcagatgaattcactttaatctctcatgcccaaattgtaaaatatcattttgatcaccgtcaatattacacagacctgtttgaatgtgctcagctttttcagtaaaattagaagaaaccacaatttacaaacaggtatatgtgcattaaggaaaaaacaaaaaactaccatgtgattttagatatggatgccaattcttaaacattgtttattatttctgagctcaagtgcttagaatgtttaaaatgcaatatatttatgtggatttttttccaggatattggaacatatataaaatatgcttgtgcatatctaagctttgtatttatttcaggttatatgtatactgagaagaatatataaacagtgtatgatatttacatgttatttcattttttgagggaaattaacctccacaattattaactatgcataaaatgtaatggcagatatgacttatattgtataggactgactacaattcctctttagaaatagctgttctttgcttttataatactaggaaaagaggaaaagagttcttaaagaaatacaaggattcctcaagcccctcttccctaaaacatgctctatcatatctcctggattgactggaatatccttctctgcccccaccccatcaccctctcaatgcagtggaaaagtcggtgggtaattgggtccagattggaggtgtttaaatattcatgaggctggcaggggactgggagggggcgactgtctagaatgggggtaggggctgggggaagtgattagtcactgaaggctagagaacaattccgagaaagagacggagagagagggaagaaaaagacagatagatagatattggggggaaggagaaaaaaggagaagagagggaagagaggacagcggagagagagcaccagagagagagggagagagagagagagcgctagagagagggagcgagcatgtgcgatgagcaatagctgtggaccttacagttgctgctaactgccctggtgtgtgtgagggagagagagggagggagggagagagagcgcgctagcgcgagagagcgagtgagcaagcgagcagaaaagaggtggagagggggggaataagaaagagagagaaggaaaggagagaaggcaggaagaaggcaagggacgagacaaccatgctgtgctgtatgagaagaaccaaacaggtagagctaaagattttttacttcttgctgttgtgaaataacccgagtacagtatttccccgtaaaggcaaacaatttttttactgcttctgctctggccgtggtgctcgcgcttccttagcatatggtaactgatggttgcatcccagcttttattcttttctgtctttcatgctctggttttggaatgctgctactaattagggtgagggtagaaaaaacatgcctgtttggctagaaataatttttttttttcttattagtgaatgctcagcatttgaggtctctggtcttgagggtgtggacgtagaaaggggtgtgggggagatgatgtgggctctacctacaagatggggaggcatttctttatattatttgcaaaaaagcagggttgaggaaataatattcagaactgagtattgcctctctgtcatacaattttctcacatgtgctgcggaagatgccttatttcgtgcatgcatgagcttcgaaggggcgcaggtatttatggaaaaacgtgcaggtcttatttatttagtatttatttttcaatgaatgaatgaaactgtgatttgatagattttttttttttttaagagaagctaagacaactggggctgggggagaaattggccatgcagaaggagaaaatccccttcctaagatcagcagccgattgtgcaccagctggtcggaggagagggtggaccacgcccctaggagctccgatgggatgggaaagacagccgggtattacctgttggaaaccaggtcttttctcttatccccttcccttgcttctttcctgggattgtcagtgaccagagacaggctaacatcctggataataagtatggtgactcattttcatcaggaagagggacacatccaagattagcaagaatcagagcccctccttccctcccccactgcccaggttttacagccatttccaattgctcgcttatttcttgaaagacattttagaaacttgattggggtgagagtgggaagg

SEQ ID NO: 9869 - DNA, 6000 bp, Homo sapiens
aagagttctttatggagaaagttacaaaacatgattgaaggacataaaaggagacctgactaatgatcatggatgggaagatacaatatttacaaagatgcctattctccccaagtcaagctataaatttagtgcaattccaataaaaatttcaatggattttttataggacttgataacttaactctaaaattcacctgaaagagaagaggaaaaaacgtagcttagacaattttgaactatgataaaacagagggatttgccccatgaaataacaagatattacaaagccatagtaaaaacacataaaagtaacatatgtttgtcatggacactccttgtattctcaaagtgcctgctggatacattaccacttagaaagaaagtagtcctaggtgggtcttttctaaatatcataaacttctgtgacttaggtgtacctattgggtgaaaacagttgtatgcttattcatgactgatcaggacactgcccaagtcaacagaactacagaggagttggatacaatgaaagccaacctcccatgtggtgctttggggcaatctagattgaagtttcaaatggacccagtatgtcttcttttggaggaagagtaagtgctaggtaaacaaatagaaagtgggttattaagctcaagtaggaccctgaaaaccctaaaatattgttcttattctcccttagggctgctgttcattccaatattgggaggcaaggtcccaggttggctatacaaccaaagagatgactgtccttgctaccccatgttcctggatctccttgccaattaaattaattcacatagtactctctgtctcttccttgcaaccttaataaaactaacaagaagatccaggtttgaggaagatccaggttttggaggagtcttctttaagaaaaattacacaaaactacaaatacaattagatataaatgagaaaaatcacaataaattacaaatttaaaacataaacatcacaaaatgaaatatataaaagaaataataaaatatttgtattaattttctgatatacctctatattttttcctacatattttggctgcatacactttgtttgcctcttcagatggcaagattgttgtaatattgtattctatagaggaaaaagcaagacaatacagtgctttcttgatgcacctttcttacagtttctatatccacctattcatcttctgttccccaaaaccctgccctatccacataacttaaccaccccttcccatttgcattccttcttcacttcaccacatcatcccccttcttccagccaaacacaggtacatatactttgtccttgtaacccatgacctgataaactctgttaggaggtttcttaggaagtaaaagtcttcaaaacaggaaatattcattgatgaaatgacaacttgtgaaattgttccccacttaaattgtccaatcttttaaccttagtgcctatacccacttctatcaaaatccttgtcattcatttggaaatatctagccctcaaatacaactgaaatctattgcaaattaaaagtgcaaatttacaaaagatgtggaatttcatgatcttgaaattgatgttagtaaactgctggatccacatgcaaagtcattaataaaggaggacttcacagagttggaccagataacaaatgaaaaagagaaaaacaatgagaacgatgttgacatcaatacatcaaagagaaataatctgatttcaaaggattaagagaggtctttgggaaaactagataaacgcctccaaaacttttgcaagtaagaccctgcagcaaaaatcaaatgcacagtgaaggataatgagccatataaaaaattatgtccctcctccaaaacaacatttgagttaccagaattagcacatacttgcagttgtaacctaacgtgttaaatataagataaattcatttttataagtttgggttgaatttttttcaatataaagttcaaatcaagtctttttctttcactctttcactatggaatctacatctctatctttaatggattcattctaagagggccttttctggtaccaattatctttggaaaagaaagaccttttgtactcatctctgttttacaagcatgtaatatattttaataccaccactcccccactggaaattgtaaaaaatacagactcttgggttcctctgccataccaattttgaatctccaggtggagaacgggaactaggagttaaaaaaaaattccatattttaatttactaattatttttacttcatttttttttttagaggtgcagtctcactatgttgtctaggctagacttaaactcctgggatcaagggatcttccggcctcagcctctccagtagctgggactacaggtacatgctaccacacctggctaaactccctttttttttaacactcatcataagcaatcctcgtgataatcaggcaagtgtggtaataactactttaactcatccaaagctttctttatagtaaccttaagaaatcttctttaacctagtcagctggtttgaggtaggaggtaggactcggacaccgaaccaaattgagcactagcctaaacaggtcggaggtggaagccgctttccatcagatacacacaccagtgtgtcagttcatcattgccatggcaacacccaggagttaccacccctttccagggcaatgacctgatgacccaaaagttgctaccccttccctagaaatgtctgcataaactgcctctttacttttttgtctgtttgtttgtttgtttgagacggagtctcgctctgtcgcccaggctggagtgcagtggcgcgatctcggttcactgcaagctccgcctccctggttcacaccattctcctgcctcagcctcccgagtagctaggactacaggcgcccgccaccacgcccagctaatttttttttgtatttttagtagcgacggggtttcaccgtgtaagccaggatggtcttgatcgcctgacctcgtgatccgcccgcctcggcctcccaaagtgctgggattacaggcgtgagccaccgcgcccggccaaactgccaaatgtgggtataaatgtgactcaaagctggcctgagctggtgctttctgcctatgaggtggccctgctctacaggagcagtcacggttgtgacaccaccaaagctgtaacactgcctcttcaataaaattgttttcttctacctccgggttgcccttgaattctttcctgggcaaagccaagttccctggttgcctaagccccactttggggctcgcctgccctgcatcagttcgtactcgctggactcattcctttatccttttattctttttacatgctctccttcctagatcagtgtctaatctatacaggttttggaaactttatgtagtctttagaattttataaactgctcttgcttttcatattgtattattttcttagtatttcaaaacacctttgaacaagtcagaatttcctttttttttctcctttaaaatcgagtctgagtaactcgtcttgtgttcattttttctacattctctcagcctgaatcctcatgagtccattttgctctatattcatctggacattagactactttgaaatattaccatttctgcctattctttctgtactgcctgattgtcagctcccgaaaggcaaacaccccatcttccattttgtctggatttcccccactgagcctagaagattgacttaacactgactagtgtgctgtgtgcttcacgcggtgggtgcttaataaatattttaaaacagtattaaaatgttgaataaatttgacagcagtgctgcttctcatcatttcaaatgccaacactttctaggtcccttttctagcaaccatttcccaacatacctacgcgcccccagacgtttcagccaagctggggctctcttttgatccatccttctttgcccgagttatggaaatattgtttacattttttcccctgaggagaaggggaacccaaagaccctgctgtgaaacttgaagttgtttttctccttggtaactggggagaaggaaggacagtagggacagagaaggttttgtttctgattacttcagttttcgccccagatcgtcttttacaataagatacatgcccctatgagtattttcatacctgtaaggatgtttttaattctttgcatctgaagagtgctaaggattttaggcaagaggttttagtattttaactaagatgttttctcatgagctttattcagtatctcattttcttcctgaccttctatagtcagtcaggcaacatttctcttataacatcatttttcctattaatcattatttcgtacctgtgaaaaataagcttacacttaatgttgtatgaatctagcatggtaaagtacagaaaagcttattctcttcttcttgggtagggaattctgttttgcaaagcactttgtgatctatttgttagcttatttaatcctcacaacaactttgctaggtggacaggagtcattatctccaggataaggaaaaggaaactcagagactttaagtgacttatccaaggtgacacagcacggttagacccacaatgaaaacccggacttctgactccacagccagtcccacacagctcaactttacataataagccctggttatgtcagtagagacaaggctgctaggaagaagcagcgcggtgacagatgagtaggtggggagcggcggtggggcagggcgcactgcgagaagagcacttcgcgcatgcgcatatcaccgagcgaacgcgccgtgttcgggaaggtaggagaaagaggcggagctccttgttaacgacatccccaacctctgctaacgcgcaggcgcacttcctgaagctgaaggtcagcatagacaaagggcctcagaatcgcgcaggcgcaattgtgccctggttcgccaagatgtcgttcccaaagtataagccgtcgagcctgcgcactctgcctgagaccctcgacccagccgaatacaacatatctccggaaacccggcgggcgcaagccgagcggttggccataagagcccagctgaaacgagagtacctgcttcagtacaacgatcccaaccgccgagggctcatcgtgagtgtggggcctcccaggcgggaatagggcccgagtcctgggagagaccgagagagaccacgcaaagggtcggccaccgctcccgatcagtatctcagacgcaggtcctcttccaggcctagccaactcactacccttttacctttgccagagcttggccctcgagaggaccggctctggactcagacctggctgggtttgaatcctggcttgatcacttcctgcctgcgtgaccttaagaacgttattcactctgcttatcctcgattttctgtctgcaaaatgggcgtaatatagtgcttactcttttatcaggctgttaggattaaatgagatagagtatgtgactgtcctagcacagtgcctcgttcgtaaggcgtgttcagaaaatgtttctatatatatgcatatatatattatattatatatatattctatatatatgcatatatattatattctatatatatgcatatatattttatatatatgcatatatattatattctatatatatgcatatatattttatatatatatataattttaaagagctggtgtttacctttcagttcacagctcatagggatactgctctctcctgatgggaatacagtgattccttcaacctgcatcttttaaagaccctgaagcttgctgaagttctaggctttggagtcagaacccaaagcactactcattggctaactctgttaccttgggcaacttcaactcctctgaattatagtttcctggtttcgtatataaatgatgtgcattatgaggttaaataagacagtctgtgtaacattcgcagcacataatatatgcccagta

SEQ ID NO: 9870 - DNA, 6000 bp, Homo sapiens
ttctgcctacttgatctcaatatgccagccaagtactgtcccttaaagcaaatgtaacccctctgagaagtcacttgccactttcgttgcaggtaccagaggtgattacatactatatagcccagagtatagtgaggttgtttgctgtttttcatagatgcaggaaacattgatgatcaaaggacataaacttgaggatgtggtaattaatatcatcttgaactgcctatcattccatggattaatcccagaaagctgagttgtttgctcactagcttttgactgagagctataaaaatcctaacgctttgatcagaaatcgttcctcctaatcctagtgatgggacctatacaacacttaatggtgagaatatagttcactgatttgctttccaaataaaagcaaagattttcagtaaaacaactcctaaactttagtgctctgatcttggaagctttttgaaacaatagtcttacttttctgagtttttaaaagtaaattagataaaataaaacttgaaggaaagaatgtgtagaaatgtgatagtgtatatactttaaaaatatgtcaagtgggtgaaaaatttggggcaaaagcaagtataataaaagttagtagaatctaggtagttgagtacacagggtctctctgtaaaaattattttaactttgcagtgtgtttgaaattttcatgataaaatactagaaaagatatattaaaaggtacatacctaaagttgaatttgtatatttaagaaaatgtcactggacaatgatgtaagattgtgtaatcttaatggatacttatgttggaacattcttattttttgaaatcttggaaaatagaaaatattttcaagatgcttcataaacccttcaggctattaatgtacagaccaaaagccaccctaaaggtagaaaaaccagcattaagggggaactgccaggctgtagtattgtgattccctgccatcttattatccagctagttagtaactggaatacctattttccaattagatttaaccttaaaatccaaaaaattactaaatgtctgggctcatgcatatggcaaaacagtttaaaatgctacaacatacttgttgtccttatatttcttttctcacccaacaacgtacattcagaagtgagtctgattgccatatgttttgtttgcccatgcttgacccaaaaataaaaaagtgtactgtgtggccactctcttttaccgtagcatgatcacagttagagaggggggaaaagcccatgagtgtcttttaaaaagacaagacaaaaattgttctttaaaaaatgccagacttaaccagcccctctgtaaatgattctctgtaaaaataataatttcccttcagaaaattgatctcccccatacctaagaaaaattaaacatctgaaaattgcatttttaactggtaaggcaattactctccattcaaaaggtctatttgagcttacgtccttgaaaggcgatcactctcaagctctacttccaggccttttgggaaaaatttatcctttttccttacttcctgttttctctcttcattgcctctttggctgccacagaaatgagtctgtggctgtgttgacactgtggatatttttaagaagaaaggacatggaaccaaaatattgtcaaagaactgagaagctttgtattataagggagagtcaagaggaaaggggcatattaaatgcaataaacaaagcattcagttcaccatttaccaggcttactgcaagggtcgcaagtaaaaactgcaacatgtatctctacgagcgtttaaacacaaaacaaaaaaccttcattcccaggaacatcataaaggaagggtaaagtcctggccccatcttttttactgcaaagaagtctttaaatgagtattttctgtggcaatgttatggatctctcaaggaatcacattttgtttacttttctttaattataaaaaaattcattattgtttcaaaaagcactcccaagtataaagaaaagcatagatcatgcacaacctcatctccaagagaaaaagacttttagtatttggtatacatccttcaagatttttttcttacaaatatacagcacaaaattgtattaataaattttaaaagagaaccagtttctctccaaaggatcgttgctgttactttcttgcttcatgaattatccccattcattctctggtatctatattttcactttttttttctagttccttcttcatgaattataaacatgatcagtatctttacacaagggaaggaggaaacagttatacatttcccagtattctttccctatactttctatcttttagctagcattcttactcctgctttccatttccatttccattcaagatttcctggctggatgcagtggttcacacctgtaatcccagcactttgggaggctgaggtgggtggatcacctgatgtcaggagtttgagaccatcctggccaacatggcaaaaccccgtctctactaaaaatacaaaaattagccagctgtggtggcacgtgcctgtaatcccagctactagggaggttgaggcaggagaatcgcttgaacccaggaggcggaagttgcagtgagccgaaatcacatcacggaactccagcctgggcgacagagcgagactccttccccccacacccctccaaaaaaaaagaaaagaaagatttcctaagggaagacaagtcttttctcactatcttcctacgctcaccaccaatgtattcaataatttactctaacctggcttccatcttcaccacttctgttcctgaagtcgttaatgacttccaaaatgccaaatacattgaaagtttttagttcatatccttatgtaacctctcatcagcatctgacactatcagaactctgtttcctttgactgtattccactaattcgccacctgcatcgtgaccactcctcttcctcatcatttactgagttctttccttttgcccattacttaaatgcaactgttctctaggactctggccgtagtcctcatctcttccttctctgtgttttcttctttggtgagcttatccactcctgcaatttcaattaaccctagtgatctatatgcactgcccttatctctcttcttagatacagacacctacatccaaatgggtgactggatctttccactgggatgaactttccaaagacaccacaaactcagcaagtatcttttcagcacattttcttctttttcaacccttctcctcattgacactcaaaagagagattagatcaaagtcttcaaggaaaagcagatatgaggaaatcaccttttaggacagggaaaatctgagcaattttgcagctgtgggaaggaaagtggtagagaaaaggctgaagataggtgaaaaagaggataggaactgaatcctgacaaccatgaagaaaacagtaagaaggtcttttcttcttgtagctatattttatattgtatatgtgacatgtgctttaataaattcatgtctactatgtatcattcatagcagcattgatttttaaaaatttgaattatttacatgcaaacctttatatttattttgacatctgtagttaggcaaaaattgcagttagggctaatttgtacaattagccaaatcaagtgttccttttccctttcaaaatgttctttatatattccattcctaatgagtatgaagagtccttttaattcaattcatacacaactagtatttttcaattaaaacccttacttttaagaaattcatatcctgcaatgaacaggagttacttcatttttcagatctctagcccatcagatttcattgttgtgttacttacttgcaaaatgttcctatatgatacatcccatatctgtggccattatattgtttttctttttttaatttttctttattttagagacagggtctcactctgtcacccaggctggagtgcaatagtgcattcatggcttactgcagcctcaaactcttgcactcaagcgatcctcccacctcagcctcctgagtagctaggtctacaggtgcacgccactacgtccagctaattttttatagagatgaggttttgctatgttgcccaggctagtcttggactcctggcctcaagtgatcctcctgcctaggcctcccaaagtgctgggattacaggcttaagctaccatacctggcctatatttttctatagattttccaagtttaatgcaagtttatttaattaaaataaactcacctttctgttttacttttgtggaggagaggacaaaggggtaggaaacaggaggtagggttaaggagagatggtggaagtctgtagagaggcaagattaccagttaggctcaatgttcttaagaaagttacccatctaatgcaatagtatcaaaaaagttatcagcattaacaaagaactaacaaagatacgtctcttgcaggtcagaaaggattcagaatggtgtggaaagataggagatactgtgtttggggtttcagaagttggacacgttatcctgagctgaaagcttcttatgggggtgaagcactgtcagcaaagaaagactatgtcctttcgctctttcctcccctttcccgccttaggacctcaccattttagctccactgcactaatgctccctcctcggctgcacctaggggaacagtgcacaaagtcgtccataaatgggcagcatgctaaggccagggagacaggggcctaaccttactgcctcagtggaaatcctcagctccagtgtcttgccactgaaggtgggaggagcacaggaagtgattgccctgtggcttctcctcccacagaagccctgccccctcacacttggaaggtggagagattagctttctttttccttctagttcagtcctttggctactgtgaaagaccacgcagaagctgtggacttgctttttgtgcttgacaaaagtgcatagatagaagacagggattcccggctgggaggagggaggagagctgaagatccctgcctgggctggctgagctaagcaaagtgggaagctgagtgcttgaaagaggattatgctcgcactagaaataagcagtaagtgagtgaataccattatggcttagaaaaggattaatccccccggggttatggggtgaactagaaaatattgcttaattctagagtaaaactgtaaggctccagctttgtgtactgttgtgtgctgtttggagactagaggtttaagtacaaaaccagagctctaaatgcctcctcccactcttggaaaatgccagcttctatttagattggttgggggacataatttccttccctgaactagcctcttcccaggaaaatttactactaaattagataaggagttgagattggagaggcggactttggtatttgtagaagttgcagtttcgaatgatgttctgtgagtgctgacattctatctgttagcagtgattgtcaagaaagtttagaataggagattaaaaaggggaaatcaagagcttttatgatgaggaggctgaagagtccatatgcagagaagtaaatacaaaaattatataatttaaaataggtagattttttaaaacattaaatgggaacaacagtcaaagagcatagaagtgcatggataaaaattagttagaaaaagaaattttcatttcagtgagttttttgtgctagccaaaaatttcacaatgtttacaaagtcaagacaatgattcaggaatacttcaattattgttgtacattattaatgctgttcctgggcaagatctgtggttctctggtcagcaagttctggcaaggaagccactgccagtggcataaagaattctgggatgtctgacagtgaaatggatggaaggacccacattccatctctacttaatgcccttttgtccagaaaccgggtcatgcaaatgagctacttggtacgtatacagatcaatatttggaaagg

SEQ ID NO: 9871 - DNA, 6000 bp, Homo sapiens
atggtgggtgaaatggacacttaggaggcctagatcttccacttgttagatttttaaattaattgtactttaatttcgtcacctgtcacatgaagagattagattcagtaattccttaggaccctaggacctttccagctctgacattctgtggctctgccttatttaactccttcagagtcaaaattacattttcatgagataataataatctttgttaaaattcatataagttccttctttatgaaaaaaaaaagaaccttccaaatgataattttgaaggtggaaaaatcatacattctttttcttctaaaattatgagaataataaaatactatgtaggccttaaaaattggaaaaaaccccaatcttcctaccagaagttactgttatgaattttatggtttatttctttttactatccagttaaagtattattgaaaatgtaggtagctgaaaaggttccccaagtaaatagaaagaatctgaaagtatgagttgggttaaacatgtaatcttttctttccttttgtctttttttttttttttttttttttccaagacagaggagtctcgctttgttgcccaggctggagtgtagtggcatgatctcggctcactgcagcctctgcctcctgggttcaagggattccccaacctcagcctcccgagtagctgggactacagccgcatgctaccatgcccggctaatttttgtatgttttggtagagacagggctttgccatgttggtcaggctgggtctcaaactcccggcttcaagtgatctgctcacctcggcctcccaaactgttggactgtgccttgccataatcttttctttgttatatgattcctttagtaattgagcatagattctttgtcttttctagtgtttggtatgataattttgatcttcaggtaggtggtagacatcatgtctgtgtatcattgttagtagacaagtacgtactttaataaaaatgcatctgtttttaattaacagagaattcttgaattggaaagttctttggaaaaaagcttacaagaaaacaaaaatcagtcaaaagatttggctgttcatctggaagctgaaaaaaataagcacaataaggagattacagtcatggttgaaaaacacaagacagaattggaaagccttaagcatcagcaggatgccctttggactgaaaaactccaagtcttaaagcaacaatatcagactgaaatggaaaaacttagggaaaagtgtgaacaagaaaaagaaacattgttgaaagacaaagagattatcttccaggcccacatagaagaaatgaatgaaaagactttagaaaagcttgatgtgaagcaaacagaactagaatcattatcttctgaactgtcagaagtattaaaagcccgtcacaaactagaagaggaactttctgttctgaaagatcaaacagataaaatgaagcaggaattagaggccaagatggatgaacagaaaaatcatcaccagcagcaagttgacagtatcattaaagaacacgaggtatctatccagaggactgagaaggcattaaaagatcaaattaatcaacttgagcttctcttgaaggaaagggacaagcatttgaaagagcatcaggctcatgtagaaaatttagaggcagatattaaaaggtctgaaggggaactccagcaggcatctgctaagctggacgtttttcagtcttaccagagtgccacacatgagcagacaaaagcatatgaggaacagttggcccaattgcagcagaagttgttggatttggaaacagaaagaattcttcttaccaaacaggttgctgaagttgaagcacaaaagaaagatgtttgtactgagttagatgctcacaaaatccaggtgcaggacttaatgcagcaacttgaaaaacaaaatagtgaaatggagcaaaaagtaaaatctttaacccaagtctatgagtccaaacttgaagatggtaacaaagaacaggaacagacaaagcaaatcttggtggaaaaggaaaatatgattttacaaatgagagaaggacagaagaaagaaattgagatactcacacagaaattgtcagccaaggaggacagtattcatattttgaatgaggaatatgaaaccaaatttaaaaaccaagaaaaaaagatggaaaaagttaagcagaaagcaaaggagatgcaagaaacgttaaagaaaaaattactggatcaggaagccaaacttaagaaagagcttgaaaatactgctctagagcttagtcagaaagaaaaacagtttaatgccaaaatgctggaaatggcacaggctaactcagctggaatcagtgatgcagtgtcaagactggaaacaaaccaaaaagaacaaatagaaagtcttactgaggttcatcgacgagaactcaatgatgtcatatcaatctgggaaaagaaacttaatcagcaagctgaagaacttcaggaaatacatgaaatccaattacaggaaaaagaacaagaggtagcagaactgaaacaaaagatcctcctatttgggtgtgaaaaagaagagatgaacaaggaaataacatggctgaaggaagaaggtgttaagcaggatacaacattaaatgaattacaggaacagttaaagcagaagtctgcccatgtgaattctcttgcacaagatgaaactaaactgaaagctcatcttgaaaagctagaggttgacttgaataagtctctgaaggaaaatacttttcttcaagagcagctagttgaactgaagatgctggcagaagaagataagcggaaggtttctgagttgactagcaagttgaaaaccacagatgaagaattccagagtttgaaatcttcacatgaaaaaagtaacaaaagcctagaggacaagagcttggaatttaaaaaactgtctgaggaactagcgattcagctagatatttgctgtaagaaaaccgaagccttattagaagctaaaacaaatgagctaatcaacattagtagtagtaaaactaatgccattctttctaggatttctcattgtcagcaccgtacaactaaagttaaggaggcactgttaattaaaacttgcacagtttctgaattagaagcacaacttagacagttgacagaggagcaaaatacactaaatatttcttttcaacaggctactcatcagttagaagaaaaagaaaatcaaattaagagcatgaaggctgatattgaaagtcttgtaacagaaaaagaagccttacagaaggaaggaggcaatcagcaacaggctgcttctgaaaaggagtcttgtataacacagttgaagaaagagttatctgaaaacatcaatgctgtcacattgatgaaagaagagcttaaagaaaaaaaagttgagattagcagtcttagtaaacaactaactgatttgaatgttcagcttcaaaatagcatcagcctatccgaaaaagaagcagccatttcatcactaagaaagcagtatgatgaagaaaaatgtgaattgctggatcaggtgcaagatttatcttttaaagttgacactctgagtaaagagaaaatttctgctcttgagcaggtagatgactggtccaataaattctcagaatggaagaagaaagcacagtcaagatttacacagcatcaaaacactgttaaagaattgcagatccagcttgagttaaaatcaaaggaagcttatgaaaaggatgagcagataaatttattgaaggaagagcttgatcagcaaaataaaagatttgattgtttaaagggtgaaatggaagacgacaagagcaagatggagaaaaaggagtctaatttagaaacagagttaaagtctcaaacagcaagaattatggaattagaggaccatattacccagaaaactattgaaatagagtccttaaatgaagttcttaaaaattacaatcaacaaaaggatattgaacacaaagaattggttcagaaacttcaacattttcaagagttaggagaagaaaaggacaacagggttaaagaagctgaagaaaaaatcttaacacttgaaaaccaagtttattccatgaaagctgaacttgaaactaagaagaaagaattagaacatgtgaatttaagtgtgaaaagcaaagaggaggagttaaaggcattggaagataggcttgagtcagaaagtgctgcaaaattagcagagttgaagagaaaagctgaacaaaaaattgctgccattaagaagcagttgttatctcaaatggaagagaaagaagaacagtataaaaaaggtacagaaagccatttgagtgagctaaatacaaaattgcaggaaagagaaagggaagttcacatcttggaagaaaaacttaagtcagtggaaagttcacagtcagaaacattaattgtacccagatcagcaaaaaatgtggcagcatatactgaacaagaagaagcagattcccaaggctgtgtgcagaagacatatgaagaaaaaatcagtgttttacaaagaaacttaactgaaaaagaaaagctattgcagagggtagggcaggaaaaagaagagacagtttcttctcattttgaaatgcgatgccaataccaggagcgcttaataaagctagaacatgctgaggcaaagcaacatgaagatcaaagtatgataggtcatcttcaagaggagcttgaagaaaaaaacaagaaatattccttgatagtagcccagcatgtggaaaaagaaggaggtaaaaataacatacaggcaaagcaaaacttggaaaatgtgtttgacgacgtccagaaaaccctccaggagaaggaactaacctgtcagattttggagcaaaagataaaagagctggattcctgcttagtaagacagaaagaagtacatagagttgaaatggaagagttgacctcaaaatatgaaaaattacaggctttacaacagatggatggaagaaataaacccacagaacttttggaagaaaacactgaagaaaagtccaaatcacatttggtccaacccaaattgcttagtaacatggaagcccagcacaatgatctggagtttaaattagccggggcagaacgggagaaacagaaactgggcaaggagattgttagattgcagaaagaccttcgaatgttgagaaaggagcatcagcaagaattggaaatactaaagaaagaatatgatcaagaaagggaagagaaaatcaagtaagttttatttcagcttgaatatttttatggcagtccttcttaattaagtctcctttttttgtgcctaatacagttattttaaattatttggataagtttcaccaacccaaaatattaaacataaatccaatatgttaaatatgaggagaaataaaaacaatttagggcaagtggcagtgttattccatgtccatttaggagagaaaaaccttttcttgcatataagattctggttattagggacatatccaagtaattattttctttttgttttgttgtttttagtattagcattattattatataacatagatgtgttttgaaaaaaaaattaaagtggaaaacaaaaattctctggtccccaggaccactacttagaggtaatcatagttgatatgtacctggacacacacacacacacacacacacacacacacacactcactctcacactctctctctctctctctctcaaaaatgttttcatacaatgaactcatactgtatgcactgttttaaagaccaggtagctccttgcagcttgttctttgtgtggcagcagttaacggtacatttttattactcagacaggagcaggaagatcttgaactgaagcacaattccacattaaaacagctgatgagggagtttaatacacagctggcacaaaaggaacaagagctggaaatgaccataaaagaaactatcagtaagtaaaattaagttccataaggaacaattatatcagcagagg

SEQ ID NO: 9872 - DNA, 6000 bp, Homo sapiens
ggggtcaacaggaaaaaatgtgagcaaaggactcagtgtcataagtaagtttaaggaaaggtgctgtgcctggatgtgcacataggccagatttatgtttgactttacacaaacatctcagtgcagtaaagagcagtattgccgccagcatgtctcacctgcagccataaggcggttttctcctatctcagtaaatagaatgtatggttgggttttacacccaagacattccattcccagggacaagcaggagacagatgctttcctcttatctcaactgcaaagaggccttcctcttttactaatactcctcagcaccgaccctttacgggtgtctgcaaagaggccttcctcttttactaatactcctcagcacagaccctttacgggtgtcgggctgggggactgtaaggtctttcccttcccactaggccatatctcagacaatctcagtggggggaaacctggacaatacccaggctttcttgggcagaggtccctgcggcctttcgcagtgcactgtgtacctggttaatcgagaatggagaatggcgatgacttttaccaagcatactgcctgcaaacaaatggttaacaagccacatcctgcacagccctaaatccctcaaaccttgattcaatacagcacatgtttctgtgagcacagggttggggctaaggctacagattaacagcatctcaaggcagaaaaatttttcttagtacagatcaaaatggagtttcttctgtcttccttttctacacagacacagtaacagtctgatctctcttcctttcccccacactgccgcactccccttgccgagatagtgaaaatagtaatcaataaatactgagggaactcggagaccgatgccggtcacctgggcccactctacactttgtctctgcgtcttatttcttttctcagtctctcctcccatctgacgagaaatacccacaggtgtgaaggggcaggaccccttcaaaggtcaaggccatggaggttcccccagtgaaaattcggggcggggaggtgaggagagctctggacgaacggaagaacggggaaggcccagcgcagggcctgagtggttcgctcaccgacacagatgtcccccagctgttccggcctcagattcacgtccttgagaaccgcggtcatgactgccgagagaagctcgtcgggggtggtgtcctgcagcagaaagagcagccgcagtgacccccactcccccatgcccaccccagggagacaaagcgaccacagctgggtgcggagctgcctccggcgtccaggataaccaaacatacgaaccggaccccagcccgcgccggcgtcttcccacactcggcgcccagaccctcgggcctcaccttgaagccgccgcggcccgcccggcagatggccgtgcgccgcccgtgcaccaccaccacgtccgcggccgaggcctgcggggcaccgctcaggcaaggcgcggcctgcggcatccagccggaatcggccggacccctcaggtggcccagcactacctgcagcctctgcattgcgcaggtcaaccctgcagaccagccaccagtccgggaactgaccgcggagttaacagacagccgtccgcacacgcgcagaaccacatctcagcctccaaggcctcaactccgcccacagctctgcgaacagacgcgagcgaccctccaaaagtcccgtccacctccagcctcagccaaccacaaggagagtcggcctgggaacccgcccctccccgccaccgcctaccaagccctctataggagggcccacaggcaccgcccagccgagctttccactcaatgccccgcctaccttggcctaccgcagccaaccagaaggtgtatctttacgaatccccgcccagaaatgcagaccggaagtctttccaccttttgtagccaaacccgagacctgacccccaaatccctgtctcctgcccgcagccaaacggaaggctgggcagccaggaccgcttactgcttgggggctggagatggaagccgaggctctaattcctctacccacttcctaggaggctctgctatccctccggtcccagtacccgagctgggggacctaaatacttccgagacgcccgagtcctgctccgacgtggttgggctttcccattctttcgagaagacagggaatttgggcttccgggctggccgggagaacagattttacagacatgcggggtgtgacaagctctctaactggagaatgaacatttcacacttttaccagttttacacccaattggaatgattttattagtgcccatttcccgtgctaggctggggtctccaccaaggcagagaggtaccatgtatccggggagcctgcgacacccttgacacttagtagatgatcaataagtacttgtcgaatgagtaaatgaatgaaccagggctccccaggtcaggactgtgtccctaaacctaaagggcaaggccacgtgcccccttgactcccaatagcagggccatgtcttcacctgagaccctggagagtagtgctgggctttccacagacaccaaaggacagggtgccttgtgctccccaacctagtgtcatgacgtccccaaccatttcgagggcagggccacggcatgcctcaggctccagaaggcagctgtccgtttcccactcccacctcggggagcacagcaggggtcttcccatacccctactggcaggattgcgtgttccccagagacagtggagggcagagctggtgccttcccacttgtcccctcctcgccatcctcgagggcaggaccgtatgaacccctcagattcctccgtggaagaactgtggctccaccagatcccaaaaagcaaggcccgtttcctacaacccccgaaggagggtcgtcctcactccgccgccaacctactagcaccatcaccagaccctcgagggcggtgccgtggacctctccagatctcaaaaggcagattcctacttcttacgccccccacatcacccgcctcgagacctcaagggtagaggtgggcacccccgcctccgcacttttgctcggggctccagattgtagggcagggcggcgcttctcggaaagcgaaagccggcggggcggggcgggtgccgcaggagaaagaggaagcgctggcagacaatgcgacccgaccgcgctgaggctccaggaccgcccgccatggctgcaggaggtcccggcgcggggtctgcggccccggtctcctccacatcctcccttcccctggctgctctcaacatgcgagtgcggcgccgcctgtctctgttcttgaacgtgcggacacaggtggcggccgactggaccgcgctggcggaggagatggactttgagtacttggagatccggcaactggagacacaagcggaccccactggcaggctgctggacgcctggcagggacgccctggcgcctctgtaggccgactgctcgagctgcttaccaagctgggccgcgacgacgtgctgctggagctgggacccagcattggtgaggacgtccccttcctggcctcgtacctggggggtgaggaggctgactttccgcggcctcagcatcctgtctcccatggagagaccccatttcctgcctcgggggcccgaagaagcctgcagagggagaaccatgcgggtcccgttccttcttaataaccggtcgcggttattaagaaggactggagaaaggtccggataggcggagatgggaaggaagcagcttaggcagaggctttcaggtagggccaggagtcagaatcaggcttctgtgggggcatctgggctgtttcaagtagagcaacaggacaggtggggcgattgacagtggactgtcttagaaacctcaagtcctggggaaatgcagcccttctttctactcactggcacttacataatatacatgcataggcgttggatacagccgcccacagacaggcacaccttgctgagttggaatcactgcaccataaccagtgggtctcctgagcctttctggcatgcccagccccttgctcacatctgccctggatcccagaagaagcagacctaccttggtaccattcttaggatccctaggaagggacagagatacaaacctgactttgatggccttccagaaagccagaacaccactgacatccctttgggtcagttagagccagtgggagctcaacttctcagagccgttgagcttcgcgtggcaccagtgaactggggaagccctctagaacaacccagccagaggaggtgggacagcggctggatcctgactgtgggtaaagaggtaggcactcccagggaggctgctttactctgtctcttccccacagaggaggattgccaaaagtatatcttgaagcagcagcaggaggaggctgagaagcctttacaggtggccgctgtagacagcagtgtcccacggacagcagagctggcgggcatcaccacacttgatgaccccctgggtaagggtccaatactgttcccatgggacaggtggaataggacattgtggtgttaagagcatgggtgtttgaagcagatgggctgtgagaccttgggcaagtcacttaatctttctgagcctcagtttcctcacctaagaaatggagataatagtcctacctctggattgctgtgagatgctcatgaaataatgtctgtctcgtggttaatccagagcttagcccctgaggtactcatctttcctctcctggaaagggcactttctctgaggagtatcatcttgggaagggtgcagggcccagggttgcctaggcaggggactcttggctggatccctcccaagccttcccatggagctctgaccaccacccttgtgctctgcacccagggcatatgcctgagcgtttcgatgccttcatctgctattgccccagcgacatccagtttgtgcaggagatgatccggcaactggaacagacaaactatcgactgaagttgtgtgtgtctgaccgcgatgtcctgcctggcacctgtgtctggtctattgctagtgagctcatcgaaaagaggttggctagaaggccacggggtgggtgcgtggatgcatgaagccctgccctggggtccagatactgggcatctcctcctagctgtgcactgtccagcctgggcacagtgggcccttcctgaagctattcccaggggatatgctgaactaagttgccacaggacctgcagcctgcccactctcccctaggtgccgccggatggtggtggttgtctctgatgattacctgcagagcaaggaatgtgacttccagaccaaatttgcactcagcctctctccaggtaagctcaaccctgctctggcaagagaatgagggaatgtgtaggtggggcctctggattgtcagccttccctccccaaggactgtggatgcagtaccaaagaactgctgaagatctctgcacacctgagcatgtgtgcatgtgtgtgcctttttgtgtgagtgaatgtgtgccaggggtacttagatgggggatggctgttgttaaccctggggttgaagactgggcttgtcccaccatggggcaagggcctgatgccagcatggcaccccttggcttgcaggtgcccatcagaagcgactgatccccatcaagtacaaggcaatgaagaaagagttccccagcatcctgaggttcatcactgtctgcgactacaccaacccctgcaccaaatcttggttctggactcgccttgccaaggccttgtccctgccctgaagactgttctgaggccctgggtgtgtgtgtatctgtctgcctgtccatgtacttctgccctgcctcctcctttcgttgtaggaggaatctgtgctctacttacctctcaattcctggagatgccaacttcacagacacgtctgcagcagctggacatcacatttcatgtcctgcatggaaccagtggctgtgagtggcatg

SEQ ID NO: 9873 - DNA, 6000 bp, Homo sapiens
tattggaacaaaatttttcatatcagtagtaattgtggcaattaccccactggaaaagccatagtgccttgtttctgcagactagagcatgggaggagagagatgatgacgttacctatccaacagggctgggtgcagatcaaaagaaatgaatgattcctggggaagtactttgcgaatgctgaagatttatgtgcgtttaaggtggtattaattatttttggcacaggaaaagagtcaatcagaatatttgaagatcagccaagaaaaagaacagcaagaatctttggccctagaagagttagagttgcagaaaaaagcaatcctcacagaaagtgaaaataaacttcgggaccttcagcaagaagcagagacttacagaactgtaagttttaataatattcagattctggagttgtgaaattatttgcatatgaaaatttgttgtctctagtcagtataaagtttcgaagattactggattagatttatgtatacatgcccttcatttttaggtagtgtgagctatgcatgggagtggatttggctttaggctctgtgtttattacatggtgctcctggttctgcctttagctggctgtatttctgtcagccactcagtctgctgcttttcactgaccctgcagcatctccattgcatactcacccttgatgtctaggaagtgggctcattttgtaggcaatacttgccctggcacctttctgcttgtccaggtttatcttatgccatgtcctgaacgtaatccagcctctgcttatatcacagtttaattacactagtgtgtggcttttgcatttggtttccccagtttttccatactaaacatagtcccgtaatgaacatatttgtgtgtatgtcccagagtgtacgtttttttaaaggccctgtctgatcctttccttagcagtatttgaaatgtacaacctattttgaaaactaactgatgtttagacttgttagcttttttgctctgatttagatagtaaaacagtcatacttcttactcatagttctaaaccatgcttaatttttccatcactaacacttgcaaaaggttccatggtgggtgaaatggacacttaggaggcctagatcttccacttgttagatttttaaattaattgtactttaatttcgtcacctgtcacatgaagagattagattcagtaattccttaggaccctaggacctttccagctctgacattctgtggctctgccttatttaactccttcagagtcaaaattacattttcatgagataataataatctttgttaaaattcatataagttccttctttatgaaaaaaaaaagaaccttccaaatgataattttgaaggtggaaaaatcatacattctttttcttctaaaattatgagaataataaaatactatgtaggccttaaaaattggaaaaaaccccaatcttcctaccagaagttactgttatgaattttatggtttatttctttttactatccagttaaagtattattgaaaatgtaggtagctgaaaaggttccccaagtaaatagaaagaatctgaaagtatgagttgggttaaacatgtaatcttttctttccttttgtctttttttttttttttttttttttccaagacagaggagtctcgctttgttgcccaggctggagtgtagtggcatgatctcggctcactgcagcctctgcctcctgggttcaagggattccccaacctcagcctcccgagtagctgggactacagccgcatgctaccatgcccggctaatttttgtatgttttggtagagacagggctttgccatgttggtcaggctgggtctcaaactcccggcttcaagtgatctgctcacctcggcctcccaaactgttggactgtgccttgccataatcttttctttgttatatgattcctttagtaattgagcatagattctttgtcttttctagtgtttggtatgataattttgatcttcaggtaggtggtagacatcatgtctgtgtatcattgttagtagacaagtacgtactttaataaaaatgcatctgtttttaattaacagagaattcttgaattggaaagttctttggaaaaaagcttacaagaaaacaaaaatcagtcaaaagatttggctgttcatctggaagctgaaaaaaataagcacaataaggagattacagtcatggttgaaaaacacaagacagaattggaaagccttaagcatcagcaggatgccctttggactgaaaaactccaagtcttaaagcaacaatatcagactgaaatggaaaaacttagggaaaagtgtgaacaagaaaaagaaacattgttgaaagacaaagagattatcttccaggcccacatagaagaaatgaatgaaaagactttagaaaagcttgatgtgaagcaaacagaactagaatcattatcttctgaactgtcagaagtattaaaagcccgtcacaaactagaagaggaactttctgttctgaaagatcaaacagataaaatgaagcaggaattagaggccaagatggatgaacagaaaaatcatcaccagcagcaagttgacagtatcattaaagaacacgaggtatctatccagaggactgagaaggcattaaaagatcaaattaatcaacttgagcttctcttgaaggaaagggacaagcatttgaaagagcatcaggctcatgtagaaaatttagaggcagatattaaaaggtctgaaggggaactccagcaggcatctgctaagctggacgtttttcagtcttaccagagtgccacacatgagcagacaaaagcatatgaggaacagttggcccaattgcagcagaagttgttggatttggaaacagaaagaattcttcttaccaaacaggttgctgaagttgaagcacaaaagaaagatgtttgtactgagttagatgctcacaaaatccaggtgcaggacttaatgcagcaacttgaaaaacaaaatagtgaaatggagcaaaaagtaaaatctttaacccaagtctatgagtccaaacttgaagatggtaacaaagaacaggaacagacaaagcaaatcttggtggaaaaggaaaatatgattttacaaatgagagaaggacagaagaaagaaattgagatactcacacagaaattgtcagccaaggaggacagtattcatattttgaatgaggaatatgaaaccaaatttaaaaaccaagaaaaaaagatggaaaaagttaagcagaaagcaaaggagatgcaagaaacgttaaagaaaaaattactggatcaggaagccaaacttaagaaagagcttgaaaatactgctctagagcttagtcagaaagaaaaacagtttaatgccaaaatgctggaaatggcacaggctaactcagctggaatcagtgatgcagtgtcaagactggaaacaaaccaaaaagaacaaatagaaagtcttactgaggttcatcgacgagaactcaatgatgtcatatcaatctgggaaaagaaacttaatcagcaagctgaagaacttcaggaaatacatgaaatccaattacaggaaaaagaacaagaggtagcagaactgaaacaaaagatcctcctatttgggtgtgaaaaagaagagatgaacaaggaaataacatggctgaaggaagaaggtgttaagcaggatacaacattaaatgaattacaggaacagttaaagcagaagtctgcccatgtgaattctcttgcacaagatgaaactaaactgaaagctcatcttgaaaagctagaggttgacttgaataagtctctgaaggaaaatacttttcttcaagagcagctagttgaactgaagatgctggcagaagaagataagcggaaggtttctgagttgactagcaagttgaaaaccacagatgaagaattccagagtttgaaatcttcacatgaaaaaagtaacaaaagcctagaggacaagagcttggaatttaaaaaactgtctgaggaactagcgattcagctagatatttgctgtaagaaaaccgaagccttattagaagctaaaacaaatgagctaatcaacattagtagtagtaaaactaatgccattctttctaggatttctcattgtcagcaccgtacaactaaagttaaggaggcactgttaattaaaacttgcacagtttctgaattagaagcacaacttagacagttgacagaggagcaaaatacactaaatatttcttttcaacaggctactcatcagttagaagaaaaagaaaatcaaattaagagcatgaaggctgatattgaaagtcttgtaacagaaaaagaagccttacagaaggaaggaggcaatcagcaacaggctgcttctgaaaaggagtcttgtataacacagttgaagaaagagttatctgaaaacatcaatgctgtcacattgatgaaagaagagcttaaagaaaaaaaagttgagattagcagtcttagtaaacaactaactgatttgaatgttcagcttcaaaatagcatcagcctatccgaaaaagaagcagccatttcatcactaagaaagcagtatgatgaagaaaaatgtgaattgctggatcaggtgcaagatttatcttttaaagttgacactctgagtaaagagaaaatttctgctcttgagcaggtagatgactggtccaataaattctcagaatggaagaagaaagcacagtcaagatttacacagcatcaaaacactgttaaagaattgcagatccagcttgagttaaaatcaaaggaagcttatgaaaaggatgagcagataaatttattgaaggaagagcttgatcagcaaaataaaagatttgattgtttaaagggtgaaatggaagacgacaagagcaagatggagaaaaaggagtctaatttagaaacagagttaaagtctcaaacagcaagaattatggaattagaggaccatattacccagaaaactattgaaatagagtccttaaatgaagttcttaaaaattacaatcaacaaaaggatattgaacacaaagaattggttcagaaacttcaacattttcaagagttaggagaagaaaaggacaacagggttaaagaagctgaagaaaaaatcttaacacttgaaaaccaagtttattccatgaaagctgaacttgaaactaagaagaaagaattagaacatgtgaatttaagtgtgaaaagcaaagaggaggagttaaaggcattggaagataggcttgagtcagaaagtgctgcaaaattagcagagttgaagagaaaagctgaacaaaaaattgctgccattaagaagcagttgttatctcaaatggaagagaaagaagaacagtataaaaaaggtacagaaagccatttgagtgagctaaatacaaaattgcaggaaagagaaagggaagttcacatcttggaagaaaaacttaagtcagtggaaagttcacagtcagaaacattaattgtacccagatcagcaaaaaatgtggcagcatatactgaacaagaagaagcagattcccaaggctgtgtgcagaagacatatgaagaaaaaatcagtgttttacaaagaaacttaactgaaaaagaaaagctattgcagagggtagggcaggaaaaagaagagacagtttcttctcattttgaaatgcgatgccaataccaggagcgcttaataaagctagaacatgctgaggcaaagcaacatgaagatcaaagtatgataggtcatcttcaagaggagcttgaagaaaaaaacaagaaatattccttgatagtagcccagcatgtggaaaaagaaggaggtaaaaataacatacaggcaaagcaaaacttggaaaatgtgtttgacgacgtccagaaaaccctccaggagaaggaactaacctgtcagattttggagcaaaagataaaagagctggattcctgcttagtaagacagaaagaagtacatagagt

SEQ ID NO: 9874 - DNA, 6000 bp, Homo sapiens
atcctagcactttgggaggccgagcaggcagatcacctgaggtcaggagttcgaaaccagcctgaccaacatggtgaaacaccatctctactaaaaatacaaaaattagctgggcgtcgtggcatccgcctgtaatcccagctactagggagaccgaggcaggcgaatcgcttgaacctgggaggtggaggttgtagtgagccaagattaccccattgcactccagagcgaaactccgtctcaaaagaaaaaaaaaatttaaaaagcaacgcttcatactaactacttcatactaatgaagtaacgtaacaatgaaataacaagggaagttgttaccacaaaggaaatgtgcaatgctttcctttataatgatgaatgtgcaatatgactgctcataacatgcctatacttctgtgtactttaggaagacttggcttctctatgaaaatatgtgaaccctttggctgtataacatgctgtcatgtcatctggctttcatctggcattatttaaaacttaaattctcttgtcttctaatttgcctgaggccattaaagagtgcattattctttcacactacatggtttccatgatgtcaaatataaaacttaggttgggcacagtggttcacgcctgtaaatcccagcactttgggaggccgaggagggcggatcacctgaggttaggagtttgagaccagactgaccaacatggtgaaaccctgtctctactaaaactacaaaaattagccgggcatggtggtgggtgcctgtaatcccagctacttgggaggctgaggcaggagaatcatttgaacccgggaggcggaggttgcagtgagccgagactgcgccattgcactccagcctgggtaacaagaatgaaacaatgtctcaaaaaacaaacaaacaaacaaaacaaaaaacaaatataaaacttgatttattaactaactttaaaaaaggtcttattccatgaaaatgcctttcattgaaaaattgaactacaaagggagcttctgtcttgataactgttagaagaattcaacgtgagtaccatagcagatatggggtgactgttagcatgtgacattagttctagacaagctaggtagaggacggtgtcaggctattgcagtagagcacttctgccaatgaatggaccaccatctatccagttccacaaccacctacatgttacccttgacatttctttctcattgccctgtatctaatctatccacatgttctgttgatatcacctcttaaatttctcttgagttcatctttttctctccatcttttccatcacaaccttaatccaagccaccatgatctctttcctacacaacaacagtcactcctaggtggccccttctctcccattctagtggtctcaaattctttcccagtctgccagccacagtgcagtttccaaaagatacatttttttttctgtttttttgtttgttttttgagactgagtcttgctttatcacccaggctggagtgcagtggccagatctcggttcactgcaacctctgcctcctgggttcaagggattctcgtgcctcagcctcccgagcagctgggatgacaggtgtgtgccaccatgcccagctaatgtttgtatttttagtagagatgcggtttcaccatgttggccaggttgttctcgaactcctgacctcaggtgatccacccacctcagcctcccaaagtgctgggattacaagctgtgagttaccacgcccggccccaaaatgtaaatttaatttctcaactcctaacatattcacccttttaaaactttttagtggttgccttttgctcctaaacacctgtaacaagatctacatgtttggagatactcccttcattctaccacaacctggtcttcattgtttcctctgcttcaactgctgtctctgctgcccacttccactgtcttcacttcacacactcctacttccttcagatgaaacacacacctcctttccttgcacttactacaattatcatttaaatactggttagtgtttatttgggagtctaagccccatgagggctggaaccgtgtttgttttagctccactgcatctctaccaaatatttaatgaatatgtttagtacattacacaacataaatattatttagaaatacccacaattctggccgggcgcggtagctcactcctgtaatcccagcactttgggaggctgaggtgggccgatcacttgagctcaggagttcgagaccagcctggacaatatggtgaaaccccgtctttactaaaaatacaaaaattagccaggtgtggtgggacatgcctgtgatcccagctgctctggaggctaaggcaggagaatcagaatcacttgaaccctggaggtggaggttacagtgagccgagatctaaaaaaaagaaaagaaagaaaagaaaagacacacaattctacactgcaacatagattctctagcccccttgcctgagggttgggaagtatcgcccctctaaacagttcacaacacaaacacattttgagggggtaattttgtaagtataattctttcactcagactatacttggacagaccaagacagtactacagtgtattgaagcctgccaccaaggctgtctggtgttcatctattcttttttaataaaaaacaaactataatcaacatatatgaagtatttcagcgggatttagaagctttttaaaaaatatgatgatatcagatctgcagttttgggtgttacagtgtttgaggcattgttggaaggtactagaatctttggtgaggtggtatctcattactattttaatttacatttccaggccaggcgtgttggctcacgcctgtaatcccagcactttggggggcctaggtggatggatcacaaggtcaggagctcaagaccagcctggccaatatggtgaaaccccatctctacgaaaaatacaaaaatcagctgggtgcggtggccggtgtctgtagtcccagctactccagaggctgaggcaggagaattacttgaactctggaggtggaggttgcagtgagctgaggtggcaccactgcactccaacctgagggacagagaaagactctgtctcaaaaaaaaaaaaaaaaaaatcaatttccctgattatgaatgagattgggtgtcttttcatatttgagtggctgctcaagtttcctattctgtgagctgtctgttcatgtcatttacctattttcctattgggttatctgccgtttcttactgaacttagaaattattttgaatatttattattcaaaaactttgtcagttataacttgtggtttatcttttcaatttatgccatcttttaatatggcaaaaattatcaatctttcttcctttattctttgtttcttgtttaaaaagttctttcctactcccaagttcataaagatatttcctatcttcttctaaaagtttttaagttttccctttcacatttaagcgtttgatctacctgaaatgggttttttctgtgtggtatgaagcggtaatccctgattgttttttcatatgtataaccaattgttccagtactatttactgactcttcttgctttccccacggattcgtaaggttttctgtcacagatcaagttacatggatgcaccagtctgtttgggggctctttattctattgcattggtctatcaatccgtgcgcaagaatatgctgctttacgatacagtagtgtcttcacactagctaactagctagctgttataaagatggacaagtcactttaccttctccttcttcctcttcctcttcttcttcttcttttttaatctttgaattaaaaaaaaatacggcggggtgaggtggctcgcgcctgtaatcccagcactttgggaagccgaggcgggcggattacctgaggtcgggagttcgagaccagcctggccaatatggcgaaaccctgtctctacttaaaaaatacgaaaattagccgggcgtggtggcggacgcctgtaatcccagctactcgggaggctgaggcaaggagaactgcttgaacccggaaggcggacgctgcagtgagccgagatcgcgccattgcactccagcctgggcaacagagccagactccttaaaaaaaaaaaaaaactcataatacctactcatagggctgtaatggagattaaaggaaacaagaatggtatgtaaagcatcggatacaaggtagggaagaactcaacagtggcttttatttaatgatgctgaaggtaccgatgaaacagagaaataaagggatcaatctttctgggagcttcagtttcatttataaaaagaagaagatgagttagcataacatttctaaggctcttgccacttctaagactgtgatcctggcattttattatctagagaccaggcagcgagacattgatgggcagttggtgttaaagtgagaaaggcggtatctgcgcagactgcagggtcgaaccatgagcaagcaatcgtatctgccacaacagataagaactggggctggccggcctgacgactctcaacgggttagacgcgggctacgatgaccttcacgatcttttctggcagctacacggccacgcagggtgggactgctctgcctacgaacagcactgtgtgcgaacacagggccacggttaagcctcccggctgcctcccccagggaacacgacccctgagaagattccagacagtctcgcagaggcacggggaaggatggaacagagccgggagctcggtgggaagaggggcagcccgcaccgcccccgggatgtcaccggcgcttctgggaaatgtagtccttcgccgcgtccgcagccctgggcactcggaaggaggactacagttcccttcagccttgggaatgctttgtgcagcgcgcttgcgcggtgtggcggccgatgccgctataaaggcttgttttgctgcagggctcatgctcgggagcgtggttgagcggctggcgcggttgtcctggagcaggggcgcaggtaggtgatggctgctgccgcacccctgccctccagctcggttgtcacggggatcacccctttgcatttcctcggggcgtggcgggatgtggccagggctgcgagcagttcgggggacactggagacttggggaacggcgtatggcctccccctggtctcctgccgccgcctcctaggcctgtgagcccggggtctggtgacggggtcgtgtgctggaagacaggcaggtaggatcgggatgagcgggcagggacgcgggctacgtccctggccgcggccgccagggggcgctgcgcccgcgggccgtgggtgtgggtcgcgctcgcctgggcaggccggagcgggctgtgggaacgccctagggcccgggcatcccaggcgaagcgggtctgagagaaacgcccacctgggaggctgtgcagcgggtggctcggggcaccctgctcaacccgcagcggagccgccagcgaccttcgaagtaagtcatccccttcgtttttgcaagcgggtaaatggaggtacgtgacataagcacgcgcagcaaagccgtggctgtgccgggaacgcagcccagatctctccacggtcatccagtgctcttttcgcttctgccacacagagccgcgggtggctttgtgtttatcacacaggggccatttggtttctgcacagacggagaggctggaggcaggtgggcacaggaacgacggggaaagtttcaggaggtcttggaggaggagatggctaggttttactgtggtccgcagcgtgtatgaaaggtgaggctgcttggagacgcaacaagtggattacagtgggtgtggtaaatacgtatccctttagcgtggtgtcttcctcgtgcagcttgagggcctggaggtgatggaaacctactcatgagtgttgggatgactgcagcttgcacacaccagtctggtaatcccgtgcaactctcctcctgc

SEQ ID NO: 9875 - DNA, 6000 bp, Homo sapiens
ttttttcatatgtataaccaattgttccagtactatttactgactcttcttgctttccccacggattcgtaaggttttctgtcacagatcaagttacatggatgcaccagtctgtttgggggctctttattctattgcattggtctatcaatccgtgcgcaagaatatgctgctttacgatacagtagtgtcttcacactagctaactagctagctgttataaagatggacaagtcactttaccttctccttcttcctcttcctcttcttcttcttcttttttaatctttgaattaaaaaaaaatacggcggggtgaggtggctcgcgcctgtaatcccagcactttgggaagccgaggcgggcggattacctgaggtcgggagttcgagaccagcctggccaatatggcgaaaccctgtctctacttaaaaaatacgaaaattagccgggcgtggtggcggacgcctgtaatcccagctactcgggaggctgaggcaaggagaactgcttgaacccggaaggcggacgctgcagtgagccgagatcgcgccattgcactccagcctgggcaacagagccagactccttaaaaaaaaaaaaaaactcataatacctactcatagggctgtaatggagattaaaggaaacaagaatggtatgtaaagcatcggatacaaggtagggaagaactcaacagtggcttttatttaatgatgctgaaggtaccgatgaaacagagaaataaagggatcaatctttctgggagcttcagtttcatttataaaaagaagaagatgagttagcataacatttctaaggctcttgccacttctaagactgtgatcctggcattttattatctagagaccaggcagcgagacattgatgggcagttggtgttaaagtgagaaaggcggtatctgcgcagactgcagggtcgaaccatgagcaagcaatcgtatctgccacaacagataagaactggggctggccggcctgacgactctcaacgggttagacgcgggctacgatgaccttcacgatcttttctggcagctacacggccacgcagggtgggactgctctgcctacgaacagcactgtgtgcgaacacagggccacggttaagcctcccggctgcctcccccagggaacacgacccctgagaagattccagacagtctcgcagaggcacggggaaggatggaacagagccgggagctcggtgggaagaggggcagcccgcaccgcccccgggatgtcaccggcgcttctgggaaatgtagtccttcgccgcgtccgcagccctgggcactcggaaggaggactacagttcccttcagccttgggaatgctttgtgcagcgcgcttgcgcggtgtggcggccgatgccgctataaaggcttgttttgctgcagggctcatgctcgggagcgtggttgagcggctggcgcggttgtcctggagcaggggcgcaggtaggtgatggctgctgccgcacccctgccctccagctcggttgtcacggggatcacccctttgcatttcctcggggcgtggcgggatgtggccagggctgcgagcagttcgggggacactggagacttggggaacggcgtatggcctccccctggtctcctgccgccgcctcctaggcctgtgagcccggggtctggtgacggggtcgtgtgctggaagacaggcaggtaggatcgggatgagcgggcagggacgcgggctacgtccctggccgcggccgccagggggcgctgcgcccgcgggccgtgggtgtgggtcgcgctcgcctgggcaggccggagcgggctgtgggaacgccctagggcccgggcatcccaggcgaagcgggtctgagagaaacgcccacctgggaggctgtgcagcgggtggctcggggcaccctgctcaacccgcagcggagccgccagcgaccttcgaagtaagtcatccccttcgtttttgcaagcgggtaaatggaggtacgtgacataagcacgcgcagcaaagccgtggctgtgccgggaacgcagcccagatctctccacggtcatccagtgctcttttcgcttctgccacacagagccgcgggtggctttgtgtttatcacacaggggccatttggtttctgcacagacggagaggctggaggcaggtgggcacaggaacgacggggaaagtttcaggaggtcttggaggaggagatggctaggttttactgtggtccgcagcgtgtatgaaaggtgaggctgcttggagacgcaacaagtggattacagtgggtgtggtaaatacgtatccctttagcgtggtgtcttcctcgtgcagcttgagggcctggaggtgatggaaacctactcatgagtgttgggatgactgcagcttgcacacaccagtctggtaatcccgtgcaactctcctcctgccatgcagttgaatcagtatcattgtgcagggagagtgtctacacttttatcagtggaaagagaatcttggtaaaaaagggcagctgactaagtggcctcaaccctattgggcacttctttggggttctcccacgttgattattctgcttctacccttgtacatgtctggacaacaggtttgttttttacaaacaaaaatcccttctctttcttcctctcttgatagctgaggcaagtgagcatttaaaaaagatattccaacaactttaaaggaggacacgagaagatagggaaatataaatagtatcagtaaaatggctggcctggggatccatccttgcttgcttgcttgcttcagactggggctttgtttctttccaaacctgtcaggattcccagctcttcgccggcctccacgtggggtgccctcttttatgttccagatacacagacgatggtgtccttatgttcaaggccacagacagtaactttgtgcctactttgggcctgcctgctctcctgattgtgcctctttttccaggaaagtagagatgagtgtgttagagataatggaacactgttccccacacccttcatacatagaataacttagtcccttaggatagtttagcagtgtctaccacagcagtcactgtaggcacaaaacagtcattatttgtgtcataacagggaagtcgttttgtccctgcctctctctgctcctgtgctccactgattctacttcatcctttgaaataaaagtggttgaaagaatctttggttatcatgggtgcttagataattaagattatgttcgtgttcttcttgatgtggcatttcatattgtggatgagttccagtgacctcctctgtttcaaactgctcaccgccccaacccccaccttttaaaaaggtagtactaatcttttcctcttccagataatcagctaagctagggaacccttgaaggggaaggttagaatttcgtgattcccgtaagaaggttactctgatctacagctacagctcaacactggggacactggcagatgccaggtctgtttatagtttagccttaatgaggtctcaatgacgtgattgctgcactctggcttggtgagccgctgttctttatggtgtagtttgtcattggacaaggtgactttttttttttttttaaagataagtaacagctatatcaacttagggtacttgaaccagaattctgaaaggcaagaaatcaagctttctttggactggaaacctgtctttgcataggagatttagtcctttttattcagaggattagtaagtgttctctttttatctgacactttaaaaattgcattataatggttagaattttgtgctgcagaagtagtagttttaagtcacagcgatagccagggatttatggaatccagaaggcgacacggctacacgtctttaatttccgttggaggctagtatgaaaggtgttttctcagcttgtctctgggaggctgtgacccttcttagaggggggaaacattttggagaagtatgtatgtgttttttgtttttaagtgacctgagttgatacagcatattgattagacttagccaggcaagcagtggtttagaatagagtttcaggtaaaaactaggtaagacttagtaatacagggtggagaatttgtttttgttattgttttttactaacagctttgttgccataggatttatatgacatgaaattcactcttttaaagtataaattcagtgtgttttttttcaatgtattcactgcattgtgcaaccattaccactatctagttttagaacattttcagtacccagggaatttgtgtttgaagttaagttataacattgttttaactggataacttcatggagctttaaaataacaccagctaacccattagttaattataaaaaggcagagatggaatatatcattggtagaataagtgtttggtaagtttttatttagtaaaatttagtagaagaaatgatgtccactttaaaattgtggagtttttaatacttgggacaaactgaaattgtttctagaaagtctttaaaaaaaaaaccaacctttctattgtatacactggatttgagcttagttgaagagaatgggtgtctctttactagtgtgtttactgtttctaattttttttcccttagagttgggagaaggtaatttttcttgattctcttatactgaatctttttctttaaaaaaatgaaatcaaaatctttgaactttttttgaaaattaatttttgtagctataacagtagaaagctttagtacttttgccttttttttttttttcctatttttaaggcacttgagcttatggttaagtactgtttaggaaataatctatttcttgatgaatttttaatttcaggaattctgatgtgaaactaacagtctgtgagccctggaacctccactcagagaagatgaaggatatcgacataggaaaagagtatatcatccccagtcctgggtatagaagtgtgagggagagaaccagcacttctgggacgcacagagaccgtgaagattccaagttcaggagaactcgaccggtcagtttcctttcctaagagtctcttacctgcttgttgtactaaaacacatcttttttcgtataatgggtaatttagaaacttattttttggccgggcgcggtggctcacgcctataaacccagcactttgggaggctgaggcgggtggatcatctgaggtcaggagttcgagaccagcctgaccaacatggtgaaaacctgtctctactaaaagtacaaaaattagccaggcgtggtggcgggcgcctataatcccagatacttgcgaggctgaggcacgagaatcgcttgaacccaagaggcggaggttgcagtgagctgggatcatgccactgcactccagcctgggcgatagagcgagactcagtctcaaaaaaaaatgtgtttttctttattggctttaggttactgttaagaatttatggttattgataagtctctggtccatagtaagcactcaataagtggaagagaggctggctgtcaccctctcacccggtctgttctgagcattctcctctttttcacttttattctatgttggtgccttctgaaaaggctatacttaacagaagacaacttattgagggggagggggtcatggggtcaatgacagggaatataaagccaattaagcttcattcatgtacctaaacaaaattggtgttttcttctactttctgtcatgtgtgtttaaaatgtgaacctggccaggcacagtggctcatgcttgtaatcccagcactttgggaggttgaggtgggtgggtcacttgaggtcaggagtttgagaccagcctggccaacacggtgaaaccctgtctctgctaaaaatacaaaaattagtgaggtgtggtggtgggcacctgtactcccagctactcaggagggaggcaggagaattgcttgaatccaggaggcagaggttgcagtgagccaagatcacgccactgc

SEQ ID NO: 9876 - DNA, 6000 bp, Homo sapiens
tggtggcacgtgcctgtaatcccagctactcaggagactgaggcaggagaattgcttgaacctgggaggcagaggttgcagtgagccgagatcgcgccactgcactccagcctgggcgacagagcaagactcgtctcaaaaaaaagagcatgaaagagaagtacaaaggtattagttctatggttcactgtcatcaaggccaatgtttctgcaaatctcccagccttaccttcaaggctgagagaggttttgtaagcgccaagcattatgtcctcattcaaggcagggagaatcaagaagaggaagacagtagagccagcagctcttgtcctcttttaccaggaaaacaaatgctctctcagaaactgcccttccctagcagaagtttgcttctgacccttggccctcattaagttacatggccgccactgggtataggaaaaactggaaaggcaaatactgtttgcctcttacagccttcatggaagaggcaggcaaggagaaagaggggtggggatgaatgcggagcaggcagagtttcttgacaagtgggcagtatagatggtaatgtcagtgcccagtatcagagatgttttctcttgggctggtcagtgtctcaatgtgaaattccccagccccctgcctagtgggaagtgcacataagagtcagagttccagcgcccagcagaaggaggaaaccagggttctcactagaccctcttactttcagtaaggctcctcaagcctgcctccactgtgccagatgccctccatctagagctcacagatagccatctgcatgaggcaggaccagcctctgctggggagggctgggcaaggcgtttctgggtctgctggcttttgtgtggcctttcccccaggcctcctgttctcagccccaacctgcacctccaccatctaagatgcctcctggtcctgactgtttatggatccgagaccccacttgcttctttgtccacctccacccctggaattagcacagtgaagaaaacagaaacacaagacagttactactcttccagccatttaccttcttcaatctctcacctcaaggggaatggattaataaagtgctgtggatgcagaacacagaacattctgcagctatcagaagcaaagagccagctgcctacaccacaacacagatacagctcaaaagcagggtgttgagggagaaacataaggaaaagaaggaaatctagaacgatacccatttatataaatgaaaagcacatacacaccaacagccattaatcataaaaaatgtgctcaatttcattagtcatcagggaaatgccaattaaaaccagaatatgaaacctctgcacacccactgaaggagataaaatgaaaatgacaaaagtattaagtgttaaaggatgcatgcattcactgctggtggagtgaatactggtggaaccactgtggaaaactgtctggcaacatctgctaaaagcgaacacacattatcctatgactcagcaattccactcccaaatatgtacctggcagaaatgggtacatatgttcatcaaaatttatgtactagaatgttcataggtgtgctactcatgaaccccaaactagaaactacccaaacacccatcagcagtagaatgggtaaagtctggtatatgcatacaataggatgctgtacagcaacaagaatgaatgaactacaacaacaagcagcaacatgtgactctcatgagcgtaaagctgatcaaaagaagccagacacaaaagagctcctattatacaattccagtttaaataaatatcaaaaccaggcaaaactagcaaggggaattcgatgtgactgtagtagttaactctgggtgggtgtagcggtggtgacagaaaggggcacaaagaggtcttctgtggtactgataacgtttggtttctgtgttgtgctgctcacacggatgtgttcaacaacagaaaaccctttcaagtgaacacttaggatttgtgcagttttccattatgtaggttcaatggaagtaaaacataaaaagaaaagctttgggctgttagaagagaaaatgcatatgcacaaacaacaatactacctgttttacaaggatgtgcacataaagacctactttagctcctagaggggtgcctgtgtggagaaggagatggcagtggagtgatgatgggggaagaaataaaacaaaaacacaagagaggagtaatgatatggttaacccagctttgaacctgaggcaaagtaaaggcaaaccctgggcgaaactgaggggcgaataaaggacatactagtttttaaaaacatttatctctgacagctgacaacatgttcctgttattgctttaattaaatagggttggccagacatggtggctcacgcctgtaatcccagcactttgggaggccgaggtgggtaaatcacgaggtcaggagttcgagaccagcctggccaacatggtgaaaccccgtctctactaaaaatacaaaaaattagctgggcatggtgacgagcacctgcaatcccagagactcaggaggctgaggcaggaggattgcttgaactggggaggcggaggttgcagtgagccgagatcacgccactgcacttcagccctggaggcaatgcaagactccgtctcaaacaaaacaaaacaaaacaaaacaaaaaatttaaatagggtctggcaaagagaagggagtagccaagatcttggcaagggctctttgtaggaagtgcctgtctccagacacctgttgcctgtctctgcactctgaggcctctctaggaccacaaggtgtgcttttatggatgaacttctacaggttcagagctctggttccccatcccctgggcttctctccccctgtttaaattcagggtgcatgtagacttaccaggctcagcccacctctcctgctggcaacatccagttgcccaatactaaacaggagagtgaaaaccccacttctgctacatatggacggaagggaggcaggtatccacccctactcccagcagcttctatcctagccttgtctcctgcttgacccaatgtcagtttgcaagtagaagcttcattctgaggccgagaagcccgtgatggaagttcttaggggaggtaggaccttcctgctactgtactctcctgcctggtaggtgtgactctgggaaggcggctgcacgtgggttgaaacgttgacactgcctgcacttccccttctggccgatagtgggagctgctagccaacctgaggctcgtcaggcgctaaaggctggcagccgacctgtgtggtccatccgtctgtaccccagacaccccactcaactcggggccggagaggcccatgtcctgaactttcctgtggactgactttcctactgatcccctcctgcaagcagagcagcccctccgtatgtacctaaggcgtccaacgaagccccacacccaggtcgcaaacggacgctgtcccccacccccctctttgccctcccacctcttcaagatccccatcatggaggagcaggtcccagcctctgggctcccaaacccagcacctctgtgccctctgagaccctggcacccatttggctctctaagagcggttcttgcttttgggagccctgaaaatgtggcagaaaagtgtaccatcccttccaatgactgtacttttttcgtgggcaaaagctgatggcctgttttttgttgttgttttgttttgtttttgtttttgtttttagaagcgcaagatttattgtgaagagggaaagaacaaagcttccacagcgtggaaggggacccaagcgggttgccctgatggcctgttttgtttaaacaagaagtgtgtccccataggtcctgggcatgggcatgggagcaactgtttgtcagcgtatgtctccgtgtgtgtgtgcctgtgaccatgtctctgagtgagaaacagtgggtgtgtaagtatgtgactccaggctctgcatgtgtcaaggtgaaggttgtatgtggctcaagagggtggaagtatatatataaagaggtatatacatgtatatatatgtatgtgtgtgtgtgtgtttgcgcgcgcgcgtgtgtgggtgtctctgtgttggttgcctgcttgcttctgggtctgggtgtgtgtttggttctgtcagcatgtgcgtccgtgtgttcaggtagatgtgtaccattgtgcagatttctgtggcatcactaagtgtgtctccaggaaagtgtggttcgagtgagtgtgtgtgtctctgtgtcagtgtgtcagtggatgtgtgtctaagtcatgtgggtgtctaagtttgtcagagtgtcttcctcagtgtcagtgtgtgtcaatgatgtgtctgtctgtgtctgtgtgggtgtgtgggggtgtgtatctgtctcagggtgcatgtgtgtgtctgtgtcagtgcaggtatgcctatggcagcgtgtgtctgtctcggcatgagtgtcagtgtatgcccgtgtccacgtgggtgggtgggtgtctggtagccttcccaagtcagcaaggttgcgtgtgtgtgtgtgtatactctggcgggtgctggtgtgtatgccagtgtttgttaatgtgagcctgtccgcgtccgcgtgggtggccatctgtggtgaagcgtcgccgggtcgccgtgtgtgtacccccgcctatgtctgtctgtccgcggccgcgtgtgcggctgtctgtggctgtgagcccccgggtcagtgtgggagtgtgcgccccggcgggcgctggtgtgtcccccctccgagcgggcggagcaccacgtgcggagccctgggcgcgtcgctctggggcggagccagcccggggccccaagccccaggccgaacccaggcggggcccgccccgaccccgcccccgaccccgcccccagcccgagcccgcgccgcctgcccagcccgggagcccgaacagagccgcggagccgagacggcggcggcgcccgtaggatgcagggatcgctcccccggggccgctgagcctgcgcccagtgccccgagccccgcgccgagccgagtccgcgccaagcagcagccgcccaccccggggcccggccgggggaccagcaggtgagcgagtgcccccgcgcccggcagccctggcccggccggagccccctccgcctgccgccgcccaactttcctccccgagggccgaagcctccagtccctgcgtgctcctccctgccccgggtccgcccagccgctccctccccgatcagtgccccagagagccggagggggagaaggggcgcagatccgcccggctggagggtatccccgggggagacgtctctaaacaccgtgcgccccccttcccttccctttccttccgggtttcccggtgcgctgtcgagggccgggggagggggagctgcggccccagcttcccggccatccctggcgcaggctcggggagggtctgggattgggacccggataccggaggccggagaccccaaggtcagagcggcgactaggcgcgccatgaatgtggttccagagagcggggtttgcgggggctgaccgagcagggctggatatgggggaggaagccacgcaccccctttctctgggcccagggggaaccgtccgctggggctgtcctctctgtgggacgagatctctgcgcgtttagaccatgtagagatctcggtgccctttgacgccctaaaggggccgcatctcctctgtctgatctctgtgcttctcgaaggggtggagatctctttgcggtgagattggagagagttctctgccctcctctctctgagccggaacagatccacgcaccctgatgggaggtggctctcgacctctgtgttatttgatcgtctttggtggcgctctggaagaaagtggaggtgccaagctttgtccgagaggccaagagctggtgggggccagaggtgtggggactgttagtggtggtgatgaggatggggggaaatgatgttggggaca

SEQ ID NO: 9877 - DNA, 6000 bp, Homo sapiens
aggagtttgagaccagcctggggaacatggaaaaaccccatcaaaaatatgaagattagccaggcgtggtggcacatacctgtagttccactacttgggaggctgaggtgggaggatcacttgaacatgggaggtcaaggctgcaatgagctgtgattgtgccactgcactccagcctggacaacagagtgagaacttgtctcaaaaaaaaaaaaaaaaaaaaaggaggcaaggggaaccaaatatcgctgttggttcatcttgggagggctgaatgcccaccgaatagaaaggcttgcttagcaggaacagctattaaacttaagggaatatacctgcaaaaactcatgcagactgtttgaaagccagggccgagcttggagctaaactagaatagatatttcttggattgtctcctcctcagccattaatccaagaagtgagtatcaggcccagactaatcctataacacatacatttgatatggctacctcacaaaggatgtgctttccccactacattcaactagactctaaaatagggattcccaattaaggttgcaaggactatagccgtcactatctgcaccttgctcatttcccagggatctagaccagaggtcaccagcagacacttcctacatgtgacttcctgcctctgtctgcccagggctttctctggccactgaagtaagttctgtagagttaaaatcccaggacaaccgtcaaccaataagggacaggactggtagataaaaccctagtatccttacccctcagtgaaacaattctgagcccagtttgcccataagagtaaatggctcataaaaatactgctttcttcttcttatgttacttttcctctcttctatgacattcctagaaatagctctcagataaactacttgcaccccaatagttttctcagaatgtcatgtaaagacactgggtaatagatgggaatatagagaaccacttcaatcaagggatcccaagtccagagctatcacttctgatgggaaagtcttaaaagaaggactggtccctcatacctacatcacatcactacaaattcccaccccaatgttgaaaacaattttgtccttagctggagggatttatggtagcccagaataattatggtcatttggcatgaagtcagtctcatagctgagtctgctttgacctcaagctccagctccaggacctggaattctggcttagtcctgttctcaatcctcaacattgcattccagtgtcactgagagaattcttgcattgttactaaacaactgagtcctgggattcaaatttggttccaaactataagtatctcttctcccctagacaaggaagagaaagttaacttaatctttgtttctcagaagggaagaattaaagacactgaagtcaacagtgtttgaatggtcattgcataaatacaccatgttaatcagaatttgggcacacaacacatagaacttctaagttagaagaaaatagaagacagatgttcaattatgtaatgtaggttgactttgaaaagttccgtaagaaacagatcaactacaaataggcaggaggagaggaagagggtgagggaaagctctcagaagaaagtaatggaggacattaaggaagaggaatggtgtcagagcagtgagtgctcctcccaggacttcaatgcatggaaggactggtgacaaccagcagagcctcctacatatgggtattgggtaccagagctgcctctagggctggtgacaataagcagtgtctatatcacagaggtattggattcaagaaatacctctaggtatggtgggagcaagcaggatctccatcataggggtatttgatttaagcactgcctctgccaccatctgcttgactttggggtgtgtgagctttaaaatgtcaatagactcaataatctctttggttccttatattcctattattggatctgtgatttttgctgcatttttctgaacaaaatgttctttagtttttcagctattaagtttcgccattatctctattcatgcaacaactatctattctgtatctagttagttccaggcactgtactaggttctggaaaatcaatgctgaacaaaatagatgtgagtccagctctcactgagcttacaatttggtagaaacaatagaaaggcaaacagaaattacaaatcagatgtttatagagaaagtgcagagagttatgggaacatgaaacaggaatcctaacatagacttcatataggtcagaaatggaagaaattgtctcaaagccaagagtacaagaataagagaggattagccagacaaaataaagtggaaagataattttaggcaaaggaaggggaatatggaaaagccttaacataaaaaagaatgggtcaaattcaaggataaacttataaaagtagtgtggctggggactaccatgctggagaggtcagcgcacagtttgggttatcttgagtgctatggagagctttagaatgattttaaataaagatatcacataaccagattttcattttagaaatatcatttggccactgttggagaataggttagaaaggactaaaggggaatcaaaatgacacatacgaggccagtgagatgacagtgattggaccagcagtatgatggagaggttagagagatatgaagagaagatattaaggaggcagaagcaacagcactagatgtttgattgtatgtggaatgaaatagaaagagcataattatggtacccaggttgtggacagacacagaaacaggctatttggggctaatggcagtaaaaagacatagaagagaggcaggtattagaaagaagtgaggagataattatgagtttagtttggggcatgctgagcttgaggtgctcatgagacactgaagtggagagatcaaatgaagatctgagccccatggacttctgagagctacagataaagactcagtcatctgcatataaatgagaagtgaagatatgggaatgatgagatgtttccaagagattgtggcaaacatacctgagtttaagtaccgttctgccactcattagtaatgtgatcttggaaattttaactttgctgctctggtatcttatttatatattagagataatacttcacaggtacagtgatagttaatgtaataatgcatgaaaattgcttaatccagagtctgaaatacagtggaatctcagtaaatgctagcgctgttgaagttgttactattgttattattctgaaaacaaaagatagagtgccattattcacaatcatgtatgggaaaagctgagaaaggagagactgagaaggagaagagagaaagttaggaaaaccaagagagtgtcatggtagccaaaatatacagtattttaaggaggaaattgtcaaaacagccaataggaccatcaagataagaactgagatgggcctggacaatatagtggtacactgcctacaaaaaaattttttcaaaactagccgagtgtggtgacatgtgcctatagcccagctattcgggaggctgaggtgggagaattgcttgagcccaggagacagaggttgcagtgagcagagattgcaccactgcactctagtccgggtgacagtgataccctgtctcaaaaaaaaaaaaagaaaaagaaaaagaaaaaaacaaaaaagacaagaactgagaagggccccctgactttagccacaaggcaatctcttgtatccctgcaaggaagcattttagtgagataggagggcaaaatccaagcttcaaagactgaaaagtgactggaaacagtgagtagaagtaagtcctttattaaaagccaatagagaacaggagagaggagggaagacctggatgggctctgcatcaagggaaagtttttaaagttggaggaaagttaagcatctttaaatgctgataggaaagagctggcagacaaggagagagaaaaaaatgaggtagatatgagataagatcctaagcagagggaaaggaatggtccttagaatgtaggaagatacctctcatgttgtaagagaagggaaggaggaaagaaggctgcagacacaggtgagttggaggtttgatggtatgaagttggcagagttctgtttttctccatgaactaggaaatatggtcattggcttactgcaagggaagacagggaatagtgagaaaagagtgtatttgaaacctcagactagaagaaactgctgactagggataccatatgattcccaggcaatactgaggttccccataacccctcagcagttcaggggaactgttctagattgacttagccttgggatttaggataagggtgagggagtggcaaaattgtggaccacaggtctaatctggttatggggaaaagtgttcagccacagactgaacctggaggtcccagagaaattggaggtcccaatgaaattctccaataatctggagttctccagtaacttggaggtccaaatgaaattcaaacaggtggagaaatgttgacaatgtcaataaataaaagattgtgataagaaagtagcatgagacttaagataaagtagactataaaccaaagtctttgatgaatatgggagagtgcctggaactcagtggtcctggaaatgaggagagagggcagcatggctaaatctggtggtggtggtaggatggtacaaagtggtgaagaagcaatgacatagaagcacatggggagcaaagacataaccctgaggcacctggaggagggttgaataaacagcctcccctgaatgccttgcaggggaatgggttcctgggaggagccaagtgtgagttcagggaggggccagatatgagggtgggagaagggctgttctgacaatcaagatgggacagatgagagggacagggccagtgggcaagctgtcacctctctgtggttatgtccactcttataagagtataaatacttcctgaagaagaatgagaagatggaattccccattggatccctcgaaactaacaacttccgtcgctttactccggagtcactggtggagatagagaagcaaattgctgccaagcagggaacaaagaaagccagagagaagcatagggagcagaaggaccaagaagagaagcctcggccccagctggacttgaaagcctgcaaccagctgcccaagttctatggtgagctcccagcagaactgatcggggagcccctggaggatctagatccgttctacagcacacaccgggtaagagctactagtaggaatgtctgctctcagctcttggagaggaagtctcggtcccacccagcccagaaagtcctccttggccctgggtgatgtggcagtctgctaaagattccgttaacaaccaaaaaaaatatatatatatatctctaacttatttgatgatctctttgaatttttatgacatttatgatagaaactaactaaacccacatcttcaaaagcagataactgctgcagagctttcagggaaagttggctgttcccttggatgacctctggcctggggcctccagaggagttgggtctctttgcaggtggagagcagacatcttgaggttgggggaggagcatggcggtgaggacagaaagcaggatgaatttaagccagtggtcctcaactatgatcttggaacccctggtgtccccaaaactgttttagtgggtttataaaatgaaaactattgtataacaatacttggatgtaatttgtctttttcacacactttctcttatgatcatacattggtgaatatagaggctattgatgggggatgatgtcatcactctaaaagctactggaatgtgtgcctgtatattcccgtgttttaaaatttcctgagttttgaatttctaatatgagatatatatacacacacatatgatgtatatatgtgtgtatacatctatacactatatatatacatacaactatgtatatacatacaac

SEQ ID NO: 9878 - DNA, 6000 bp, Homo sapiens
cattaattgttttttcagttaataaggaaattttactgcatactgcatgtggttttattttgtcagatttatttgagttcataatttttattcagttttccttttcctgggtcaatttttgcagttttcaatattactttcattttttttgggacagagtctcattctgtggcccaagctcaagtgcagtagagtgatctcagctcactgcaaccactacctcctggttcaagcgattcttgtgcctcagcctcctgagtaggtgggattacaggcacacgccaccacacctagctaatttttcatttttagtagagatgggttttcaccatgttggccaggctggtctcaaacccctggtatcaagcaatctgtctgccttggcctcccagtgggtgtaagccactgcacctggcctcaatgttacttttcttttcttttctttttttgagacagagtctggctgggttacccaggctggagggcagtggcacaatcttggctcactgcaacctccgcctcctggattcaactgattctcctgctcagcctcccgagtggctgggattacaggtgcatgccaccattcccagccaatttttgtatttttagtagagacagggtttcaccatgttggccaggctggtctcaaactcctgacctcaggtaatccatctgccttagcctcccacagtgttaggattacagacatgagccactgtgcctggccaatgttacttttaagatgtggttctttaggtgtgtgtgtgtttttttgtttttttgtttgtttgtttgtttgtttttttatcatctataacaaattttactgtgtacagtttcaggggttgtcagttttattttgtgttatatttatttttagcaagtttctctttcttaagaacccaggcaaaatatctcccagagtcaaaatggcagggtgaaagtgtccagttgcttctttaatcgccccattaggatggcagcacctgccactggactccttgctgtaactgagcatagggtccaggttttaccatccagggtctttcacagcgcatccattttacaggattgactagcatccatattgtgttcactgcaaaagacttatgctctgaattaaatgtctttcttgagctctagagtcaaatgcagcagagtctcattatatgcccacttcattcatacaaattcaattacacatgttcatgaggagggggaaattgaaatagtgcggggaattccatcatccagacctatcaataatgagcttgactctggatgaatgtgggacagacagtgatgaatctacagtcctacattcagtttcagctgacatatggctctcacagtattatcattgcttgccctaatcatagtatacttgaaggatcatacattgcctttatcatggccctgaaacacaatccaactactttgtttggggctaacctgaagaaagagtgtctggttctggccctggaagaaaagctggttgtattgaactcgtttaagtaatgaattgggatgcctcttcagtatggtgccttcctgagggagtttcaagagaaattttggctacatttctttgctttcacgctgttttcagagcctgacatgtgtgaactatgatttccctatattcgagtgccttttggttctctccacttgcaggttccccaggcagcttcagcttcgtgtgttgcaaaccaaatttattccctcgcagtgccctccttttcttgcactctctgtctcagtgagtggccacactgtcctctcatctgctcaagccaggaatctcggtaaggaccatccctcaagtctctctcttcccattaatctcatgtcaaggctatttattaactctcaaatccatgcatgtcattagatcatcccctgtaatttgatttgctacaagagtttccaagctcacttctctgattttagcctcccctttatcttcctatctcaagccttttcaatccccaacagttagagggactttttttttttaacttgtattttaagttcaggggtacacatgtaggtttgttacataggtaaacttgtgtcatgggggtttgttgtacagattatttcgtcacccaggtattaagcctagcacccattacttatttttcctgatcctttccttccttccaccctccaccttcccatgggcctcagtgtgtgttgtccccctctatgtgtccatgagtttctatcatttagctcccacttataagtgagaacatgtggtatttggtttcctgttcctgagttagtttgctaagggccttccagctccatccatatccctgccaattcccaatagttagagtggcttttctttaaaaaaacaacaacaacaacaaaaaaaaacaaatctgatagtgtttcgcctctgcagtaacaacaacagcaatgaaaacccaaacctttagtaattccccattaccctcaggggaagtccatgatctttaccaaagattacaggcctgcccactctctccctctgctgagtaaagccctattggccattccactccatgaaatccccattcctggcaaacagaaccagttgctggacatcatgttctttctcagctgagggttcctgtacacactatttgctctccctggagcatcctagtgtccccctttttctcttgtcctaagtcttacatctccttcaggtctcaatttagacattaaaggtttggacaacagtccctgattccctgttgagacgcctatcctatgatgagacacctatcctatgcatagacatagccccactacttctctctgtagtagcatttgttctattttagtttcctgtctttgtcttttctactactccaggacagtgtaactgttggaccagggactgtgtttcttcaccgttagtgcctagcaccatgcctagaacagacacagggcatataattgttgaaggaacaaaccagtgatatgttgggtttcttactataatttcctggagtgggtgtaagagtcagccctagattagcatccagtaaataagaaagaaagaggatggctggcatggggaaataggcattcaacctgaatactactgcttcttttcagtgtctagtttgaaccctgtggctgtagagaaagtcctcaaagaagctattatcctatggtagagtaaccctattaacaaaccctttctgcttttgtgtccggaattggtgggttcttggtctcactgacttcaagaatgaagcctcggactctcgcggtgagtgttacggctcttaaggcagtgcgtctggagttgttcattcctcctggtgggctcgtggtcttgctggcttcaagagtgaagctgcagaccttcgtggtgagtgttacagctcataaaagcagtgtggacccaaagagtaagcagtagcaagatttattgcaaagagcaaaagaacaaagcttccacagtgtggaaggggaccccagcgggttgccactgctggctccagcagcctgattttattctcttatctggccccacccacattctgctgattggtagagcctagtggcctgttttgacagggtgctgattggtgcgtttacattccctgagctagatacaaaggttctccacgtccccatcagattagttagatacagagtatagacacaaaggttctccaaggccccaccagagcagctagatacagagtgtcgattggtgcactcacaaaccctgagctagacacagggtgctgattggtgtatttacaatccctgagctagatataaagactctccacgtccccaccagactcaggagctcagctggcttcacccagtggatcccgcaccggggccgcaggtggagctgcctgccagtcctgcgccatgcgctcgcactcctcagcccttgggcggtcgatgggactgggcgccgtggagcagagggcggtgcttgtcggggaggctccggccgcacaggagcccatggagggagtgggaggctcaggcatggcgggctgcaggtcccaagccctgccccgcgggaagtcagctaaggcccggtgagaaatcgagtgcagcgccagtgggccgactctgctgggggacccagtacaccctccgcagccactggcccgggtgccaagcccctcactgcccgggccggcagggccagccggctgctccgagtgcggcgcccgccaagcccacgcccacccggaactccagctggcccgcaagcgccgggtgcagccccggttcccgctcgcgcctctccctccacacctccctgcaagctgagggagccggctctggccttggccagcccagaaaggggcttccacagtgcagcggtgggctgaagggctcctcaagtgccgccaaattgggagcccaggcagaggaggcgcctagagcgagcgagggctgtgaggactgccagcacgctgtcacctctcactttcttagggtcgaagtcctagaagtgagagagccggcatgggggtcgcagttcatgcctatgtttatggctcttttgttcccatttcatcacattttaagaactttactgactggatgtgagaaaagacccatgcactttcagttttgcttttgcaatccataactatggcccagtcaattccctgttcctttttctcttgtttgggccatgtggccacttgcctgctacttgcagatcccacttcagcagttcagccggctcagccttattgtcttgcttaatgtctgggtctcagttttagagactgggcttcttctgctcacttgttcctgaactcaacttcccgccttttgccaggtcctccaggaatgatgccctgctttggttttgtctatgccaaaagttcctgctatacccacagtggtggtcatctcttctgatcttcacagccaatcagctcccaaggcccctgacctcagctcagcttttgtagatccttatgacaccatcctttaagactggaatcctagggcaggctgttttattcccgcctcctgaggcctttctgaggatctgtggcttgtctctgtcctgagggtgaagatggatgacagatgctacccagtaatctttccagatgagcggaatttccgccccttcacttccgactctctggctgcaattgagaagcggattgccatccaaaaggagaaaaagaagtctaaagaccagacaggagaagtaccccagcctcggcctcagcttgacctaaaggcctccaggaagttgcccaagctctatggcgacattcctcgtgagctcataggaaagcctctggaagacttggacccattctaccgaaatcataaggtacttcattgggcggggggggggggtgggggtgggggtgttctaaccatgcagttgtaactggtgttacaggttctccaaacaccactcttagggtttatagcaggcaggctgtgcctcttctttgctgtcatcccctggcattgccttgatagtcctgaaaacccctttcagtcctcattttttctctgcaatgcatgtattagaggagaagatgaggatgagggactgcaaaaggataaaaggaaaacagagaaaacacaaaatgaagtctggaaagaggactggactagtagtcccagaagttagatacaggccatttcaattgattggctttatgactctgggcaagtcactttactaatcttcacttttaaaatctgtataatagaaataatgcctgatgttcctaccttagagcatagacatgctgggaaagcactttatcactataatgcattatactgatacaaaggattaatatcatggtccagaaatgctcattatagcaacaagattttaccttaaaaactcttggataataggctttctaggctattaaatgagactaatagggctcaaaccaacaactgatgcatagtaggagctcaataaatgaaacctaagaaaatggtaaccaagtgggcacatgcagattc

SEQ ID NO: 9879 - DNA, 6000 bp, Homo sapiens
tagcccagcccatagttggtgctcaagaatgatctgttggttgaatgaggaatgaagaaattagaccagcatttggtcccattggtgaagccctggagtcacagcccttggattcaaacccagctcaccacttaatcagccatatgactgggcaggtcccattggtgaagccctggagtcacagcccttggattcaaacccagctcaccacttaatcagccatatgactgggcaagtcacttaacttctctgtttgcctcatctccttatctgtgaaatgcagatagtaagagcccctgcgtgtctcagcacagtataccacatcctctctaaactatactgttataccgggtatacgctctacacctccctaaactctagccttttagctattgttattacccaccctactcttctccttaaagggggaagtgagagattattttcaggacccgttttctccccagggaaatgaaaagcaaagaagctgaaagcctctagtgacctgcaccccttttgcctgccctagggttggggcatggggcagtcaatgtgggaaccaaaatggagagaagagtgatgcctgagggtgttggacaaatgggatactaaaaccttttgtgccaggcgcggtggctcacacctgtaatcccagcactttgggaggccgaggtgagtggatcacctgaggtcaggagttcgagagcagcctggccaacatggtgaaaccccgtctctactaaaaatacaaaaattagctgggcatggtggtggcgcgcctgtaatcccagctactcaggaggctgaggctggagaattgcttgaacctgggaggaggaggttgcagtgagcagagattgtgccattgcactccagcctgggcgacaagagccaaactctgtctcaaacaaagaaaaacctgttgggaggggtacatttcagaaccaggttcactcactatctggaaatatgcatgatttattattggctctagtggagttgggagctgagaattggaaaacattaaagatggtaatggtcatcatgttactcacttccattatcacttaactgcactcaggggtatttgagagggagcatgaggagagtgagatacaggagtttggataagatgggggttcagggaagaaggaccagacagactacagaggaaagaaaggtgttcttctcgctagacatgaaccaatttttttgtgaacagacaattaaaatgaattactttatggcaaaagatcaaatgacaaacatgcaagcaaacaagttttagtgtcccatacgtcacacaattaactagatataaaggcagttgtgttgtcatcaaagcaaactactgtatcccattttcatttctgaaatgcacaactgaattattgctatttcctcttgctgaacttgatgaactatgttgacttaaccttatttgctgtttcaaaataagttgttaaataatgttgtaattaaaaaatagaagagtaaaaataattaccaagggtctcctctgtaaccaaaacgaattacagggaaatattaatatagtgtacttcatgtttagacattcatttcacatacacccgtgaaatgaatgtcagatgaattatgaagttttgatgagccacagcatgtttctaaggaatacttcttgcaaaagtttcagtgctggagggagaggctgctggcttctgtggggatcacacccaggtgagtgtgttcaggctgtttgtaattgagtttgcctcaggctaagccagaagctgcctgtagccatgtgtcgtacttgggctgggtgggaaagtcagtcctatctgcagtgaagagaatagaaggtggtggatattgccttgattatgaataaaacagctcaaggtaatacactggttagaagcggacatgtattactggcagaaaaaggaatcaatatgctttttatccatcttcctgactagaaagcaaactagatcatacttaagtgctttgaggtccttggatgaaagatgcttgtaaatacaacaaagttaattacaaggctgtttatggtctgagaaaactggaaacaacctaataatattcaataataaggaaatggttaaggaaatatggcatatctaattgatggaacattatgtagccaataggattacaaagaattgttaatgacatgggaaagtgcttattatgttaagtgaaaaagataagattaacaaaaaaatctcaaatcatatctaatgtgatctcattctgtttaaaacaatataggccaggtgcggtggattatgcctataatctcagcactttgggaggccgaggcaggtggatcacctgaggtcaagatttcgagactagcctggccaacatggtgaaaacccgtttctactaaaaacaaaaaaattagctgggcgtggtagccggcgcctataatcccagctacttgggaggctgaggcaggagaattgcttgaacccgggaagcagaggttgtagtgagctgagatcatgccactgcactgcagcctggatgacagagtgagactccatctcaaaaaaaaaaaaaaaaaaaaaaagaaaagaaaaagaaaaacaaaacagaaacaaaaaacaaaaaacaaaaaacctaatatagagcaggaggggattaacccagcaaaccaagtgcacaatcattacctttaagtgttgtgggtgagtttttgttctcttctgtacatttttttttgtatttttcaagtttcatacaatgagcatataaaaatatattactttcatgaatcatttgacatttgttgaggaattctttgtggctaagtttgtagtcaggtcttgagaggtgacaacgtgctggcagcccttgcagccctcgctcgctctccgcgcctcctcggccttggcgcccactctggccgcgcctgaggagcccctttctgggctggccaaggctagagccggctccctcagcttgcagggaggtggggagggagaggcgcgggcgggaacccgggctgtgcgcggagcttgcgggccagtccgagttccaggtgggcgtggactcagcgggccagcactccgagtggccgaccggcctacaagccacggacagtgaggggcttagcacctgggccagcagctgctgtgctcaatttctcacagggccttaggtgcctccccgcggggcagggcttgggacctgcagcccgccatacctgagcctccccccgcctccgtgggctcctgtgccgcccgagcctccctgatgagcgctgccccctgctccacggcacccagtcccatccaccactcaaggtctgaggagtgcgggcacacgcacaggactggcaggcagctccacctgtggccccggtgcgggatccactgggtgaagccagctgggctcctgagtctggtggggacttggagaacgtttatgtttagctaagagattgtaaatacaccaattggtactgtgtatctagctcaaggtttataaacacaccaatcagcaccctgtatctagctcagggtttgtgaatgcaccaatcgacactgtatctagctactctggtggggacttggaaaacgtttgtgtccacactctgtatctagctaatctagtggggatgtggagaacctttgtgtctagctcagggattgtaaacgcaccaatcagcaccctgtcaaaatgggccaattagctctctgtaaaatggaccaatcggctctctgtaaaatggaccaatcagcaggatgtgggtggggccagataagagaataaaagtaggctgccccagccagcagtggcaacctgctcaggtccctttccacgctgtggaggatttgttcctttgctctttgcaataaatcttggtactgctcgttctttgggtccacgctgcctttatgagctgtaacactcactgcgaaggtctgcagcttcactcctgaagccagggagaccacgaacccatcgggaggaatgaacaactccagaggcgccgccttaagagctataacactcactgcgaaggtccgcggcttcattcttgaagtcggtgagaccaagaacccaccaattccggacacagtttcataaatgttccatacatgcttgagaataatatatattctgtagaagtgagtattctatatttatcatttagataaaacttgttaattgctttacttaaatctattaccctactggtttgttcaggtcaagctatctaaattactgggggagtgtataaaaatacatcataatctgatagtggattttgtctatttcttcttgtagtttaatcagtgaaacaatgctatcaggtacctacaaattagcattgttacattttccgtgtgaattgagcctttaatcagtgttaaaacacttatttttaaatttctaataaagctttttaatttttaacattcatgtttgctttttgttacattttgcctataaatttcaccctttttgtatctgtgttttagatgtatcttttgtaaaaacatgcatatagatagttctccatttacagtgggattacatcctgacaaatccatcataagtggaaaatactgtaagttgaaaacttcagagtattagctatttaccctcatgattgtgtggcagactgggaactatggctggctgccactgcccagcatctcaagagagtagggtactgcatatcgctagcccaggaaataatgcaaattcaaaatttgaggtacagtttctactgaattcatattgctttcacaccatagtaatgtaaaaaaattgcaagtgtggggcggggcgggccatggggcgggcggaggcgcccgagccccgcttcccccgcgccattccacccccggccaggctcagcccgcggccacctacgccccgcccctgccggctgcgcccgagcccagtcccgcgagccgctccccggcgggctggctcttggccccggaagcgcgagcgttcacttcgcggcgagtggctccgtctccgcggacagagcgcgcgccccctggcccggcccgcgggggggggctccggcacggtccccgagcgtttcccgccgggtggagcgggccgagcccagcaggttgaccagccccgcggccacgcagagccgggagatctactgtttgagcgcggaagcgcagaggctggcggaggcccggctcgccgcaaaacgggaggcccgcgcggaggctcgtgagatccccatgaaggagctggagcggcagcagaaggaggtagaagagagaccagaaaaatattttactgagaaggggtctcgtaacatgctgggcccgtctgcagccacgctggcctttctgggtgggacttcctctcagagaggcagcggagacacctctatatccatcgacaccgaggcgtccatcagggaaatcaaggactctctagcagaagttgaagagaaatgtaagaaggctatgttttccaatgctcagttagacaatgaaaacacaaacttcatttaccaagttgacaccctgaaagatatgttgctggagattgaagaacagctggctgaatataggcggcagtacgaagagaaaaacaaataatttgaaagggaaaaacacgcccacagtatactgcagtttcagtttgctgaagtcaaggaggccctgaagcaaacagaggaaatgctcgagaaacatggaataatcctaaattcagaaatagttaccaatggagagacttccgacactctcagtaatgtttgataccaagatcctaccaagatgacgaaagaagagttaaatgccctcaagtcgacaggggatgggaccctaggaaagccagtgaggtggaggtgaagaatgaaatcgtggcgaatgtggggaaaagagaaatcttgcacaatactgagaaagaacaacacacagaggacacagtgaaggattgtgtggacatagaggtattcactgctggtgagaataccgaggaccagaaatcctctgaagacac

SEQ ID NO: 9880 - DNA, 6000 bp, Homo sapiens
caataaatttaagaaaattaaaattatatcaagcactctctcagaccacagtggaataaaactgaaaatcaactccaaaaggaaccttcaaaactatgcaaatacatggaaattaaataacctgctcctgaatgacaactgggtcaaaaatgaaatcaagatggaaatttaaaaatttttcaagctgaacaacaatagtgacatgacttatcaaaacctctgggatacagcaaaggtggtgctaagaggaaagctcatagccctaaatgcctacatcaaaaagtctgaaagagcacaaatagacaatctaaggtcatacctcaagaaactagagaaacaagaacaaaccaaacccaaacccagcagaagaaaggaaataagatcggagcagagctaaatggaattgaaatggaaaaaaaaaaatacaaaagacaaatgaaataggccgggcgcagtggctcacgcctgtaatcccagcactttgggaggccgaggcgggcagatcacaaggtcaggagatcgagaccatcctggctaacacagtgaaaccccgtctctactaaaaaaatacaaaaaattagcccggcgtggtggtgggcacctgtagtcccagctactcaggaggctgaggcaggagaatggcatgaacccgggaggcagagcttgcagtgagctgagattgcgccactgcactctatcctgggtgacagagcaagactccatcacaaaaaaaaaaaaaaagaaacaaaaagctggttctctgaaaagataaataaaattgatagaccattaaaaagattaatcaagaaaagaagagagaaaatccaaataagctcaattagaaatgaaatgggagatactacaattgacaccacagaaatacaaaagatcattcaaggctactatgaacacctttacacacataaactagaaaacctagaggagatggataaattcctggaaagatacaacccacctagcttgaatcaggaagaattagatactctgaacagaccaataacaagcagcaagattgaaacggtaataaaaaaaatcaccaacaaaaaaagtccaggatcagattcacagctgatcctgtgacatttaaagacatttaaagaagaatgtcactattccacaagacacagaaagaggaaatcctccctaaagcattctatgaagccagtatcaccctaataccaaaaccaggaaagaacataacccaaaaaaaaaaaaaaaaaaaaaaccaaactacagaccaatattccagatgaacatagatgtaaaaatccttaacaaaatactagctaattgaatccaacaacatatcaaaaagataatccaccatgatcaagtgggtttcataccagggatgcagggatggtttaacatatgcaagtcaataaatgtgatacatcacataaacagaattaaaaacaaatcacatgatcatcttaacagacgcagaaaaagcacttgacaaaatccagcatccctttatgattaaaaccctcagcaaaactggcatacaagggacataccacaatgtaataaaagccatctatgacaaacccacagccaacacaatactgaatggggaaaagttgaaagcattccctctgacaactggaataagacaaggatgcccactctcaccactcctcttcaacatagtactggaagtcccatccagagcaatcagagaagagaaagaaagaaagggcatccaagtcagtaaagaggcagtcaaactgttgctgtttgctgatgatatgattgtatatctagaaaaccctaaagacttctccaaaatgctcctagaactgataaaagaagtcagcaaagtttcaggatacaaaactaatgtacacacatcagtagccctcctatacaccaacagcaaccaagctgagaatcaaacaaagaactcaattcctttgacaatagcggcaaaagtattttgttttattagaaaaataaaatacttaggaacatacctaacaaagaaggagaaagaactctacaaggaaaactacaaaacactgctgaaagaaatcacagacgaggcaaacaaatggaaacacatcccatgctcatggatgggtagaatcaacattgtgaaaatgaccatactgccaaaagcaatctacaaattcaatgcaattcccatcaaaataccaccatcattcttcacagaactagaaaaaataatcctaaaatccatatggaaccaaaaaagagcctgcatagccaatgcaagatgaagcgaaaagaacaaatctggagacatcacattacctgatttcaaactatactataaggctactgtcaccaaaacagcatggtactggcataaaaataggcatatagaccaatggaacagaatagagaacccagaaataaacccaaatacttacagccgactgattttcaacaaagcaaacaaaaacataaagtgggggaaaagacaccctattcaacaaatggtgctgggataattggcaagccacacgtaggagaataaaactggatctgcatctctcaccttatacaaaaataaactcaagatggatcaagaacttaaatctaagacctgaaactataaaaattctagaagataacatcggaaaaccccttgtagacattggcttaggcaaggatttcatgaccaagaacccaaaagcaaatgcaatgaaaagaaagataaatagctgggacttgattaaatgaaagagcttttgcatggcaaagggaagagttagcagagtaaacagacaacccacagagtgggagaaaatcttcataatctatgcatctgacaaaggactactatccagaatctacaatgaattcaaacaaataatcaagaaaaaaaaaatcctaacaaaaactgggctaaaaacatgaaaagggctgggggcagtggctcatgcttgtaatcccagcactttgggaggctgaggcaggcagatcacctgaggtctggagttcgagaccagcctgaccaacagggagaaacactgtctctactaaaaatacaaaattagccgggtgtggtggcacatgccggtaataccagctggtcggaaggctgaggcaggagaatcacttgaacctgggaggcggaagttgcggtgagccaagatcacgccattgcactccagcctgggcaacaagagcaaaactctgtctcaagaaaaaacaaaaaaacatgaatagacaattctcaaaagaagatacacaaatggccaacaaacatatgaaaaaatgctcaagatcactaatgatcagggaattccaagtcaaaactgctatgccgtatgtaccaccctacttccgcaagaatggccataatcaaaaaaatcaaaaaataatagctgttggtgtggatgcggtgaaaagggaacacttctacattactggtgggactgtaaactagtacaccactatggaaaacagtgtggagattccttagagaactaaaagtagaactaccatttgatccagtaatcccactactgggtatctacccagaggaaaagaagtcattacacgaaaaagatacttgcccatgcatatttatagcagcacaattcgcaattgcaaaaatgtggagccaacccaaatgcccatgaatcaatgagtggataaagaaactgtgatatatatatatatatatatatatgtggtatatatatatgtgatatatatataatgatggaatactactcagccataaaaaggaatgaataaatggcattcgcagaaacctggatgggactggagactattattcttattctaaatgaagtaactcaggaatggaaaaccaaacatcgtatgttctcactcacaagtgagagctaagctttgaggatgcaaaggcataggaatgacacaatggactttcgggactcggggaaaggttgggaagggggagagggataaaagactacaaaattaggttcagtgtatactgctcgatgatgggtacatcaaaatctcacaaatcatcactaaagaacttactcatgtaaccaaacaccacctgttcctcaaaaacctatggaaataatatggaaataaaaatttatatatttgtataaattatttaaacataatataattatatatctatatatcctttataaatgagagttcatttccagcctaaaatgagtacaacatacaaacccacgagtctggctctccattgtgctttaaagcatagtgcaccagaatatgaaatagctggacaattccacaaaggatttcgactaaacattaagtcgtcagagactcaattaacatactgctccatatttgcttaattaccttaaaccagtaccctgggtgtggaaagggacgattgagcgaagtcttcctcagactgcggttcacctcaccagagcgaaggaagctgcagcgggctccaggagcccagtgcgtccccaccgcaggccccacccacccacgccccgcttgccgcaggccccgcccacccaagcccgcccttgccgcaggctcctccctagtgtcgtcgctacagaggagcagaggatgacgtgaggacagagtcgcgaacatctcctcggagcgcagctgggccagcggttcccacagccctggagcccaacgtgcgcagaagcgcctcttggagctcctctcccacagatctctcgtcctcttcctgggctaggccgccccaggcgcggcccctgcgactcctggcacggccccgtgctcggctgccgccctggcgcgcgccacactgtcgtccccggacgggcgcggaccggctcggccggggcgccggcggctggggaggggtcgctggccccggggccgcgcatgcgccgccaccaacttggggctgtcagtggagggcgagtgctggttctcaggggaggcgacgcccttcggggccaacgggcctcgagccgaggcagcagtgggaacgactcatcctttttccagccctggggcgtggctggggtcggggtcggggtcggggccggtgggggccccgcccccgtctcctggcctgcccccttcatgggccgcgatgatggcggccctgtacccgagcacggacctctcgggcgcctcctcctcctccctgccttcctctccatcctcttcctcgccgaacgaggtgatggcgctgaaggatgtgcgggaggtgaaggaggagaatacgctgaatgagaagcttttcttgctggcgtgcgacaagggtgagagttaggcccctttctcctctggacgcccctgtcctccagacctttagtcctctcccccgcctcaacttatatcggggcattccctctgtctcaggcgccgagtgtcttcccgcctcgcctgctgcctcaggcggtcttctcctcaccgcctctgccctgtgagtgtggagctggcgggagagtggagctggggctgcgccctcggagcgctgcaccgtcgggggtggctctggccttggggtccggggtttaggtagcgccttgggagccccgaccccagcgttttagcgccgcccttgctactgaccgcatgaatgacctggtcttctctctggctcgcagttcattccttccgggagtcgagaggctagtttccgacactccagtcggaaaattccgtcaccttaccttaggatgcctcgtatggagggttctcatcacctggtttttgtttttcttaaaaacaaaaccagaccctctattatttagcttcacctgaccagtgctttagccagtgactgttgactggcattaataacggaatatcctaggtggagatacatgaagtaaggacgggacggaagaaattctgccttagttgccaaaactttctctggatttacggaacgcctttgattgttagtgctttttattggagagaaagatttattgctcccagatctttctttgggagataaagatagtgaaaaataattacaggaattacaaggcaaaaatatgtggaatatatttagcg

SEQ ID NO: 9881 - DNA, 6000 bp, Homo sapiens
aagataaagataaaagaaaaaaaaaggcaggaaggacctaggaatcactctaaaatcactaatgactttctggttacagataccatatattgccaacaaatgtctttatcagtttttaacactaatctaatatccatacaaacacacgcatgtgtgttggtgtttgaatcagaaaacatatcatgaagatactaaaaatagaaacattgaagaattacataatttgtgtgccaagtgctttacatgcattattttggataatccttacaacaattctacaaggtagggagcataattatctccatcttgcagtggtgaaattcgaagtttaaggagattaagtgacatgcaccgggcaataacaatttgtcaatccaggattcaaactcaggcaatctgattcgagagtcccagcccttaactacataccaacaaaagaaaaagtaaaaaacaaaacttcttgctatgtaattgcttttgagatcaaatggtaggggatgggtttatttccttaagagggtttgattggtatagtgggaaaaaaatgagcaaggaggtttggctcattcgtctgtatttacagattgtgataaatgctgtttgtgtaacaattcattttgttaaaatgcttaggctttttgtaaaactaactcacaggaatgaggtaataatggccaactgataaagtgtagccatgaaaataatgaaaagaacccacaatagaacctatttaaaattaatctcgtactataaataccaaatattggaagtgaaaaatgcttagttattaccattaggattctgatattaacctcagcaaatatagttaggaagtggtgcccacagccttgggatacaagagagtatataaaacattatgttatgtaaattataatggagaactttatagaatcatccttatttcttttttattcttcgcttgtcaaaatcatatcctatatcaagttaggttaacgatgtaatctcatgaaaattaacaggacccatttaggtactttcacaaatattgaaatagatacttatttctcaactttcttaggaaattccagacaaatttcaaagggtttaggttgtcaaattagacaaacttgtgcaagttgggcatggtacacctgttaccaagaatcagatgcatgttttagtagaaagaaacttcactttcttgggagcattaccgaaatctgctggatttgtcaacatatagcctaaaatttacttttaaaaaaagaaaaacatgacaagatagactggattctaaaacgacatcaagacaatgtggtactgaatttcctctaagccaaaggaacatgtcatatttaagactgtttttttaaaaatcagagcggaaatggtagaaccttggtttcttacttactgttattaattaatgagtgagtgataggggccattgcagtgtaaatgttaaagttcctttcttttacttgaattgtggagattaaagcatacatgagattgagaaatatgaagcaagctcttaaatggtgagaaaaaacatatctctagttcacgtgtcacttctagcgatttttctactgctaggttttccttttggggttacgattattacaggtggcaatcagttaacttagtggttctgtaggcaccgccctatcttccaacttacttacatttaaaaattcacacagagaggctagtgggaagcgggtaggtgtaaacaatgtgctacagtgagtcacacccgtcacaaaagccaacaatgattagctgtgatttttttaaaatcacctatccagcggcagaagctgtgggcacagccaggaggaagaggccaaaggcagtggcgttgcgttcacactactcgcacggaacagtctacagccaacgaacgcttcaattcagagattactctgcctctagctagaggaagcagaggaaagagaggggagtttggtggctagagatttaccaaaaagaggggggcgggggaaagaagaggcacagtggaaggctgttgcctccaactccgcgctctccgtcaccaagacgaaaacgcctggaaccggagcacgatgacgccgagaagacagaaactcagagcgtccgacgcctcgcgtctgggcggtcgtgcccgttcactcacacgccgctctgagtggtttggcgaacctcacacgtgactccctgggcccttcacccctcctgccgccgcgggcgctgcggaagctgcgggcggaggacgctcggctgccgcgggaggagtaagggaggagggcggaacttgtaaagggaggggccatcaccagcaccaagtctgccaccgccggacccgcgcccccgaagcccacccccaccaagatcgcgcctccgaccggcgggaggggcgcgcaggggaggggacgctgtgcaataaaccgggcggggagagggaggcagcggagggagtcctggctctgaggggggcaggattgggtctggaggatggtctggcttgattcagactcctgcacccgacaacgccacggagtgaggggagagggagagagagaaggtggcagtgtgtgtgcgcgcgtgtacgtgtgtgtgtgcgtgtctacaggtagcagtggcggcggcggcggcggcggcggggaccggagcaggggacgcatctgcagccacctccccgcctatgattttcggaggcgattgctcacttagctgaggatctgtagccccgggagatcttctcatcctctccatttccaagcttcataggtgtcttccagtttcaagtgtgtgttttgggtattttatttttaatttttttccttctccctctaaatcttctcggaaattctgcatattgaagcaggtggctcctggtacgaaatctctggatacatttggcttgccaagttttgctcttcgctgtcccctcccgtttacagaagcatctgtggtgcttttcattttggatttacatgcaggaaacgtatatatgtttatataccgaccgcataatatataaatacatatacgcgtgcccaagggcctggttttcgtctctcctccccacgaaacggaatgttttggagccgatggataacaagaacactattaacattcttttgagcctgttttttaaaagggggagggagcgtgaagaattgtttaacatttggccatcgtttggctgcacactaagcaccacgaagtatttatggttgcagatcaggtgcaaacggggcttagagagaaaggtaagggagcttcctgcgtccgccgagctccggcgtttaccttaatcccggggattgccgagaacttcctattccctgcctctccttcgccttccccaccttccacccacccttctctgctctctctcttctgtaaactcaacccttttccaatcccattggggtgggggtggggggtgctggaggtataatcgtctatttgagtttaaatgcgtctctctttcccaggctagtagctgagttttccaatagcctttctggcggttttaggaaatcgtgtcctttataaaaaataatgctacctaaataagtgttttaaacatctgaagatgccagtccctcaccctatcctctgatgaaaataaaagcaataaaaaataatgaactttaataaactgggtggttttttttaagcgttggggttcatggaagctcccaaacgctttttttcatttaaaaagaaagataaccagcaaacaaaccaatctcaggaggagtccacagtggaggagattcgccttccgtttctgcataaaaccaatacattttacttggagggtaatttgccagagttgagcgagacgaagccgtgtctaaataagtacatgacactaaatttccttttaaatccaccttttacaccatggccagtcgcttgtttaactcccgttcaagggacacggttttcaaacgtgaccttttggggagatgtgggaacttcccctcatttcttcttctgtgccgctaacctctttcctcctccgcgcggcatctccagccccggcagtttgtaaattgcccgttttgcccaccctcctggtgggcgttctctcccccactccactcctgccccctctgtcctttcttcattggcgtcttcggagcagatgcatcttctttcttcttggcctcactctcccgttcccccgtcagtccccccacccgcggctccccacttgccccagctctcctcgccgctcctccccgcctccccgcggagggttgacccttcaattcggagtcccggcctgtgggcgggcgggggagcgccgcggctgtaagccgaggatcaggcggcggcgcggagagcgcgcccgggcggccagcgccgagcgcgcggagctggcgtggggagacacggcaggaaaggcgagtcggagtgggtgatgagaggccgggagagcccgtccgagccggagagaccggagagaagggagcgagcgactgtgcggcgctcacgctgccagagcccgggcggagtgcagtcgcctccaaagccttagagcggcgccccagtcactgcagctcttcaccctagagctgtgccctgggaccacagagaccaagagcatggaaatcggctgagaggtacaaaagaaataaggaacagattacgagaaagcggggagggtttcctggcgaaatacggaggctgagcagatggaggaacaatgccgcctccagaagaaaacccttgcctgaaccctcggcggagcgcagaggagctgctttcagccttctgctctccccaggccctccggctagttctggggttggttccgccggttagtttgacagggataagaaagttgctcttcttccccacaacgtttcctgagaggtggttttcagatctgtgtgtttccagtcaagatgtcactccctagatcccccgcgttgagcaactaatatattatgcattattgggcaataaactctcctgggaagagaaggtattccaaacatttaaaccgttctccaccgactcctgcccgcctcaacacaatgccttgtgagtagaaatgaaaaaccacctgaatttaaaattatttaggttgagattttgcattgggaataatttcttccagaggaggttgttagtgtgttatagagatgagggatattacatgtccaatatttgattcatttgtgataattctaaatcatgaacagttggcctccacaaaggtactatttctttttgcatttccagggccatagtgatacatataacacttgggaaacgtgaattcgtatagttaacccagtatctgttactctgcatttttacaggtagttaatatactcattttccctctttttatactcaaactccggtagactatttttgcttaagtcaattgagttgtcatgctgtacatgaaaattacagggtcttaatgcatttctcaccattaattgtgctcaattattaataggatcatagatattaaaatgtcactgagaaagggtatgtgtacctatgtttgagtgtaaaacctataaaatgtctcagcatttctatcagccattgtaacctagcagaacacaaggtttttgaaatgagctcagaagcaagggccattcatatatttaaaatattaaatgttaaatgcaaaaacattaaatttactgtgcctttggcagagaatgaatctaagtctacttgcactgcagagtgattgagtgattcacagagaaagtggaagttaatcattactcaggccttctgattacatggtttgattaaaagaagtaactgttttctgtaagcctgctattctgcagttagtcttcccaatcctcttaacataagcagaaattgagggagtcaatctttcagcagattctactagagttccagtagtgtggagtaagaaaagcttctttagttcccgtccttcccattgtctcccttcttccacccccaaagtacttgctgtcaatcttttctttattccctcagtatagttttatt

SEQ ID NO: 9882 - DNA, 6000 bp, Homo sapiens
atgacatatgatgtggagcatcttttcatatgcttattcgccatccatatatcttccttagtgaagtgtctgttaaggtctttggaacattttttaatcaggttgtgtgtttttcttattgctaggtcttaagtgttccttgtatagcttggatagcagtcctttataaaatatgtcttgtgaatattttctaccagtgcgtagcttctctttgttgtctctcttattttaaaattttttttaaaaaatcttctgctgcatatattagtagaagttttaactaaaaaatacaggacctaggtgaaaagttttatgaaataaaaagaacactggattatgaggacatacgcacaggctacgtgattgcaaaaaaaatcattaaacctcccttatcctcaatttgcctagatggaaatgtaactattaatatttgccttgccacccaataactttattctaaaagtatcaaatgtgatgtgggcaaatatactccagaaatgtaaacttttagaaattatgatttcatgaaaacttttttagagaaatttaaatttgaaggacaatttttgtgaaaagtgatatggaccaattaaagcatttcatttctattttagaaataagatgctggtttgatgttagattttcttcaactgttgtctttaattgctttctaagtttatgcatttgagtttatactagaaaatgccttttgtatgcacctaatgtggaactgtagatcacttcaaagtgagtcagcttcaacattcacagaaatataatagtaaggaagcagtgtctaaactaactttcctgttgttcctggaaaaatagtcataatagggcaaaagcagttacttgctgtattattcagagcataaattatatactccaaaatataattagcacttgtgtctgtaacagatagctacattttctggttatgtatctatcaaattttcattttaatagtgatgactcataatgaaattatgcattcattgttccattcattaaaccatttcactggcgggctgtgcacgtaaactgcaaattctgtgtatgtgtgatcacaccactctcccccagtctccagttcttaacctaatatttgttaacacacacaaattctttccagaacaagttctctgatgtacattcagggagcagatgctgttgaaatgttatcaagttacagatgcacaaaatattcttgctgaatgtgtttggtaatatagctctgaaatatcacttcagtccctgccttctgccggcccaaacttcactctctggggaaccatccagaaaagtaatgctaagagttactaaattcactcctccgatcagctgttttcaaaatggtagaacaagctttcaacaaattcagcataggtttctctcttgttgaagaaggtatgagcttcaaagacactttattatctgaaacttcatgatagaggtaaaactaaaggaacagctattgaaatgtgatccagaaaacaaaacaaatgcaagaaagagattgtatcttatatgattcaacaggagaaatttttctctcttctacctcccctagagaggttcttttcatgcttccttttcttcctatcccttttctcctctctttcctattgtggccctctcctcatcttcaatcatgcatctccctctttcttcctgctctgtgataactaacatttatttcagtacatctctttgtaaagagcttcactcatacattatgtcctttcattcacatcactgcagtcttagaacagccattgctatcatttcatttgaacacagtgaactggaaacaggctagcagaactgtttccaagtcaggctgccttatttcaaagcctgtgccctcttccaataccatgctatctcaagaaattctttccttccttcctcataaatctcttttctcctttttctcttctttctcctccttcagcgtcccttcctcatttcctgctcctctttcactaccacaacaaaccatcttatgctccatccccattcccatctgaacactgctccttccagaaacctcctttattctcagatgggtctgagttaggggctttctttgctcctccaggaacagagcctccagaaagcgtcactaacaatccctgccccaggcccaccttctcgctttatcccattatcaaaatcttattcatttatctcttgtatttttagccactgttttctgaattagccacagataaaaattggagggaagtatacgactggggtattttttctgatccctcctctctgctttcttcccctcccctcttctcccttctcttctcctctcctattctcttctcttcttctcttctcttctcttcttttctcttcttttctctctctaaatcatatagtggtggtgtttaggttataatttaaacacttccttacatttgaaaaaataactgtgagatataatttgtaatattacttttcctttttttttttttttgttttgttttgttttgtttttttgagacagagtttcgctcttgttgcccaggctggagtgcaatggcacgatctcggctcactgcaacctccacctcccgagttcaagtgattctcctgcctcagcctcccgagtagctggaattacatgcatacaccaccatgcccgactaactttttgtatttttggtagagacggggtttctccatgttggtcaggctgatctcgaactcccgacctcaggtgatccgcctgcctcggcctcccaaagtgctgagattacaggcgtgagccaccgtgctcagccccattattattaaaagagaatatcacaaatacttttcccctgaaataattcttctattacaaatgtttggattatttgcttgcctataaaagacaggattttcataaaatctttaagcattgtttttcaacaatttcttttcggagtttttatactcacacttcagtggtatcagttactccaattacaaactgtgaagttgaggtactaaagaaaataattttgtattcgctggactcctcacaactgtgaaaatttaattacgctggtgagaaatagttcctcttggatgaccatgaggctagtgaaatgtcttggactcttaacataaaagaattttttttcttttactacttggaaaactgaaaatttgaaaaagtctttttctctttttcctaccaatttaatgggcaaagatttttttttttttttaatttgagttgcaataagtattttctgactttggttgtcccaggaaaaccactataaggatactcaaagagaacaaaattatggtttgtgatactaggacagttttcctctaaatcacgttttattcctgagaagaaactgtaaccagtcaagtaacaactaaaactcacacaccattagggcatattcaaactgacaactaggagtttagaaaaagaaaggtttgagaacaccctgggtaacatagtggacccctgtctcgaaagagagagagagagtgagagagagagagagtgagagagagagagaggaaaagaaaagaaagagagagagggagagagggaaggagggagggagagagggagggaggaaagaaggaaggaaggaagacagagagggagggagggagggagggacaaaggagcagaggaaacagcgtctttgctttatcagacatctgagcaattcagatattcagttattacatataataaaataatggatgctatgacccgatcattagagcatttctagattacaaaactaccaataattaagtagtggtgatttataatcattctctctaatattttgttgtagtagtttgtagcagtttttgtttgttaattgctactcatttttagttctataggccagtataatacatgtccatccatattacatctgctgctctctttaagcccttccctggagcacaccatctagtttccgtagtaactactacaatactattgctcctggagtagcaggaagaaaggaaatgcggaagagaatgaataaattgtgtagttctattaagaactttctccgcttccttacttgcaaaggtacttaacttttcagagtagcacttccagctaactgataccctcttctctgaccaatgttaagaaatccctcttctatcttccatgatcatgactgtccaaagtggagcaagataacgtacacattcccattctttccatccatcattcattcttgccgtttgacagttgtgcatggcatgtgattgcttcagcctgaaacacaaagctttgtaagtcagcataaaataaacactttatgcactgaatgatccattcagtctagttgatctataatttgagattttgtgtacatgtgtaccttaagtcatatctcagtaataatgagaacttttcctatttggattgattttcatacctaactccagagaacacttatttttgtaactgggaagagcaggaatcccttactgggagtgagaaaattgtttggagaatcctagagtgtttactaccaagttcgctttccatatagaaaatatctatttggctctctctcctatagttaaggaggatttggaaatctgatccagtgcagggcgatgtcggtctgggaaggaagactgtgagccctctctccctttttaatatgagaattcgaaagcagtggggaagtgatgttggacctatcacagcattgctaacagacagcctattacagtatttaataaaaacagaaacagcatgcctatcataggctaataaatcctacctcctgcacgctttaaaacagtatgaagcagctttaacggagctccagataactaatttcaagcatggctgtctagcgtgcctgtcactcctattgtccttccaaactctttcagacattttgagcagggagtattaaagctatgagttagaaagggttgtgacattaatggtccacaaaggctttaggcacaagaggtaatgatgattaccggtggctatttggaggactgcaccggatcgctgtcattaaaaattaagcgtggcttttgaggaagatgtgacaactaccggaggtaggatttgcatgtaaaacaaaggaatctgttgctgtttcatgctttttgtttgttctgtggcgtgaggatcgtgaattgcagccaggtgcggagtgagaagcagcaagaggagggagaggggagtgggagacgctctgcttagagcaaaacacagtggacagtattatgttttatggcagaaatgcctccaggacaaactggctccaggcttacagcttgctgagtgtgcattccacgttgcttttcctgtggagtagaatgcttagaggtcacgaaggaaacactttgcctcttacctgtggtgccggctgggctactgtactggtagggtcgagtgaagactttggtgggtggaaggcataaaggtccaagaaaaataaagaggaagctgtccttaagatttgaaacctgttattttatttctacagtcaatgtgttttgatggtcagagtctgatttttcaaaggggaaattggaagattacgacaaatttccctgacaaagaactatttcctatgtaatccattataaaagaaaattgggtaccttcgtccgttttgcatattgaaaggctgacccacactgtttgggttcatggttttcctaagcagagtaagagttttcgactaaaagaaggggctttctctcggttcctgctcttgcttttcaacaactgctggggctgcagatggaaatggtgattagttagaggttatggacttgacattttacctttctgttttgttttgttttttaaatgaacagcataaaaacacaattctccttcaaagatgggaggggcagttgggttccaaagtccagtcgataatgaatagatttgcagaggaacttattatactgctttgtactttatatgggatcggtatagcacaatcagaaaaggaaatg

SEQ ID NO: 9883 - DNA, 6000 bp, Homo sapiens
cacagcatgtttctaaggaatacttcttgcaaaagtttcagtgctggagggagaggctgctggcttctgtggggatcacacccaggtgagtgtgttcaggctgtttgtaattgagtttgcctcaggctaagccagaagctgcctgtagccatgtgtcgtacttgggctgggtgggaaagtcagtcctatctgcagtgaagagaatagaaggtggtggatattgccttgattatgaataaaacagctcaaggtaatacactggttagaagcggacatgtattactggcagaaaaaggaatcaatatgctttttatccatcttcctgactagaaagcaaactagatcatacttaagtgctttgaggtccttggatgaaagatgcttgtaaatacaacaaagttaattacaaggctgtttatggtctgagaaaactggaaacaacctaataatattcaataataaggaaatggttaaggaaatatggcatatctaattgatggaacattatgtagccaataggattacaaagaattgttaatgacatgggaaagtgcttattatgttaagtgaaaaagataagattaacaaaaaaatctcaaatcatatctaatgtgatctcattctgtttaaaacaatataggccaggtgcggtggattatgcctataatctcagcactttgggaggccgaggcaggtggatcacctgaggtcaagatttcgagactagcctggccaacatggtgaaaacccgtttctactaaaaacaaaaaaattagctgggcgtggtagccggcgcctataatcccagctacttgggaggctgaggcaggagaattgcttgaacccgggaagcagaggttgtagtgagctgagatcatgccactgcactgcagcctggatgacagagtgagactccatctcaaaaaaaaaaaaaaaaaaaaaaagaaaagaaaaagaaaaacaaaacagaaacaaaaaacaaaaaacaaaaaacctaatatagagcaggaggggattaacccagcaaaccaagtgcacaatcattacctttaagtgttgtgggtgagtttttgttctcttctgtacatttttttttgtatttttcaagtttcatacaatgagcatataaaaatatattactttcatgaatcatttgacatttgttgaggaattctttgtggctaagtttgtagtcaggtcttgagaggtgacaacgtgctggcagcccttgcagccctcgctcgctctccgcgcctcctcggccttggcgcccactctggccgcgcctgaggagcccctttctgggctggccaaggctagagccggctccctcagcttgcagggaggtggggagggagaggcgcgggcgggaacccgggctgtgcgcggagcttgcgggccagtccgagttccaggtgggcgtggactcagcgggccagcactccgagtggccgaccggcctacaagccacggacagtgaggggcttagcacctgggccagcagctgctgtgctcaatttctcacagggccttaggtgcctccccgcggggcagggcttgggacctgcagcccgccatacctgagcctccccccgcctccgtgggctcctgtgccgcccgagcctccctgatgagcgctgccccctgctccacggcacccagtcccatccaccactcaaggtctgaggagtgcgggcacacgcacaggactggcaggcagctccacctgtggccccggtgcgggatccactgggtgaagccagctgggctcctgagtctggtggggacttggagaacgtttatgtttagctaagagattgtaaatacaccaattggtactgtgtatctagctcaaggtttataaacacaccaatcagcaccctgtatctagctcagggtttgtgaatgcaccaatcgacactgtatctagctactctggtggggacttggaaaacgtttgtgtccacactctgtatctagctaatctagtggggatgtggagaacctttgtgtctagctcagggattgtaaacgcaccaatcagcaccctgtcaaaatgggccaattagctctctgtaaaatggaccaatcggctctctgtaaaatggaccaatcagcaggatgtgggtggggccagataagagaataaaagtaggctgccccagccagcagtggcaacctgctcaggtccctttccacgctgtggaggatttgttcctttgctctttgcaataaatcttggtactgctcgttctttgggtccacgctgcctttatgagctgtaacactcactgcgaaggtctgcagcttcactcctgaagccagggagaccacgaacccatcgggaggaatgaacaactccagaggcgccgccttaagagctataacactcactgcgaaggtccgcggcttcattcttgaagtcggtgagaccaagaacccaccaattccggacacagtttcataaatgttccatacatgcttgagaataatatatattctgtagaagtgagtattctatatttatcatttagataaaacttgttaattgctttacttaaatctattaccctactggtttgttcaggtcaagctatctaaattactgggggagtgtataaaaatacatcataatctgatagtggattttgtctatttcttcttgtagtttaatcagtgaaacaatgctatcaggtacctacaaattagcattgttacattttccgtgtgaattgagcctttaatcagtgttaaaacacttatttttaaatttctaataaagctttttaatttttaacattcatgtttgctttttgttacattttgcctataaatttcaccctttttgtatctgtgttttagatgtatcttttgtaaaaacatgcatatagatagttctccatttacagtgggattacatcctgacaaatccatcataagtggaaaatactgtaagttgaaaacttcagagtattagctatttaccctcatgattgtgtggcagactgggaactatggctggctgccactgcccagcatctcaagagagtagggtactgcatatcgctagcccaggaaataatgcaaattcaaaatttgaggtacagtttctactgaattcatattgctttcacaccatagtaatgtaaaaaaattgcaagtgtggggcggggcgggccatggggcgggcggaggcgcccgagccccgcttcccccgcgccattccacccccggccaggctcagcccgcggccacctacgccccgcccctgccggctgcgcccgagcccagtcccgcgagccgctccccggcgggctggctcttggccccggaagcgcgagcgttcacttcgcggcgagtggctccgtctccgcggacagagcgcgcgccccctggcccggcccgcgggggggggctccggcacggtccccgagcgtttcccgccgggtggagcgggccgagcccagcaggttgaccagccccgcggccacgcagagccgggagatctactgtttgagcgcggaagcgcagaggctggcggaggcccggctcgccgcaaaacgggaggcccgcgcggaggctcgtgagatccccatgaaggagctggagcggcagcagaaggaggtagaagagagaccagaaaaatattttactgagaaggggtctcgtaacatgctgggcccgtctgcagccacgctggcctttctgggtgggacttcctctcagagaggcagcggagacacctctatatccatcgacaccgaggcgtccatcagggaaatcaaggactctctagcagaagttgaagagaaatgtaagaaggctatgttttccaatgctcagttagacaatgaaaacacaaacttcatttaccaagttgacaccctgaaagatatgttgctggagattgaagaacagctggctgaatataggcggcagtacgaagagaaaaacaaataatttgaaagggaaaaacacgcccacagtatactgcagtttcagtttgctgaagtcaaggaggccctgaagcaaacagaggaaatgctcgagaaacatggaataatcctaaattcagaaatagttaccaatggagagacttccgacactctcagtaatgtttgataccaagatcctaccaagatgacgaaagaagagttaaatgccctcaagtcgacaggggatgggaccctaggaaagccagtgaggtggaggtgaagaatgaaatcgtggcgaatgtggggaaaagagaaatcttgcacaatactgagaaagaacaacacacagaggacacagtgaaggattgtgtggacatagaggtattcactgctggtgagaataccgaggaccagaaatcctctgaagacactgccccattcctaggaaccttagcaggtgctacctatgaggaacaggttcaaagccaaattcttgagagcgcttctctccctgaaaacacagcacaggttgagtcaaatgaggtcatgggtgcaccagatgacaggaccagaactccccttgagccatccaactgttggagtgacttagatggtgggagccacacagagaatgtgggagaggcagcggtgactcaggttggagagcaggcagacacagtggcctcatgtcctttagggcatagtgatgacacagtttatcatgatgacagatgtatggtagaggtcccccaacagttagagacaagcatagggcatagtttagagaaagaattcaccaaccaggaagcagctgagcccaaggaggttccagtgcagagtacagaagcaggtagggatcacaacgaagaagagggtgaagaaaaaggattaagggatgagaaaccaatcaagacagaagttcctggttctccagcaggaactgagagcaagggtcaggaggcgacaggtccaagtacagtagacactcaaagtgaaccctcagatatgaaagagccagatgaagaaaagaatgaccaacagggagaggcattggactcattgcagaagagaaagaacaagaaaaagaaaaagaagaggaaaaaatccccagtacccatagaaacccttaaagatgtttaaaaagagttaacttatcagaacacagatttaagtgaaattaaggaagaagagcaggtaaagtctactgacagaaagtcagcagtggaagcccaaaacgaggtgactgaaaatccaaaacagaaaattgcagcagaaagcagtgaaaatgttgattgtccagagaatcctaaaatgaagttggatggaaaacttgaccaagaaggcaatgatgtaaaaacagcagctgaggaggtactagctggtagagacacattagattttgaggatgtcacagttcaatcatcaggcccgagggctggtggtgaagaattagatgaaggtgttgcaaaagataatgctaaaatagctggtgccacttaaagcaatcctgaagaaccagagagcgaagatgcagatcactgcaccgtacccaaaaatgaaagtccctcacaggacattagtgatgcctgtgaagcagaaagtacagagaggtgtgggatgtcagaacatccaagtcagaccatcaggaaagctttagacagcaatagcctaaaaaaccatgacttgttggcaccaggaggagagccgggggacttcaatccagaaagcagagaagataccagaggagggaacgagaagggcaaaagcaaagaagaccgtaccatgtcctaagctgaggcaggcggcaggcgtggtgcacaggaagtctgagtgtgaggggctcttttctctccactgccaatgtaagtagaatgttctaaattcatagagatgcactgtatgccaatcaccaggtgatctactgctttaagttatagactgttacttgtagatttccatgtaatcattgaggttatcacccagattagaaagacatatttgttatcagtgtacattctaattgagagcatatatccagtagtatcaaacaataatgtctactgtt

SEQ ID NO: 9884 - DNA, 6000 bp, Homo sapiens
tgtttatggggtacatgaaatatttcggttatttcttctttttcagacactgagctgctatctttcacaacatcctaaaacgtttatcacaagccagagctgaattgatttgacctggtcataaaagatgtgcatttatatgatttttcaaaaaaaaccccaccttttctcaaaataactcttttgtattaaaagcaacaatgaaatacttactcctctatttgttatgaaaactatgctgcttcctcacatgatccatttggtattaatcaatccatcattttctatttggtatagaaaccaaaataagatatgtaattctaagatgttttttatcagagctgaaattttaataacacggttaaattggaatgccctatagtgctcaggtttaccaatcttggtcttttatttccattattattattcatactaatttttactttcctcctgtattgatttcattttctgaagaaattagcaagcccatctaatgaagagattctcttcattagagaatttattctcttcatatagcaactagttttattgtttgatctattaagtcagtcatttactaataatttgtatcatgaaggatacaaatattaagtatgtttctatcctctctgtcagtaaatcaccagggagataaatgaatttgattcacatttttattctcaaacacctttcctctatccctccttctcctttcacttctccttttactcctctttcttcattgactaccttactctgtgaactcattttacacttaaacatactgaaaaatgaaccttcagttctatattaatatctaatacttgttcagtatggatgctgaaatattaattgataatagtaatagccatttgcactcaacaaataaatcatcaataggaaactaaggatttgtggtagttggctgttttaaagtcaactctcctatgatatactttggattatgcccagtatacaggaggtattcaataagtgtttgctgaaagaatgtcagcctctccaaatttcagaaatataatggtacatctgcttcttctcccttatctttctattatcaaaggaaattaaattggcatatcactatttccttatcacaaatctgttttggttatttccaggaaatctattcagaatagttgaaaattgattgtttgacaattaactcaagcatttttcctgagtccagggtgcattgaatagtattaactgctcaattgagttataaaaaatgccttttctaatatttggtatctcttttgcatggattatgaaatataatgcctagtgattgtgaaatgagatttccagtccccatatttcatatcaacaaagtcttcttatttgaattcacatacatattttaaatactctgggtgagttttctttcatgttgtaatttcagcttatggctactctggctttggtagtttttagttaactggtcagactgaacatgatcaatcagttgattgactgtttcacaatttcagaggccctgttactatttgtgagatcaaaggaaaatacaagaaagagctagttgaggattacatatatatttttttcaatttcaaccatattttcccatttaggtggtaatttttgcttcctagctagaatttctaatatcaattatagaagtaaataagcaccattccatttacacttcttagaaatatttagtagtacagttttttaaaaaaatctccatataaaaagcacattatgaaatattgatatttcattttttcagacttaattagaaaattttataatatggtaaagattcacaggaataatgtagtctaaatctttaattttaataaaatatttaaagcatataaacaatttatatagtaatattgtaaacacccatgtactcaagattcaggctgagaaatagagcacagtagatacagttgaagcttctggtgatgcctttccaatttcatttacttggcaccctccccacagtaacctctaccctgaatatcatgtttgtcattatcatacatgttgatatattttgctgtatataggtatgtgatcaaatataatagatgtaattattttacctgtttttgaattttatatacaaatatcatcatcctataagcatctttccgcaacatcctttgttgttgttgctgcatattatattttttgagattcatttatatcaactcaaggagctgaggtaacattcatttttcttgttaccgtttctactattgcagtatatgaatattctataaatattttgtccagctatttatctgaaggtgtttagattatttctctctcctactgtttttttctctttcaaatagttgtggaatgaatagttctaggagtggaaaaactggattataggacataaaaatgttcaactattgctaaactgctctctgaacttgtactatcatatactctctgtaatttcttcacattttcatcaatattaagttttgctggacttgtaaatttctgccaatttcatgactgggaaacaaaaatctcattattttgaattgcatttctctaataactagggggattgaggacctttttcagatgcttattggacattgagaatctttttctgtcaatcaactattcatttccttaacccattctttcctattatattttttatcttttataagcccctttatgtactttggatagtaatccttctttgattatatgcattgcaaatatcttttatgagtgtacattttgatttatataattgctttattttaatatatcaaatttaatattatttctttatggactttggcttttttatgttgtttagtaaacctttctgttctcatctacccaaaatcataaagctatttccctctaaatgttgtaaaattttgctcagcatctttaggtctttaacccaccttaacatacatacatgtgaagttgcaatcttgtattatcattatttcatatggctaattcagtgtctgaatatgtcatcttccctcagtgctttctgatgtcaccagttatttatcaggtttccacaaatccatgaatatttttctggactttctattctgttccattggactagtttctagccctgaaccacatctgcattgcctcagttactgttattttatgttaagccttaatagttcatattggaacttcctgaacctttttcttcagattattcagattatattgataatttcttaccctttgcccttgcaaacacattttagaattaacttttaggcttccacaaaaaaattgtagtagattttattaataattacattacttctatagattaatttaccatattgattctcccatccaggaacatgtatatttattgatttatatgggtttaccccttagtgttaatagataaattagccgtgggccaaaaagtgatggcccaaagtcacatagccaattaatagcaacaccagtggtagaagaaaggtcttttgactccttaacaccttgtacactaaaaaggcttaattatttagtcagttaaaaaagagtgtcttggactgcttgcagctacagaacccctcacaatgaaagagaattcaacttctctagtttactaggcccaatttgtgtttcaagccctcaaagtgtgattagagcgcttgggaaaacaaagtcctgaaattccttgcattgactctttctctggagcctgtcggaaatgctaggggtaatcttgaggtcattgaatttaaaagcattcaggtaagcaacattgaggcctatgtaatgactcttaggtcttgttctgtgaccacaggcttacaggagctatcacttgctttgctgaatgaacactaaaagtcccaaatgagtaagagattatctaagaatacacacacacacaatcatattcctttaaaggaaataaaattttaaatgtttttctaaaagcagcatatctcaggaagagtgaggcttcttttaggtcgatagttattaaagaaacaaatacaattgctttgaaatcaccgaattgcctcaaattggcattttagctactaactgccattggggaaatttttgtagacaaaaaaaaaaaaatagaatccagaggagacagaaacacagaagattcagtctttaaacgtaaaacaaagaaacatcagatgctgtattcaagtagtcatatactattcatgttaattgcagttcagccttctttaactactgcagtagccagttatctaaaggggcagaaagaaaaaaaaaaaaaaaggtgaggagaggggatgggaaaaaaaagtgagatccctgcaatatcgcctggagccactaggggtatctttgtaccatttttcatcctgcaccgatttggagtagaaacctatattagggtaaaaccagggtcctcggcatttttttttttttttttttttttttttttttttgcgaggagtgcacccagaatccaaaaaagattttttaaaaaagaaagaaagaaagaaaccagagttttttttcagtcacccgaacagggttatgaaattgttcttctggacatcagcaccgggaattcatttttgaggtcaatttccaatcgagataaatctattggattagtaggattatctgattgcagccgaaagaagtaacgttgtttgatcatttgtatttcttgcctgatggtcggatttacatggaggtggctttgggtccccaggattctggatcgtggttgcatctggagagaaaaaaggatcaatcgacacgttttagaagtgtccgtgggtgaataaaaaaggaggggggggtgcaaaactggggttgcggatgcttaaagcaaaaaaagagaaaaggaagcgtcttgaatcctggaacaagaattaccgggtgctcgagatttcaaaaaagcgtctagaaactggtaaatacttggaccatttcagcttgaatttgacggcgaagtgttgtagagaccgtctccttgaatcattgcaaagggaccggggaaagatgagggggctccctctgtggatttatcttgctgagggtaagtttgtggctcttttattgggagggggctgccagggttttgtgccactgcgcggaaggtgatgcggacgcggtgcctgtgaaatggagagagaaaggggaatataaaaccacctcgcgcatccccggggggatcgctagggagctacctagatcgagctaaaaaaccttgtttttgtggcgtcggtgggggagccaagcagctctccaagctctcaactttgcattgaaaatctctcagttgggagacgcttcccagatccagtgctttctcctagcaatactttaaggagaggaggcagcggtgccttggaaaacctgcatgtagagcggaaaagcccaagtagaaatcgctggtgcttcggccgccgtttctgcggctgtcgtggcttctagggggatattttgcagggggaattggctgttttcatgttgtctcctcccccacccctctcttcctaccccttcccgcttcccgcttctctcaaccggacactaaagggttacagggtcactgcaccggatagagacagtagaagtgggtggctggccacacatgttgtcttgtaattcacttgcacgactttccataatacaagtccgaggtaactttcttcgagttggagcagcccaggaagacgttgcaggctttttgccgagggcccaggctagcgagtgcgccaggcagacggctgcatttctgatgcatccctgccctgcctgcctcgccacttactggcttttctttccaactgagcggtgcgcgcgcgttcccagacattttcttgcagctgaattcaggaatttttttctttttttaagaattttgtagctcccaagaaaaactcatctttatttgcagaaggaaatcaatttcagcagctataattaatcactcaaatcagtgaatatgaattgactcaggcaactaaaagttgc

SEQ ID NO: 9885 - DNA, 6000 bp, Homo sapiens
gcacccagccagagattctatagtactggaggattgttcatatcggttttcctaaaaataaaagaaggaatgaaggtaagcagagaaaagaaaaatgcaaataattagacaaaaccattgaaaagaaatataccacagccagattgttttaacaaaaactattaaaattattaatagctaacatttattgattacctattatgtgtcaggtgttatgcttacatgattatctcatctcatgctgatgataaagctatgaggtaggttttttttttaatatctgtttctcagatgaggaaaatgaggcacagaaaagaccttcaacttcttcaaagttacagttaacaagtgttaaggcctaattcaaattcagttgatccaatcctgattccagagttatatactttatccccatcgcaataaaatttcaaaccactatgcaggtaaaataataaccttcagaggatatggttgtagataaatttgaatcaacttttaataagaattcaagcctgaaatatttattggagtcaaatctcgaaactacaattggtaccaaagaaccatgcctattgtcatctggtgttacagaattgaacttcaaatcacagtgatatttagagagttcataaacatgtattgtttaaagaaaaaaatatttgtttctcttaccagtgtcacctagaaccttattagaaatgtcaattcctttctttctttctgatgtagaacaagtgacccaacttgcaaattaatttaattcaattctttttaacaatcaattctcaggcccctttcagaaaaaaaagcacttatgcttttccttcctctcaaaaataaagaactcaagtttgcattatttctatgaaataagtataatttacactcagaagtcagtaggctagtaagaaactagggttgataaacagactggaagacatgttcccttactctcaagttgcttgcaaattagtactgattactattcaaaagaaagcaatgtcttggttttcaaaagcatatgggtcttttgtaaggacatgggtctctgctctctgcaagtgactttattatggatagaggttgtctagagaggacttcacaaggctgtcaaactaatccttccttagcaggtagctgataagaacatatgaccaagaccaatgttcttgtcatttaaattagaattacttaaagttgatgccttcaggatgaaaagagaggtgatagaaatggtggtctgacagatcagaggagctggtatgttagaagagtgtcctctcacacatggtaagcccccatgctacctgctgctcaggtggactctgcaactgggaagttccaagaacaatgagagtcaaaagaaagactgaacagaacatcttactctttctcaataaaataactcttcattgtccacaaaccttccccaagcaaaaaattttcttccctgtgccgccagctcctgttgtatgacacaacacccaatttagtctaatggaatcacatgaagttaagagcgtgggctttcacacctgggatttggaccttgtcctctcattactagctgtgtcatcttgggcaagttacttaatgttttgagcatcagtttctacatctataaaatgggtgctcataatatttatcttgcaggtcttttgggaagtttgaatgaaatgacatatataacacatgtgctcatatgatgggtgagcaatcaaaactagccgttgttataaaagcatgggctatgtttacaaagccctattgtcattattcactttatggtgaatagccatttccactgtattgcagtttgtggggaggaggcccagggtgagaaagaatggggaggtatttttgtttactcagatagattgtaagtccctcatccttgatactaactacatccaagaaagcatatcatctctgacattgagggtctaacctaagtggtggagactatacatatggtgctatattagaaagtagaatgtgctcactgttatactagactcacaaagcactttgggatcaccaaagaggggaaagctaattttgatcaggagttggggatgccatcatggaaggctgcatatttgatctgtgtcttaaacaaaggctcgaataagaattagaaataagaaggaaatagacacctcaaaatttcaaaagcaaaacagacacaacttgggatgcataggatatggagagtaaataggaaaaagaagagtgaaagataaccagaatttagaagcccagaaaactggaaggacagtgctgactgaagttcagcaggacgtcacagagaaggggtgaaatcagtagaagatgataaactcaggttgagtttgaggtggaggaagaacatccagatgaggatatatcctggtgaagtataatttacaactcagggaagagatgcagattccagagtcattttcatggatgtggtcatttaaacttaagcaatcattttagggtagagaataaatcaataatttaatggcaactagtgtagaacagtaagaagcagctatgctttggagactcatagaacacatagttgggtttttttgttgttgtttttctgagatggagttttgctcttattgaccaggctagagtgcaatggcacaatcttggcttgctgcaacctccgccttccggtttcaagcaattctcctgcctcagcctcccaagtagctgggattacaggcgcctgccaccacgcccagctaatttttttgtatttttagtagagatggggtttcaccatgttggtcagagtggtcttgaactgctgacctcgtgatccacccacctcggcctcccaaagtgctgggattacaggtgtaagccacctcgccctgccgacacatacttttaaaggaaactttgtgcaactgggaaggaaaccaggagaatgcagaatcacagaggccaaaggaagagcgaattttacagtggcaagggtgattgggaatgtcaggccctaaagagagcctgagtagcatgaagcataagggactgtgtatgccatgaggtgactgcatagaaagctgtttcagggctaacaaggagcagaaccattgagaagataaagtgggagagaggaggatgcatagaatcgtagcttgagggacaagggaaggtgttttattaggataataatagcctaaacacatttgcaggtttgagggaaggagccagtaaaatggattaaagctgaagaataaacaaggattaattaatcaatcaagacctccacagcactggttatcaaccctttcttaacataaaactcacttaggacccttattataatactaacacctggtcctgattctgatcaggattatttactagttttcccaggtgattcaaatctgtatctaggtatgagagtcacttacttagaagaactggacattggattaagaccactatagatggttattttgggatgacaaaggctctctttttcctctgagatgagggtagtatagtaccggggtggcggagtaagaaaaggatgaattaagagcggaaacatttagaaagactttgaaaggactcctgatgaatggcttcgaactgagaaagtagaaggtgagatgcttacattgagggtgcaaaagtaagactgggccattaaagaaatttaaagcattccgaataactattaagatttccacagagataaacaaggtaactgtccaattactgctttattctctctacccttattcgttggccatgcctttacaaagaaagggcattactgtgtttcttgttactcttatgaaaaagagaaaaagaaatattataattggggaacagatagaagaatagtaacgttaatagagctttagtgaaggctttaagtaaaggtatcaagaataaggaaatctaagcagtgcattgagatctctgtgaaatcagtgagaattcatccttgatggtatcttggagattatctcacccaccatttaaattatgagtaaactagggttcagagacattctgtgatttgaccaccatcaaacagcaagttagcaacaccaagagacattgaaacgaaaccttggagccccacaccagtgccttcagctcctgcacacacttggcctcctgacctctgctgtgaggttcctggttagcaaaatggctgtcgttcttttgggaggattaataagaaaatctgtaaattggttttagctctttgcaagagagaaaaaaaaactatgtgcaatttcttctttattgctgttattatgtgaaccagattgaattgctgcatctctgaagagtttcttatgactagtgtgaagtttcccattttaacccaagtcaattttaaattgcccatacaatacacagataactgactgtaataattcagttgccacactcaatacattgtttgaaatccaatgaaaggcaaaaggaaaacttgcaatcctacagaatcagcaggatagatcctgcaagctgtcacaggacttattttaagtaattaaaaaggagctgtgtgtgtagtaacaagatcagtgggtctcctctgcatggctacaatacaaggataggagctgcaattctctgggcctggggttttttaaatctgtaaaacaagatgaataagctagaacacttctttcagaattaagcctctctcatttctgtctgtattttaatttttgtcatccctccaccaacatttctaaaatagttcaaaacaaactataaagaatatttcacggatcatagttccaggtttttttaaaatcataaataaatttatggctcaatttcaggttccttatcagtaaaatagaggagcgttggtgtaaatattctaaactcagctctgtgcttcagtgggcttttcactacctttagttagttgcactaggctggttgctgtttaccttgcatggttgactgctctcttctcacattgtgtgccaggaagggcactgcaccttggtataaatgctgctgggcaccgttctgttttctttcttttcttaatcctatccaagtatgcagtacgctcttgggtcgtctcatgagacccaggggcatgttggaaagaactgagagaaagagcaacaaagcggcgagtggtgtgagagggcagcacgcgctgtgggtaagctggactcacccaaagaactgtatttattttgcattcatccccatgaattaataaaaagaattggtgatacacaaagagaggagaggctacaatttaaaagagctgtactggtttggatgttttgtaaaatgattacatgatggaaaagtgtagaaaatgcaatatttgctggctttggaactatctgtatgactataaagtcaggagtggagggacatgaggacttgtgagaatggtttttttcacagggaagtgatttttcttttcttagttggatttagggttattcttgattctagtgcatattttctcatattttaaaacattgcgtgatgttaattcacaagtctcagatttcaactttaatataatacattggaatcatgattttttctcagcctttcaaattctcaagtattttactatgagaattttcttgtatttgaacaattttttaaaagaagctctgtctagacacgcaaactgagttggaaaatggatataagcatctagatgactctataaaaaaagtatcttcattgttttaggcaacaagtgtctagtcttcactggtattaattatccaaatatgtattttatatcactaattaacttttcacacctagaaattgtcttacaaaaacatttaacaacactattattttccaggacccttttttcctctgcatactagatcacagtatttttagtgatgaggaaatatatacaaattcaaactgacagcaattcatgaatctctaatattcctggtatatgttgtccactttgcgaaaatgattattaatagcctgactgcaaaattgtttaagaaacctttc

SEQ ID NO: 9886 - DNA, 6000 bp, Homo sapiens
aatcctcaaggactttcctgggattttgttttatttttattttttatttttgagacagggcttcactctgtcatctaggctggagtgcagtggcgctatcttgcctcactgcaacctccacctcctgggttcaagtgattctcgtgcctcagcctcccaagtagctgggactacagatgtgtgccaccacacctagctaatttttgtatttttagtagagacagggttttgccatgttggccaggctggtctcagactcttggcctcaagtgatccacctgcctcagcctcccaaaatgttgagattacaggagtgagcccctgtacctggcctgggattttatttttaaaaattaagcactggggccaggtgtggtggctcacacctgtaatcccagcactttgggaggccgaggcgggcgaatcacaaagtcaggagatcgagaccatcctggctaacacggtgaaaccctgtctctactaaacaaaatacaaaaaattagccgggcgtggtggttggcgcctgtagtcccagctactcgggaggctgaggcaggagaatgacatgaactcgggaggcagagcttgcagtgagccgagatctcgccactgcactccagcctgggcgacagagtgagactctgtcacacatacaaaaaaaattaagcactggatatagatttatttttctattctttgtctttttctccttagaaagtgaaacagaaaaaaaacaaaataaaataacttctaattgattaagaattcaggttatttgtgttcttattaataggggttattctataacatttaggaatgcatcaaaattcatgatcagatatcacttgccaagaatgggggcttcatcagatccggaatagaatttatctaaaagtgatcaagacatgcagacttataaaaagctatgaacatcctgtctgtataacaacttggccagcaacattcctggcgcaaagggctaaggctccttcaagccttgagaataagacacttaaaagaataagcccaagctcctcctgagcgaggaggccgaatattgtcagtagaagcatggacttttggatgtgatctgttctggagccccggacctagcccttgttactttgtgatttttgcacaagttcctcggactctctggtcttctgtgtcctcatctgctgaatgcgcaaaaagttcctacctcctcaagttctgtgtctgaaggacattatgttctcatagcactgagcacaatccctggcacatggttactcagggcacccaagttatcattatgtgtctagggaaagttgggttgggcatgcagttgttgaattctcttctttctgggtgagcgctgcctctcagcagctgatgggggaatccttgcattattgtcactccaggagagaagatacctgcttcctgcaagcaaacttacggtttcatacactttattggatctcaaaggcagatctttttttgttttgttttgctttcttgagatggagtttcgctctcgttgcccaggctggagtgcaatggcacgatctgatcgtggctcactgcaatctctgcctcctgggttcaagtgattctcctgcgtcagcctcccaagtatctgggatgacaggcatgcgccactatggccagctaattttgtagttttagtagagatgggtttcaccatgttggtaaggctggtctcgaactcctgacttcaggagatctacctgcgtcagcctcctaaagtgctgggattacggtggtgagccaccacacccggcttaaaggcagatcttaaaagcacattaaatcatctgctctaactcccacattgcacagagaaataagctgagttccaaggaggcagcataacctgagactagaaatggtgcttaggttcctaagcccaggcctccaaggtctatttactgtataatgtgagctgatgtctcccaaagtataaatgtagggtcacctgtgttaggatcatatgaagggctttttaaaatgcaagttcttgggtcctttaccctaattgttttatcagaatctctagagatgggacctgggaatctgtatttaacagaggatcacacctgagttcaagaaccactcatgtagtagaacaattacctcaacttaaaatatgaaatgtatctgtagcaagtgccacctggtaaagacttgatcacagtggatttcaaacaagacaaagtattgagggctgttgaactgtcaaagaatttcagctattatttctattagtttctgcctcactatccatcgagttgtttgtatgccaggataggccaagttctctggctcttgtgagcttgtgtaagtcagtgtagctctctgctcttgaaaaagcccaaaaagtgaattaacatttgtatagacttagaactgtaactagctcataaatagtagccactagtattatcactcagagcaggaaaagcatctgcacagaggtgacgctggtttctctgatgtgagcctagttcaggcagtcaggtgcccatttgattagcaagatggctggagataataatcagggtaaaggaaaggaaagatcccatcgaaggctccagaagtttgtggcacagatcatacttccttgttgtttgttttcctgcaaagagaatgtaagatcagatgtgactttacttttgacagtttgaattcttgctcacatcagcaaaaattctccatattggaataactgtccagttaggggtttacttattctcctacgaacaaatatagatagtcacgcaaagaacataggctgttgtgtaaattttaggttgttgtcaatgatttgtgcatctctaaattggaaaacacagacatagttttcatgaacatggagaatttcagctacaaaataattcttagccataataggtattgtatatttaattgagagaatgtgaaaaacaatgaggaagtagtttctccagtatggtgaaaggcaaagagggttcttttttttcccctaagtaaagcatctactaaatgcaaaagaaatgattgtggactctggaatctggaatccacgatgctagcactttgcagtaatagcctctttcatatatagatctcacaacagtttgtagacactaagtttttccatgctcctgcaactcacactgagtttttatttactccctttttactctggaaaagcagggcaggaagtttttaaagggttccttgcagttacaaagctagaatttgaacccagtgtcaaagcctctgggtcagattgggagggggcccacgttgtgaacttgacagttaattcatggttgctgttttatggagcaggaagtgacctttagtgactcagaggaaggaataagctgagggagggtccaggagaccagaggtacagtgcctggcatctcttatcactgcattctaagtggcttagccttgctgtgttcctgaatgcacacattgggattgcaactcacaccgaccactttaggttcttcttgagagataggctgtgagtcctgaatggagtgtgtgtgtgtagggggcttggctttcaggccaagagtggagtgagtgtggtacttggtggacagagaggccagttggttatcaagtgaaggggcgttagggaaaaagttcagagggcaaaaagctatgttgctccttctcacttattgtccatgagtattttcttttaaatggaaccggaatcataagataagaatgaccaggaggctctggtaaaggcaggtgcaagttttgtgtgacaagatcctcatggactaaaaaatgatcatatttctgaggttgaatcaaatacataaaagcagcagcaaatcacacacttcttcgaagagagttaccaagttgcaggggaaatttattagcacaaataagtctgaaaaggaaaagctatccatatatacaaggttaagttggaagaaggaggcagaaagaagaaattccagttgttatcattattttttattccaaattgcatctgttcactaaaatacttcggactgggtgcagtggcttacacctataatcccagcactttgggagactaggcgggcagatcacttgaggtcaggcattcgagaccagcctggtcaacatgatgaaaccctgtctttactaaaaatacaaaaattagccagtcgtggtggcacatgcctgtaatcccagctactcgggaggctgaggcaggagaatcgcttgaacctgggaggtggaggttgcagtgagccaagattgagccagtgcactccggcctgggtgacagagggagactccatctcaaaaaaacccaaacaaatattttataaaatagaaatagaaaaataatacaaatgaaaagtctattaagtatatatttttattaagcaatattaaaatgactgcaagtaagagtttatatagctatatgtacatggatatttatagatgagattacgcttacattcttgcccacaccatcttggaaaatgttaagataatatcgccttgactgaaaaacatacagcaaacatggtctctttggcattctgtcatccacatctacaggtgcctgtagcaatgtgtggtactataatataatggtaattgatgttcctaatttgggagtgtggaaagatccccaaatgtcttttaagtcatcagagaaagataaaataatatttgatacagcttttcttaaaatttgagataattttaatggcgagttattttatggccctttgtatcttgaaaaattgggaaatcacatatggtttaaaagcgaattatcttaattggaacatgccattaactagaaaacccattatttcagcttgcactctaacagacaatacgtggaaaaggaaacgcggccagggcaaaacatttcctcttcttataaaccttgaactgagtacgtccctcaccaattatagagggtccccttgggcctcagaactttccacaagcgttgaggtctctatggcgatgctcccggctgccgaggcggaaacacaggtgatgaggtggcggcaagcacagtgcaaagagagagaagcagcttcggctgcagcaaaccacgcaggtccttcttgatcatctagaactgaccgctccgccttgccaggagtctgcagaaccacgtggctagcctgcctgaagttctcacctctccaggaaggcggggggcttctaatggctgcagctgcgctgggggctgggggctcccgctgggactccacttccgtggatgtctaagcttcacctttcttgcgcccgcaggggcatgactcaggtgaaagggagccattttctcagacccctggcctcatgcagcccttcagcatccccgtgcaaatcacacttcagggcagccggaggcgccaggggaggtaagtcacttccggaagctctgccggtagtgggaatctggctgaacaagcagttgcaagaagaggggacatctcgagcttggggagtgagtgtttcctttttctctgaggatgcccacttgccatgcctcccagggtacccagcaggcttccccagtagcactcacatcacggggctgcagcctttcctgttggctctatcctctaggttgccagttcttggagactggagaccttttaaactcacctgtagctccccagcactgatcatagcccagcccatagttggtgctcaagaatgatctgttggttgaatgaggaatgaagaaattagaccagcatttggtcccattggtgaagccctggagtcacagcccttggattcaaacccagctcaccacttaatcagccatatgactgggcaggtcccattggtgaagccctggagtcacagcccttggattcaaacccagctcaccacttaatcagccatatgactgggcaagtcacttaacttctctgtttgcctcatctccttatctgtgaaatgcagatagtaagagcccctgcgtgtctcagcacagtataccacatcctc

SEQ ID NO: 9887 - DNA, 6000 bp, Homo sapiens
tgtgttcaggccctgtggctgggtgctagaggcccaaacacctgtactgcttctctcagagtggtaatgagaggatcaattcctaaatgcataaaaatataacaggaaatggaattccaggcactgagctgtgctttctgcagtttcattaagtagaggaaatgaaactggattcattgcaaagcaagtggtataatacggtggctaagaactcacgctcagtagccaaattgcctaagttgaaatcctggctccaccagaatttgggggatgttgctgaacctctcttcaattcagtttcctctgcctgtaaaatgggagtaagaactgtagatctcctcatgtggttgttgtgaggatttaatgagttattatgtgtaaaacacttaaagcagagtctagcacatagtgctcaatatacattagctattattgttattattatttgggacgtacaacacatcagaccacatgtttctaacacagacatgaccaagttgatatcagagagtgatctggttgtgataattttctctctattcgtggccaagcttcattcctgtcatctggccaatgaagtcaatgtccactcacttacttgctggtccatgaacatcctcctaaggctttctaactagaggagggagcctcagaaacaactactagaaactccagaccagccctccaggtccatgtggagaagaagatggggtagtcagctccctactaggaactactgattctgtccattatttcaagaggtataatgtgtttatcttattgctccaatcatgcatagcttcattcccaaaatctttacatggtctgtgatggctgtcagatttccagtcattctatttacgtttaaaattttttctaagtgatttatgcaatctgggtaaattaaggaaatggtccttatattgagcatttgtgtttagccaatattttgtatttttaaaacattttttgagatggagtcttgctctgttgcccaggctggagtgcaatggtgtgatcttggctcactgcaacctctgccttctgggttcaagcgattttcctgcctcagcctcctgagtagctgggactacaggcgtgtatgaccacgcccagctaatttttgtatttttagtagagacagggttgtaccatgttggccaggctggtcttgaacgcctgacctcacgtgacccgcccaccttggcctcccaaagtgctgggattacaggcttgagccaccgcgcctggcctagccaatatttttaatcataccgaaagtgcctttgcaaaattatgacagtaaaaaaaattcgacatagctgattccatcttgcttctaacctgtaagctgtccttgttcattcccgggcacaggccacagctaactttgggaggaatttagttcatagtctaaccctaaagcaaggattgtaatatccctttccaaaactattccctccttgtttgaacaccaaactacctttgtaaaactaatgaaaggccacaggcttaagagaggtctgaactttgctaagataaaggcatagttaaatgataatctgccatttttccagaggtcacaagatttctaacctccccatcactcctatagataacaccactattgtaaaacttaagatttgtgtttgaggtgtttttcataccctgcattctgacggaccagttgccaccacccagtctggtaaactggctcatcaggtcctgtggcccttactcaggaactgactcagtgcaagaagacaaacttcgactctctataatttcatccctcacccaatctatcagcttccccatccttagccctctgcccaccaaactatccttaaaaaaaaaaaaaccttaggtgggcccggtacggtggctcacgcctgtaatcccagcactttgggaggccgaggtgggcggatcacgaggtcacgagatcgagaccatcctggtgaacacagtgaaatcccatctctactaaaaatacaaaaaaattagctgggcatggtggcaggtgcctgtagtcccagctactggggaagctgtgaggcaggagaatgacgtgaacccgggaggcagggcttgcagtgagctgaggtcgtgccactacactccagcctgggtgacagagcgagactccagtctcaaaacaaaaacaaaaacaaaaacaaaaaaaaccccttaggctctgaattttcagggagattgatttgagtaataatacactcctgtgctccagcttggctggccctacaattgttaaactcttcctctattgcaaaaacctgcattggcttttccgggtaacaagcaagatgaaactgttgggcattacagtatgtatttcaaatactttttgccaacttattatgtattttccaaattgtttttcaaacataaagactttttcctctccaaacataattctgcaggtaccttttccctatttgctatactacggtaggtcaaggaaagctttctggaagaagtgacttgtaatccataactccatgggtgagaaacacaaaccgggtgaagagagcagggaacagtgtcaccagcaggaggaacagcatgtgcttcatcactctttcatgatatagcctctactttcagcacatctgctccactcacctcttggacatttttgatcccatacggctggcttgctcctgccccatcctggccttgactattccttttagcttagttccttccccacttgaactggtctatctcaagggtctaattttttagtccaaggtgagaatttgttgtgctagctcattcagtcttaggttggctgcataaggtggagtaatggtggcataggttaggtaatatgaaataaaatgacacttctcctcttttagcaggagcttaaggtggcagtctccaataaaaggcatgttgttttggtacataatgctgacatttatagtccagtatgcacctaccttcccaccttcagtctgtatgtcaatgcaggactcaatgaacactcatatatgatcagtaagttagcttaggcaaagctatgctgtggtaaaaaataatgctaaaatctcaatggcttcaaacaaacattttgtgcatgttacatggccaacactaactggcttaggatctgctgtattccacaccttctcactccaggacacaagcttaaggagagtccttatccgggacatgctgctctcctgggataaggaaaagagaaagatggtggaaccatatgactgctcttaaagcttatgtttggaaggggcattcattacttctgttcacattccattgctcaaagcaattccatggccaagcctaaggtccatgtggaggaaggatactctttccataggaagcggcagtaaatattttgaacaaatgaacattcttgcatagtttattacagccggtatcatttgtcccattttgcagtgagaaaactaaggctaaaagaggtaatttgatcaaggtcataggttagaattcagctctgaatggcttcaaatttggtccaggcaagctcttttcagatttttttttttttaacactatgtaggcacctggaattgtaatttactcaggggcacaaccacttctcttcaactccagaagcttctccgtgcatctctagagctaaaccacccatgaaatcttcctggaaggatgtgaagctagaaaggggttgggctcggggaactgtccctttgagagctgacttttccatttagtaattttttttaactcttgaagtatttatctgcttgatgggtttgtagatcctttggacggagatcacctatcatctatcaccttttgttttgtctgtgtgtgtgtgagagagagagtctgagttcctcaaagcttttttctaggtaatttttgatacttcagattacaatggatatctatattcacaaaaaatattagtgggatagaaagagtatctttaggtaggaagaggggcgcagaagttacagccaacacagagaatccttcaatgtttgtaaatatctgttaatttcccttgcctctggagcagttttcccggtttcagagcctctgctcctaggtgcacgtgcagtgtggtagcaatggataggttttgacttgccaggtttatgcgtgccattcagggcaggggattagggttaggccagtgagtgacctaggacactcaatttaaggaagcactcgcacaaacctgagagttcgcgcgcctcaccccagcccagccgtgtgtctgttaagcatttatcataatcctgctgcatgaaaatgcccggcgagcttacctgtgaggatcacctgccactcccctcctccgccagacaacgcggagggcctccctgagctgtgactttgctccgccggtgataatttccaggttactgtgtaggagcgtctggcgcagcatcgtgtgcggaagaccgagagagggagtgtgcgtgtgagcctgtcaggccgggcgggtccatatccgggtggaccgggtgggtggggctgcccctccctccaggtcccgaggtggataaggggtggggagtgacgtgcagagattccctttcgccccttcggatccaagagagggtggcagaaggaatgcgtgggtgacttggcgtggatttagggcgtgcccaccctgcagatcggcctcctagagtgtcccgagggcctgagaggccgcagggacacgaaggaagagaaggaggaacccgaagagggctcgcctagccggccacccgctccgaacttgcccgggaaactagtgcggagggaggggccgggccctggccgcggcgggaggaggggcggccgcagctgcatccagccccgttggcttccttcccagctctccttcgcctcctcctcctcttcctcctgtatgagtcaggcatttcccggggatttggagcaggcacgcgcggcccgggcgtccggagctgtagcagcagcagcagccgccgtgccggggccgccaccgcggcgggcacccgcgtcccgggcgcccacggaccatggagagggcagtccagggcacagacggcggcgggggtagcaacagcagcagccgcagcagcagccgtgctacctcggcgggctcctcgccctcctgctctctggcgggccggggggtctccagccggtcggcggcggccgggctcggcggcgggggaagccgcagcagcccgggctctgtggccgctagcccgtccgggggaggcggccgcaggagggagccggcgctcgagggcgtgctcagcaaatacaccaacctcctccagggctggcagaacaggtaacgcgccagccgcccgcgccaccgcgcgccgctgtgtgtgtgtgtgtgtgtgtgcgtgcgtgtgtgtatgtgtgtctgtgtatgtgtgtgcgcgcgcgattgtgccttcagcgaacccagtgatgcctcccaacggtgcccttcctgcgtccctgctcccctccaggtggggttctcaggatggggcgcgccgtggctccaccccgggaccgcaccgcagtggcggggagggaggcgagagccctggttttcttctatgctggcacctgcagagactggagtggtggcaggaggatcgtgctggtccccgtgctctgcttgtccgcggtttcccgcacgcctgaagaatgactgggaaagggaggcagaaggggcgtgctttgtgccggggtgaaaaagcgttagcacgtccgctccgattacagtaattctctaagtaacagttcattttaaagtttggtgtttcagaacaccaccaccatcaacaaaaaacctgccacttgtcatcctgggcgactgtgcatactcctgccccagtttgtgccttgcagcctccgatgtttgtaatggaagttttgtttaaaaacagaaagaggccgggcgcggtggctcacctctgtaatcccagtactttgggaggccgaggcgggcagatcacgaagtcaggagttcgagaccagcctcgc

SEQ ID NO: 9888 - DNA, 6000 bp, Homo sapiens
tgttttgttttgtttttgagacggagtcttgctctgtcccccaggctggagtgcagtggcacgatctgggctcactgcaagctccgcctcccgggttcacaccattctcccacctcagcctcccgagtagctgagactacagacgcccaccaccatgcccggctaattttgtttttgtatttttagtagagacggggtttcaccatgttagccaggatgttctcgatctcctgaccttgtgatccgcccaccttggcctcccaaagtgctgggattacaggcatgagccaacttcccacgtgtctgtttgcatagttgagtgatactgtttcatcctcctgcttggatgctagtttggctgagtatgaggatcaattttttttttttttttttgagacagaatctctctctgtcacccaggcgggagtacagtggcaagatcttggcccactgcaacctctgcctcctgggttcaagcaattctcatacctcacctcccaagtagctgggactacaggtgcctgccatcacacctgactaatttttatatctttttttttttttttcagagatggagtcttgatgttgttgcctgggctggagtgcaatggcacgatcttggctcactgcaacctccacctcccgggttgtagaaattctcctgcctcagcctcccgagtagctaagataacaggtgcctaccaccacgctcagctaatttttgtatttttaacagagatggggtttcaccatgatggccaggctggtcttgaacgcctgacctcaggtgatccacccgcctcagcctcccaaagtgctgggattacagatgtgagccactgcacctggccaaccctgtctctactaaaaatacaaaaatcagccaggtgtggtggcgggtgcctgtaatcccagctactcatgaggctgaggcaagagaatcgcttgtaccctggaggtggaggttgcagtgaaccaatatcacaccattgcattccagcctgggccacagagcaagactccgcctcaaaaaaaaaaagtatatatatataatgtgttctgattctttttttctttttgagacagagtctcactctgtcagcgatccctgctcactgcaatttctgcctcctgggttcaagcaattctcctgcctcagtctcccttgtagccaagattacaggcacccacgaccacaccagataattttttttgtatttttagtagagatggggtttcaccatgttggtcaggctggtcttgaactcccgacctcaaatgatctgcctctctcgacctcacaaatttctgggattataggcatgagccatggtgcctggccctgatgatgatgatgatgattattgagacagagtcttgctctgtggccaggctggagtgcagtggtgccatctcagctcactgccacctcccactccctggttcaagtgattctgttgcctcagcctccctagtattgggattacaggcacatgccaccatgcccagctaatttttgtatttttagtagagatggggtttcattatgttggccaggatggtcttgatctcccgacctcacgatccactcaccttggcctcccaaagtgctgggattacaggtgtgagccactgcgcctggcccctcattcgaatgagaatgcttgattgcctattttttcctgtgtgaaggcatttatgaatccctttctaaaaatttgctccaatgcatatagttgtttttttgtggtttttttttttttgagacggagttttgctctgtcacccagggtggagtgcaatggcgtggtctcggctcactgcaacttctgcctcctgggttcaaacgattctcctgcctcagcctcctgagcagttgggattataggtacatgccagcacgcctagctaatttttgtatttttagtagagagagcatttcaccatggtggccaggctggtctcgaactttgacctcatgatccgcctgcctgggcttcccaaaatgttgggattacaggtgtgagccactgtgcccggcccataattctttttttttcttttcttttttttttttttttgagacggagtctcactctgttgcccaggctggagtgcagtggcgcgatctcggctccctacaagctccacctcctgggttcttgccattctcctgcctcagcctcctgaatagctgggactacaggctactgccaccacgcccggctaagtttttgtatttttagtagagatggggtttcaccgtgttagccaggatagtctcgatctcctgacctcatgatccgcccacctcggcctcccaaagtgctgggattacaggcgtgaaccactgcgcccagccccggccccataatcttaaatcttctttgacaccctttatatcctttttatatcctttttatttatttatttattttaatttattttatttttttttgagaaagagtctcactctgttgccaggctggagtgcagtggcgtgatcttggctaactgcaaaatccacctcccgggttcacgcgattctcctgccttagcctcctgagtaggtgggactgcaagcactgtgccatcacacctggctaattttttgtgtttttagtagagaaggggtttcactgtgttacccaggatggtctcgatctcctgacctcatgatctgtatgcctcggtctcccaaagtgctgggattacaggcgtgaaccactgtgcctagctgctttatatcctattaattgacaacttaaaatttttttttctttagactatatccagaatctggccacctcttttttttttttttttttttttttgagacggagtcttgctcagtcacccaggctggagtgcagtggcacgatctcagctcactgcaacctccgcctcccaggttcacgccattctcctgcctcagcctcccgagtagctggaactacagatgcccgccacgatgcccgccatgatgcccggctaatttttttgtttgtatttttagtagagacggggtttcaccatgttagccaggatggtctcgatttcctgaccttgagatccacccgcctcggcctcccaaagtgctgggattacaggcgtgagccaccacgcccggccgaatctgaccacttcttactacctcctctgttatgccctggcgcaagtcaacatctctggccatggcttttagcctccttaaggctccttgtttcttcttgccccctggagtctattttcacccagcaatcaaagggggatcctgataacgatgtcagactatgtcgctccccactcagtaccctgcaatgacttctacgtccttcagaggagagacagtggcaagatctcggttcactgcaagctccgcctcctgggctcaagcgattctcctgccttagactctcgagtagctgggatcacaggcataggcgtctgccattacggctggcaagtttttgtatttttagtagagacggggtttgaccatgttggccaggctggtcttgaactcctgacctcaggtgatccacctgccttggccttccaaagtgctgggattataggcatgagccactgcgtcgggcctttaactttttttttttttttttttttttttttttgtagagacagtgtttcgctctttttgcccaggctggagtgcaatggcacgatctgggctcaccgcaatctctgcctcccaagttcaagtgattctcctgcttcagcctcccaagtagctgggattacaggcatgcgccaccatgccccgctaattttgtatttttagtagagacggggtttctccatgttggtcaggctggtctcaaactcctgacctcagttgatatgcctgccttggcctcccaaagtgctgggattacaggtgtgagccactgggcccggcctaactttttttttttagagacaagagtctcgctatataagtcaggctggtctcaaactcctgggtttaagcaatcctctcgccttggcctcccaaagagctgggattacagacatgagccataacaccaggcccaaacctgtcttctagtgcctccaaaacctctgtcgcctcatcagctactaccctccctcttcctgtggtttctcaaacatgtcaggcacagaccatctcaaggcttttgcattttctttttcttctgggtggaaggttcctcacccttgaccctgttatgtgtgaacagaactccctctctcatcttctcaggtcttgaatcctgtcaccttttcagttaaaccctcccttattcaacgaactaaaattgcaaatcacttgtcccacacaccctctaactctcttcctggatttttctccgtagtacttattactacttgatacactatgcattttttagttatttatctttgttatggtctgtaaattccaggaggacagggacctgtgtgttgtactaccaggggtgcctccagcacctagaaggacgcctggcatatggcagggcgcaattgatctctctggagtgagtggatgaatgggagctcagaggaaacatggaagtctgggaaggcttcctggaggaataggcccgctggcccacactcccaaaccccgcccatgcggctttgcgctctgccacgcccatcgaagcggggccgaggccggaagcagccccgggcggaagccctaccgtgccaactgggccctcctcccgacctgccccgggctcgtgccccgcccacccaaaagtgggtgaaaggtcggcggcgccggcactgcagctggggctgagaagccaggacggcccgagaactgacagacggagtgacagacggactgaccatggccgaccagccaaaacccatcagcccgctcaagaacctgctggccggcggctttggcggcgtgtgcctggtgttcgtcggtcaccctctggacacggtcaaggtgcgggaggctgggtcgcaggctttggggaggaggcccgggcggggcgcggaaagcatggtcccccgcgaggcgcggacgctgggcagaagaggggcatgtgtgagcttccgtgagaagtctagggaatctctctttcaggggtgggcaggaagctgtaccttgcgccccaaagagccaggcggcggcgcaaagtgagcagcctctaactgcctgtcaagagctctgatgtaaagttccctgtcccgcagtctcttctgaccctgcgccacttctttagggatgggaaggaataaacgtctctccatagttttggtttcagccaacactaatattatcgttaaggttgaaacaggtcccctgtaaagcctgccccaggaagacaactaaagacagagcggtacggttgttctggaggtgtcctttgatacattcccctggggcaagagtacccatctctttcgcacctttcccggcccggggagatacttgacactcttcggcctgtcacccaacggtggcctgctcagcctcctgggcagaggcatccctgtgagaagcaatgatgacctcagtgaccgagccccttccacggaaagcaaggtgatcagctttgcacaaggccagcctcattctcacaactcccagatgaggaagctatggtcagactgaggcttgggagggaggacgttcatcaggaattgttctctggtcttcctcatatcatatctcaactattccccttgcaacaccttcattaatgctttgcttggggaccaaagtccatcccccatggcttagcactcgaagctgcatccagttttctcactttttttctagacgtagacgtgaaggaaattgacaagtcattgccagggtgggcctgtggggagcagacatgagttttaaaagattggaagcccatgtgagggggtttgttaggatgttgggtcagatttcttccacagcgaaatagttttgtgggcacttcctcttggccagcttgggcagcaagctctttgctgcctttcatccaagagaggagctgccctgaa

SEQ ID NO: 9889 - DNA, 6000 bp, Homo sapiens
tgatgaaacaggcacaaagaggttaggtaacttgcctaaggtcacagggagtggaatctgcgtgtcagtctgatagaagagaccatgatcttgaccactatgcatacgcagcttctctccatgggcagggcaccctcatctcttacccagctagactggtagggaaggcacagagatgaagtacacatccttctttgatggctttcaaaaaagtacatttctttaccttccttattcaaacaatatgtcctcctctctctttggatgctgaatggaacagtcaaactcagatcctattgtaaaacattttggtaaaaagttttggctttaaaacaaagcaaaacaaaacatctatcctaccaactcccatggccatgactccacaagcattataaccttctgataataatttagtttatcttgctgagtttcttacaccaaatgtgctgacactcaaacctgagtactctagactgtatttttttttttttttttgagacagagtcttgttctgtcatccagactgaaatacactggtgtgatctcagttcactgcagcctcaacctcccgggctcaagcagtcctcccacctcagcctcccaagtagctgggactgcaggcatgtgccaccacactcagctcatttttgtttttttactagagacgagttttgccagttgcccagtgtggtctcaaactcctgagctcaaatgatccgccctccttggcctctcccgggtccaagcgattctcctgcctcagcctcccgagtagctgggattacaggcatgagccaccacacctggataattttgtatttttagtagagacagggtttcaccatgttggtcaggctggtcttgaactcgcgacctcaggtgacccgcccgcctcagcctcccaaagtgctgggattacagaagtgagccaccacacctggccagtaatttctaatcttatagctaatttgttagtcctgcaaaggcagactggtccccaggctaaaagaggggtcttttcgggaaagggcgattatcaattttgtttcagagtaaaaccatgaactgaattccttcctaaagttagtttggcctgtgtccaggaatgaacaaggacagcttaaaggctagaagcaagatggagtcaggtctgatttctttcactgtcataatttccttagttataattttgcaaaggtagtttcactattgcaaatccagtccatttgcagtactgtagccccatcccagacacagcttggatccatttacttctctctatccccactgccaccactctagtccaagccgctatgatctctgccctcattccctataatatcctcctacctagtcgccccgcttcctctttttctcccactaaaattaattctccatgcagctagagaatttgttttttaaaaaatagcattatcacaatataattcatccaccataaattcacccatttaaagtatacaatcgagttttcatatacttacaagattgtacaaccatcactattatcgaattttagaacatttttattacccccacccccagaaaaccccatactcattagcagtcatttcccattcctcctttctcctatccctagcaaccactcatctactttctatctcgatggatttgcctattctggacatttcacataaatggaagcatacagtatgtgacatttttgcgtcttgcatctttcacttagaatcatgttttttatatttttatcccacaagcttttttccacttttatatttatgtatttatttaaagagacaggtcttctatgttgcccaggctaccctcaaactcctgggcataagtgattccccccatctcagcttcccaagtagctgggactacaggtgtgcatgaccacacctggctttccattatttgtctttgttttttttttttttttgagatggagtctcactctgtcacccaggctggagtggtacgatctcagcttactgcaacctccgcctcccaggttcaagcaattctcccgcctcagcctccagagtagctgggattacaggtgtgcgccaccatgcccagctaatttttgtatttttaatagagatggggtttcgccctgttggccaggctggtctcgaactcctgacctcaggtgatccaccagcctcagctgcccaaagtgctgggattacaggcgtgaaccaccgtgcctggcctacataccacaaattctttacccattcatctgttcatggacacaggctggttccatatttatgctattgtgatagtccttcagtaaacatgtgagagcaggtatccttttgatatgttgatttctttccctttagatagatactcagtagtgggattgctgggttgtacggtaggtttatttatttacttttttttttttgagacagagtcttgctctgttgcctgggctggactgcagtggcataatctcggctcactgcaagctccgcctcccaggttcatgccattctcctgcctcagcctcccgagtaactgggaccacaggcgcccgccaccacacccggctaattttttgtatttttagtagagatggggtttcaccgtgttagccaggatggtctcgatctcctaacctcgtgatctgcccacctcagcctccccaagtgctgggattacaggagtgagccaccatgcccggccggtttttgtttttttctttctttcgttgagactgagtcttgctcttgttgtccaggctggagtgcagtggcgcaatctcagcttttagtaggatgagccgcagacaaaacctctcagacaccgagttgtagaaggaagggctttatccagctgggagcatcagcaagctactgcctcaaaatctgagctccccaagtgcacaatttctgtcccttttaagggctcacgacactaaagatttcacatgaaagggtcatgattgatttgagcaaacaagcggtacatgacaggggctgcatgtaccggtggtcagagagaaacagaacagggcagggagtttcacaatgttctgctgcacaatgtctggaatccatgaataacatcggtttctaagttatgagttgatttttaactactgagtttaggccaggcaggcccaggcctggtttccggcctggcgctgggctgcctgtctttggttttacttccttgctgtttctttttttcttaaaacaggtactgagtataaaacaatatgagagggtctctctccttcctcaggctcactgcaacgtccgcctcccaggctcaagtgattcttctgtctcagcctcttaagtagctgggattacgggcacgcaccaccatgcccggttaatttttgtatttttagttgagaatgggtttcaccatgttggccaggctggtctcgaactcctgacctcaagtgatccgcccacctcggcctcccaaagtgctgggattacaggcgtgagccactgtgcccagcctcaagtcatgttattataaactaaaattagcaattaggagagactttagaaatctacccatgcactcttgttttacaaatccaaaaccaaggcctaaacaaggtgaaagatttgtctggggtctggaagagtacctagctctgttctgagatctctaatttccatgacagcttctttttaatttataataatgattggctttactccaatgtcatgcttgccccccccccaccccaagtaactaaaacgtacagatgtttgcttcgttcttgtactttcttatttttgtaagctttcttcctaaaatgcctggaacggcccctcaaatggaaggctaggacgtggttaggaaggcgggcactcggccgggcgcggtggctcacgcctgtaatcccagcactttgggaggccgaggcgggcggatcacgaggtcaggagatcgagaccatcccggctaaaacggtgaaaccccgtctctactaaaaatacaaaaaactagccgggcgtagtggcgggtgcctgtagtcccagctacttgggaggctgaggcaggagaatggcgtgaatccgggaggcggagcttgcagtgagccgagatcgcgccactgcactccagcctgggcgacagagcgagactccgtctcaaaaaaaaaaaaaaaaaaaaggaaggcgggcactcacacaccagaagggaactctctagtgctgctggctcctttgtttcttcctccttcactgtccgggttcctcgttccgttgcggcgccctccctcgccctccctcgcccatcagccagtcgcccagctaccagctcccagagcctccgcctccttcagggacccgccgccctgacccaagatggcgccagacgcttcggctgtgagggaagtgagctcacgctactccggaagggaaggcgggaagggagcagggggcggggggtggctgacccgctgtggggctgtggggctgtggggctgtgggtggggcggcggccgcggccctggcattcgcgcttgggtctggagatagcgcgagagactcaccggctcctgggaacccagtcgagggcccgggccaggggcataagaggaagttgtcccgagtggctcgcctctggccctgggagaggcggccccgggagccggcgtcccgcccccggcggcctcattccccgaccctcctccccggctgcgcgcgccggccctggctgtatctcgggggctgcggcgggaactgccgagcgggcttgactggacgcactgcctgaggacctgcggaggagacgagggagcgcggcgggtcagccccgaggttaggccgcgggtcccctgtccgtggcgctccgtccttttcccagccgtcttggctacagaatctgcgacctccccacactccttctcttttgagtatgtcacttaagtcttctcgccggatgctttttcctccttgcttttgccggaaaggagagagatacatgtgaaggatatctgtcctcgttgcttcccctgccctctcaaaagtttaacttctgtgggaatgtgtatcttccttttctggaccatttgacagtcccgccccagccgccgtgtgatttagcaaccggtatcatattcagatcaaatcttaaaaaaaaaaagtcacctacagaactacagaattgttctctcccgctcaagaagggcaagtggactttggcgttaagatgcaggggggtgaaccagtgtccacaatgaaagtctcggagagcgaaggaaagctggagggccaggccacagcggtgaccccgaacaagaacagcagctgtggaggtggaatcagtagcagcagcagcagccgcggtggcagtgcaaaaggctggcagtacaggtatgctcctttctccaaaattatttcccgaggtggaggtaggggtgaatatgccctggaggctgcatcccgcaattgttgaaagataaaagttttttcactggcttccagaagctactgatacatctcgtttggatctgggacctcgcctaaaagatttaatccattcatttgttcattcaacaggtatttatggaaggccttttgaggaacacagaaatgtatccctgaacttcctctacagtcagagagttaatgcttcctcagatttaattctgtactcacttctgcttttgcctatgttgcaatttatttacaagccagctttctctgatagactgcgagggcaggaactgtttaactcagctttctcgagagggtagcaaatactggtgctcaaaacttacttgtccagagcttctccagaatcagaaaagattcttgccctgaaggtatttgtgacttggaaaggggaatgtacataagtaattggaatgcaaggacaaaggtagagatcctaatgcctctgataaactaaacctgagcctggagatgttcagtttgcgttgctcaggccacttcaatgctctctgtgttgatgagaaagtctatatttgttaattttcactaatatgaatga

SEQ ID NO: 9890 - DNA, 6000 bp, Homo sapiens
aaacaaaaaagaatcaaccttgtattagaacctggcacagactgttggcactgttaaaatataaaatagtggtcagggtgacttgcagaggaacaggctgccccaccagtgacagtgacaaagcagtggagcacttgctgcaaacatggcctctgactcaggagaggcagtcactgttgagagttaatccatgatcacacttgggtatctaaattgccaaggaagcttcatcagctgctgcaggagtgggcagtgtggcccaccaagttcatggccagccagtggtgagaagagacaaggctgagacccagagacaacccagaggccttcagggggcagaaggagcggggtttgggcagagagaacaatggcatggaggtctaggagcaatgaggccttttccagtcacgagggcccttttagaatttatttctgcttaatagcacttaataaacatttttgagcaatgggatatgttaggtcaaatgggggatataaagagagttgacacagaacctttgcccttgaagagcccacagctgagttgaaggaagagacctagagcacagtttactaacatcaaaccaccaacccccacagcaagagcagcttcccagcattgagacctcactatgctccaggcattccatgcatcatctcatatgcacttcataacagctcatcacgaagagaagtcaccgcagatccaatgggttaagcaagctatcgaaggtagtcagcaattttgtctgactacaagttcgtgtaataataatgtgaaccactccttgaagagtagaatccaagcattgtgaggctggcagtgcaggcaggggaatagcatgagcaaaaaccagaggtgggaatgaatttaactgccccaggaggaggcccaagacagctggagacaattcaggcagacaggagagcccgtagctgctcagctgctccctgtctttttccttccctccgcaaccttgagaaagttgtcgatgggttctatttgcattttctcctatccagttcctcctgcccacatcacccactgcagacactcttgccaagttcctcaatgccagcgttgccagcctggtggccactcctcaggccttctcttgcctccccagcagcctggccatgtgcccgccctcctccattttgaaagagtaccctcagctctatcaacacctcctcccctggtttactttcctccactctggctccgtcccttgtgccaccttgatattgctgtggcccatcctggacctacttctcatcaacacagtctccctaggagactcatcccttcttgaggcttaaccaccacctccacgtgggatttccaagcccatatctctagcccagtgtccaccctgagtgctggacccatatacccatctgactcctgaagatctttacttgggtatagtctgggaaatttgaatttcaaatgtgaccaggatactcactggcttccttcaatagtgactgctccttctgggccccctctgtcaggagtgggcatcaccaacgctagttgcccaagccagatcctgggagtcatcactaacatctctcctctcactgatatgtgggtgccacctcgctttgacatttcttaagcttttctctccttcctaccaccatcccactgctgccatgccagcttttatcatagctcctgggattccttccacagactacctaattccactctggctgccagagaggtccatgtgaaatgcaaattagcccaggtcacccttggttagaagcctttaacggctccccattgtgctggggagaaaacctaaactcccagcctctttgcttcacacacacatacccactgcgcttggtcttgagctccagccagactgaaaccatggagtaggtttaccctctttaccctaatcctctcaatcctactagttcttagggctcagcttgacagtcgcctcctcctagaagtcttcctgctgtccaaggtgcattagggctccacttctatgctcccatagcagctgtgcacaatagctttcttcctacatcacagccacactttctcttcttgtttcccaccctgagaccatagagtctttgaggtcaggagatgttcttgtggtttagctttttttaaaatttatttatttatttatttatttatttatttatttatttatttatttgagacagagtcttgctctgtagcccaggctggagtgcactggcacgaccttggctcactgcagcctctgcctcccaggttcaagcaattctcctgcttcagcctcccaagcagctgggactacagacacctgccaccatgcctggctaattttgtatttttagtagagaaggggtttcaccatgttggccgggatggtctcaatctcctgacctcaagtgatccgcccgcctcagcctcctcaagtgctgggattagaggcatgagccaccgtgcccagcctattttttgtattttttcagtgctaggaaatatttactgaaatttaaggatggaaagtctgggagaccgactctaggagtgctcttgaaaggaaatgggttactccatgtgtaggtgttgaaaatgtaaaacacaatattatttctccctttttccctaataaaaccccaattttgttcagaggacagcaatagtgttaattacacttcttagcatcctttgcagggggtagctatgtgacccaggtttggccaagaagacttaagtaaaagcaactgtgcacgcaagggagagatttgctcccttgatgtaagcatggccccttcctgtttcctgtcttccacatctttcctggaattaggagaggaggctggagatggagcagccatcttgtgacaatgagccagccacagggatgggaaccacaggctaaggaatcttgaagggcctaggtcatgacccctggactacctactagcagacttctaattattgagagacaaataaatctcatttaagtcattttggttggctctccattacatttagctgaactccacccagtaaaggtcaatgaaggaagataagcatctgtgagcatttctgaataggcttttcctttggagatgatgctggcgctgacgggaggcagagggccaggttaatggaacaggactaggtgagggctggagaggctgatcctcccaggggttctaccagaggatcacagtgaggcctcagggtttgagaaagaagctccaggcatggtagccctaaggtgtctgtgaccttggcctgggggttttctggtccctgtttggttcaacttgcaaaatggggctgttggactagacaacttatcagaaggcatagtgcttcaagtctgggcttaggagtcagacaaggctgaattcagggtccagctccaccacttgctagctgtgtggctttcagacagctttcttagccgactgctctagcatccttgtttgtggagtccagactccatcagtacctatacctgtagggctaacgttggggcttcatgaaatcatgcatgtgggtgctcagcagagggcctggtatgcccagcacacaccaagtgctccatgctggtacctgtccttgtgtgccatgttctcccagtggacagatgggacctggaattcatgcctcctctggggctggggctggggctgctacagtgctgtggaaagcctgtcaggatgtacctcgctctgtggctgagtgaagaggccagaggctgcccactgttcaacatctttggaatgctgccgtgtccagggaacttgggtcgcaggtggatagaagcccccaagcccaggccaggccagaccaggcccagaaaggtatcaggtcttgggtagaataagaagcctatgtggtctatctatcctgtggcctttgtcttagccaaagcctcctggatattgacggcatcttttcctgggtttggggtgggcttggagaggttccctctgcacgggactacagaagtgagggagctggaaaaatgcctccagagctggattcctcactgcagctgcttttggaagaaccttcttatccttcccttgagaagcctcactgtctcttctcggcgcttggaatcctgttagtagaaaatcttggggaaaaaataaacccactattcattccagcactgagaaggaggtcagtggggtgcgtcctgtttgtccacaccccccccaccccctctacccctccccccagcaccccaggccagacccagccatgctgacacttgacagcccctgcagtttaccttggctcaggtccagagacttcgggcccagcccccaccttttcaccttgttacccagccccctctccagcgcaaagagcagtttaaatataaatcagtcctcaacacaaacagagctgcagcgagtctcagagccatcaccggaactgagggcccaggttttctgcgagtgcaaacaagcagagactggctccgtaaatctccccaagaacgtcgggaggggtgctggggctcccctccacccccggctcacgttggcccctccagcgcccgcctcgggcaccctcatatcccagccttcctgccccccagccctgccaacctctttctccatcccctccactcacccaccttcgcttcgcccaccctctcttcgccagtccccaggaacctccacccccttgcaacctcctgcccccgcacagccctcacctcccctccccgggcccgccacctccttccctccctctccgcctcccggcaggcgggatcttctcggggcagtcaagcctcgcgggtcgctgcggcgtcacacctgtctgagggggcggcggcggcggcggcggcggggcgggggctcgtagcgcctttgacacccgaggaaaagagggaggagggagagcgcgtttcatcatcggcggcggccacttataaaaacttctaggcgcgcactcgctggctcagtctccgctccgcgaatctcctccggccactgccgccgcggtcgcctctcacccgcccggccgctccagcccgaggcgccccgaccccgcgccactccgcgcccggccagccgcccgcagccatggggctcctgcccaagctcggcgcgtcccagggcagcgacacctctactagccgagccggccgctgtgcccgctcggtcttcggcaacattaaggtgagcggagtccgcggggtcttccgggccggagccgcgcctggcgcaccttcggctgggcacccgcttctgtctgccggagccaggaggctccgggagccccgggctccctcctgtgccgcgctccgatctcatccccgggcgacgcgtgctgggcgtgtgtgtgcgagtgtgtgtgtgagcgtgtgtgtgtgtgagcgtgtgtgtgtgcgtgcgagtgtgtgtgtgtgtgttcacacgccttcatcggactaagtaatgggacagtggaagtacctgcttaccgcttactcggacaactccaggcagagttataagcgagagaattgtcctcgatgattgaaaaagatcatctcgaggaacgctttttcggcctccagcgggcggttacttcgtcaatgggatgggcttggaggtgccagggggaccccccgcgctttgggggacagactgtgtctcgtccgagccccctcgtcctggggtgggtggcctaagggatgttctccttccccaggctttcttctcccgccaacgggggcggggggctctgctacctggctgtgccgctcgcagttatgtttagaattccctctcagcgggcggcttccccaggctggcaaccaacccgcgtgctcagattggcttccctggtctggaaatggccccaggaaggtcacagctctcacggttcagtaaggtctaagcaggtccactcaccaggcaagttatggggagcgggtgagaagatagggtgttggcagctgttaggatgagagcacctttcccatggggtcggaaatgctttccactccctcacaggtc

SEQ ID NO: 9891 - DNA, 6000 bp, Homo sapiens
cccgggttcacaccattctcctgcctcagcctcctgagtagctgggactacaggtgcctgccaccaggcccggctaattttttttatatttttagtaaagacggggtttcaccatgttagccaggatggtctcgatctcctgacctcgtgatccacctgcctcagcctcccaaagtgctgggattacaggcgtgagccactgcacccagccaaaagttgtccttttaaaaaatgagatagagcagattctgatgcccatctgatagctccatcactatagaaatatttagggcaacagattggcgaggctgtgtccttcaagcagactgacccttgaagagttctgaaaggcacacaacaggaagtgccctggatctaaatgatggtgaccaccggtctcactgcatagtttgggatctactaaagttattcagtgtgcttggctctatatcactttgatgtttttctccatatactcggtcgttggctttcttagttcattttacatttactgagtactccttagacgctgtgggtaccagaatgaatgagccacaaatgtcgaccttaacaagatcatagtctgtgcttcctattgatggtccaagatgttctcatcaagaaaaacagccctctttgttttgtctgtgttatagctgagaatactgtactgaactaggagatgtttttctcttgggaatgatcatgtctcacagtataactagcacagaattacattaacaagtttactcaacaataagaaccatatttaccatttattcagtggttgttatgagatgctggtaaacttactctctcggagtttctgttacttcacttggtacagcttaactttccagtttccctgcatcacagcacagcttcctgtaacagtttgttacttctggttctttgccagtccagcacttttcaacttaatgtttcactcttgcaataacttcctatctgacctttcttctctctccaacctatcacatatagtgtcaatggactagtactctgatttcatcctgccattaacctgatcagaaaattccagagattgcccatttcctgtaaactcttatgactagacagaaactcaccccacactatgcctccccttacttacccaatctcacctcttattacaccaagttagttgtacctcaaacatcttgagctttcttgactctgtatttgctcctgcatttcttcctgttggaaagtctttccctcctaccttcatcctcccacttcaagttcagcttaaattcagctcctttcttctgaagccttccccaactgctattgctcacatcaattttctgaaatgagtgtctactgtcagtatagttcttcaggacttaatcccatactgacttggattgttatttaactgattcccctctgcaacttctttttctaactagattttaaactacccagggaaaagaggctcaccttaaaagttgcctttgcgtctcctcctagttttaggcagttgttatgcatacatttgatgctcaacacatgtaagaaataagtgtggattgaatgaattaccactggctccaagcatttttttccctttcctttatagctggtgcctgccttcttaagtccttaagttctgtatttagccatctcaatgtttttcaaacctttctaaccataaccaataggaggaaattgcttttatattgtgacctgatgtacatgtgtatgaaaaattcacaaaacaatacgtgtaagtacttactctgtgtcatgtattctgctgttttctattctattttttaaaatacagatcatgacacactaaactgatttcaccaccaggtggttatacttacagtattgttggggctcagaaatcaacatcccaagtatagtgttttgacatgctgaactgaagaagccgcaaaatctctctggcctcccctctttgctccaccatctctcccaaagcacaagatgaagttgaagttcctttatctgcccaagatctagacccatcaaaaggaataattgtttttccttcccttcctgtaagaccaagaatgtaatcacacctaatagaccctttgacaaaataacatacaagttaattaatctctgttccctgatccattcatcttccctagtaacttcctcaacagaattcctcttctccccactcccataacctgttttgccaggatggtatattagcttgtcaaccacttagggggttggcaatcactctatgattctccccatgtgcacactgtgtgcacattaagtttatatgccttttctctaatctgcctttttcaagttgatttttcttcaaatcttcagagggccaaggggagagctttcccttgacccctgcagtataaaaacgctctcctatcttatgctccttgtaagaacatgaggtgtatagtactgctcttaaaaaaatgcttaaaatggccgggcacggtggctaacgcctgtaatcccagcactgtgggaggccgtggcaggtggatcacgaggccaagagatcaagaccatcctggacaacatgctgaaaccccatctctactaaaaatacaaaaattagctgggcatggtggcgcacctgcagtcccagctactcggctactcgggaggctgaggcagaagaatcgcttgaacccaggagacgaagggtgcagtgagccgagatcaggccactccactccagcctgccgacagagtgagactccgtctccaaaaaaaaaaaaaaaaaaaaaaaaaaaaggcttaaaacactacctgggctgctcattctgttcctgacagtttgagcttcaatttgatctttacatagttaccctgagattacttcttaccatattccaccagagcactaggaatcaagcccttccttctcccaacttcttccttttgaaatttggggcacaattaaataatgatacacaaagtattctccagatcgctatttcttatgttatcttgaaaaattttagcggcatataaataaaaatttccaggcctaatttgtaatcaaaccatttgcagatgaataaaagtaggcatggccatatttttatttttggacgtagcttaagaacatgagcactattgcctgacaatccagaatctgaatcctagctttgccaaattagtgtgagcctccatttctgcatctatacaaaacgggaataatacctacttcaagggattgattggagttaaattacagcatacaagtaaagaacttgatacaggacctgggtgctccatgaatggacacagtgctccatgaatggcagtaaggttttgtcactaaatatatctcaaaacttccttttagggtcataaagtaaggtttagccacaagaataaaagtaagatgacttttcaaatatctagctattttttgaagttggatgatttataatataaaattccatgttggttttacagatcataaatatccccaaagaaagattctatttgtggtgctggataagcattatatagtaagaaatgtctactgaaactagaagattgaggatgcatattcaacgacctgcctagtcatgctaatctcatttagatttgttcttgcttaattttttttttttttttttttttttgagacggagtctccttctgccgcccaggctggagtgcagtggcgccatctcggctcactgcaagctctgcctcccgggttcacgtcattctcctgcctcagcctcccgagtagctgggactacaggcgaccgccaccacgctcggctaatgttttgtattttttagtagagatggggtttcgccatgttagccaggaaggtctcgatctcctgacctcgtgatccacccgcctcggcctcccaaagtgctgggattacatgggattacaggcgtgagccaccgcgcccggccgcttaatttttttttttttaaccacaaacgtctgtcggtgaagtgtgctttaattcagcaaaaatacagcattcaatacatatacataacacaatatgtatacggggctgcttttaaacaacgccaaacctttaagtcaaagccttgttccagttgcttgtatattccttctgagcttgtcatccacacacttttttaacctaggtcaagttactgctacgggtgtttttgattgcagaagtttggcagttagcagtaaagaactacctttttatacaaattatcttcccctgaacctgtccaatttagcacacggcaagacagaatatctcatccattcgcctagaaacacgggtccaggctgtaccaggctcaggggacttgcaacgctttcgaatcacttaatgggtgtgatcaagatttccctagccccgtctcagccatttgctaaagaagaggcctgacttgtgttgagacgaaagctcttacagcttgatggaacccaaactgggacttctggggggattaactttcagtcacatacgttcaggactgtgcgtatgcgtgtcgggagacgcgtgaaccaaagaagccacagagcccgaaaaagacctgcaacaggaggtagagaccgaggaatcggccccaagctgcagactccggagatggccagacccacagacacgacttaatcccactcccagaacggggaggagggtggcagtggacagaaacagcgttcgagaacccggcacctttccacgctcgcttcttcccggacccacaacacagaaaccccccaactcggaacggcggcggggcgcgccaggcccccctcggtccgcgcaccccctttcgtcacgtccgggggcgggccggggcgccgggggcggtcccgggtggagccggggggccgggcggggcggggcgggggtggggttgcgggggtgctttgggtgacaacggtcaataatgaaggtggctgcggcgcggcggcaggctcagctgcgccgggcgggggcggcgccggggccgcgcctgtaggactcggggccgacgccgcgggatggggacgcggcgcggggagtgaggcagtggcggcggcggcggtaagcggaacttcggcccgaggggctcgcccgctcccgcctctgtcttgtcggcctccacctgcagccccgcggcccccgcgccccgcgggacccggacggcgacgacgggggaatgtggcgctggatccggcagcagctggtaggtgcccccgcccctccacctccattcgtccgcccccgcggggcctctcggcccggggtggcggggaaaggccggcggcgcggagccgggaggccagggcgtgggcgcccggctaggccgcagcggagacgggcgcggggcccagagccggagaagccccgtgcggctcccgggctcgtctcgcctccaagcccgggccgccgaggctggcgccgagcggccggaggcggccgcttctagccggcgcttctccgttacttcttcccccttgccgctccggggctgctgtggccagaggcgggagtcccgagcggggtggcggtgcccccagaggaaacagggcgagggagctgagcgagagtaggtcttggggagatgagagaggcgtgctcttcctgcctcgaacaatttgggacgtgtttgggtgaaggggaagcgaagaacctgtcttctgcccccactcgtcacggacttctggaagcgtgtcacgatccagagctgtgttgattcccgaggaggaggctgtcgtaggtgtctagccccctcagcgagagacgtttctccccaggacctggaaaggggaaagactgtgccagctgccggtctagcttcggaaacgatacgtattgtacgatagttacgaacgatacgtactgtcgtttccttcctacctcgtcctcaccccaccccgagtgaaacttttcgagtgtgaaccttacttttttcccgttctcctcaaggcagtttgaacgacacaggtttggaaggaatagttaactctccagtattattggaacatctggacaccaccaacaaaaa

SEQ ID NO: 9892 - DNA, 6000 bp, Homo sapiens
ataataaataggccaggcgcctattttatttgtatatttgtattttttcgtataaaaaaatataaacttttttttgtatttttagtagagacagggtttcactgtgttagccaggatggtctcgatctcctgacctcgtgatctgcccgcctcagcctcccaaagtgctgggattaggcgtgagccaccgcgcctggccctctcagggtaatcttaatggagctgtttattcactggatagtggactgtccataccttaattctggtattttcttcttcccactggatggtaaggttgcatgtacacgtcacagctgaagttcaggcagcaagaacactggacttggagtcagaaggccttggttcagaatcaactcctcctctttgagtttctgtttcttcctcagtaaaattaggcttcatttatcatgcaataaacatgtattgagtatgattgtgttcaggccctgtggctgggtgctagaggcccaaacacctgtactgcttctctcagagtggtaatgagaggatcaattcctaaatgcataaaaatataacaggaaatggaattccaggcactgagctgtgctttctgcagtttcattaagtagaggaaatgaaactggattcattgcaaagcaagtggtataatacggtggctaagaactcacgctcagtagccaaattgcctaagttgaaatcctggctccaccagaatttgggggatgttgctgaacctctcttcaattcagtttcctctgcctgtaaaatgggagtaagaactgtagatctcctcatgtggttgttgtgaggatttaatgagttattatgtgtaaaacacttaaagcagagtctagcacatagtgctcaatatacattagctattattgttattattatttgggacgtacaacacatcagaccacatgtttctaacacagacatgaccaagttgatatcagagagtgatctggttgtgataattttctctctattcgtggccaagcttcattcctgtcatctggccaatgaagtcaatgtccactcacttacttgctggtccatgaacatcctcctaaggctttctaactagaggagggagcctcagaaacaactactagaaactccagaccagccctccaggtccatgtggagaagaagatggggtagtcagctccctactaggaactactgattctgtccattatttcaagaggtataatgtgtttatcttattgctccaatcatgcatagcttcattcccaaaatctttacatggtctgtgatggctgtcagatttccagtcattctatttacgtttaaaattttttctaagtgatttatgcaatctgggtaaattaaggaaatggtccttatattgagcatttgtgtttagccaatattttgtatttttaaaacattttttgagatggagtcttgctctgttgcccaggctggagtgcaatggtgtgatcttggctcactgcaacctctgccttctgggttcaagcgattttcctgcctcagcctcctgagtagctgggactacaggcgtgtatgaccacgcccagctaatttttgtatttttagtagagacagggttgtaccatgttggccaggctggtcttgaacgcctgacctcacgtgacccgcccaccttggcctcccaaagtgctgggattacaggcttgagccaccgcgcctggcctagccaatatttttaatcataccgaaagtgcctttgcaaaattatgacagtaaaaaaaattcgacatagctgattccatcttgcttctaacctgtaagctgtccttgttcattcccgggcacaggccacagctaactttgggaggaatttagttcatagtctaaccctaaagcaaggattgtaatatccctttccaaaactattccctccttgtttgaacaccaaactacctttgtaaaactaatgaaaggccacaggcttaagagaggtctgaactttgctaagataaaggcatagttaaatgataatctgccatttttccagaggtcacaagatttctaacctccccatcactcctatagataacaccactattgtaaaacttaagatttgtgtttgaggtgtttttcataccctgcattctgacggaccagttgccaccacccagtctggtaaactggctcatcaggtcctgtggcccttactcaggaactgactcagtgcaagaagacaaacttcgactctctataatttcatccctcacccaatctatcagcttccccatccttagccctctgcccaccaaactatccttaaaaaaaaaaaaaccttaggtgggcccggtacggtggctcacgcctgtaatcccagcactttgggaggccgaggtgggcggatcacgaggtcacgagatcgagaccatcctggtgaacacagtgaaatcccatctctactaaaaatacaaaaaaattagctgggcatggtggcaggtgcctgtagtcccagctactggggaagctgtgaggcaggagaatgacgtgaacccgggaggcagggcttgcagtgagctgaggtcgtgccactacactccagcctgggtgacagagcgagactccagtctcaaaacaaaaacaaaaacaaaaacaaaaaaaaccccttaggctctgaattttcagggagattgatttgagtaataatacactcctgtgctccagcttggctggccctacaattgttaaactcttcctctattgcaaaaacctgcattggcttttccgggtaacaagcaagatgaaactgttgggcattacagtatgtatttcaaatactttttgccaacttattatgtattttccaaattgtttttcaaacataaagactttttcctctccaaacataattctgcaggtaccttttccctatttgctatactacggtaggtcaaggaaagctttctggaagaagtgacttgtaatccataactccatgggtgagaaacacaaaccgggtgaagagagcagggaacagtgtcaccagcaggaggaacagcatgtgcttcatcactctttcatgatatagcctctactttcagcacatctgctccactcacctcttggacatttttgatcccatacggctggcttgctcctgccccatcctggccttgactattccttttagcttagttccttccccacttgaactggtctatctcaagggtctaattttttagtccaaggtgagaatttgttgtgctagctcattcagtcttaggttggctgcataaggtggagtaatggtggcataggttaggtaatatgaaataaaatgacacttctcctcttttagcaggagcttaaggtggcagtctccaataaaaggcatgttgttttggtacataatgctgacatttatagtccagtatgcacctaccttcccaccttcagtctgtatgtcaatgcaggactcaatgaacactcatatatgatcagtaagttagcttaggcaaagctatgctgtggtaaaaaataatgctaaaatctcaatggcttcaaacaaacattttgtgcatgttacatggccaacactaactggcttaggatctgctgtattccacaccttctcactccaggacacaagcttaaggagagtccttatccgggacatgctgctctcctgggataaggaaaagagaaagatggtggaaccatatgactgctcttaaagcttatgtttggaaggggcattcattacttctgttcacattccattgctcaaagcaattccatggccaagcctaaggtccatgtggaggaaggatactctttccataggaagcggcagtaaatattttgaacaaatgaacattcttgcatagtttattacagccggtatcatttgtcccattttgcagtgagaaaactaaggctaaaagaggtaatttgatcaaggtcataggttagaattcagctctgaatggcttcaaatttggtccaggcaagctcttttcagatttttttttttttaacactatgtaggcacctggaattgtaatttactcaggggcacaaccacttctcttcaactccagaagcttctccgtgcatctctagagctaaaccacccatgaaatcttcctggaaggatgtgaagctagaaaggggttgggctcggggaactgtccctttgagagctgacttttccatttagtaattttttttaactcttgaagtatttatctgcttgatgggtttgtagatcctttggacggagatcacctatcatctatcaccttttgttttgtctgtgtgtgtgtgagagagagagtctgagttcctcaaagcttttttctaggtaatttttgatacttcagattacaatggatatctatattcacaaaaaatattagtgggatagaaagagtatctttaggtaggaagaggggcgcagaagttacagccaacacagagaatccttcaatgtttgtaaatatctgttaatttcccttgcctctggagcagttttcccggtttcagagcctctgctcctaggtgcacgtgcagtgtggtagcaatggataggttttgacttgccaggtttatgcgtgccattcagggcaggggattagggttaggccagtgagtgacctaggacactcaatttaaggaagcactcgcacaaacctgagagttcgcgcgcctcaccccagcccagccgtgtgtctgttaagcatttatcataatcctgctgcatgaaaatgcccggcgagcttacctgtgaggatcacctgccactcccctcctccgccagacaacgcggagggcctccctgagctgtgactttgctccgccggtgataatttccaggttactgtgtaggagcgtctggcgcagcatcgtgtgcggaagaccgagagagggagtgtgcgtgtgagcctgtcaggccgggcgggtccatatccgggtggaccgggtgggtggggctgcccctccctccaggtcccgaggtggataaggggtggggagtgacgtgcagagattccctttcgccccttcggatccaagagagggtggcagaaggaatgcgtgggtgacttggcgtggatttagggcgtgcccaccctgcagatcggcctcctagagtgtcccgagggcctgagaggccgcagggacacgaaggaagagaaggaggaacccgaagagggctcgcctagccggccacccgctccgaacttgcccgggaaactagtgcggagggaggggccgggccctggccgcggcgggaggaggggcggccgcagctgcatccagccccgttggcttccttcccagctctccttcgcctcctcctcctcttcctcctgtatgagtcaggcatttcccggggatttggagcaggcacgcgcggcccgggcgtccggagctgtagcagcagcagcagccgccgtgccggggccgccaccgcggcgggcacccgcgtcccgggcgcccacggaccatggagagggcagtccagggcacagacggcggcgggggtagcaacagcagcagccgcagcagcagccgtgctacctcggcgggctcctcgccctcctgctctctggcgggccggggggtctccagccggtcggcggcggccgggctcggcggcgggggaagccgcagcagcccgggctctgtggccgctagcccgtccgggggaggcggccgcaggagggagccggcgctcgagggcgtgctcagcaaatacaccaacctcctccagggctggcagaacaggtaacgcgccagccgcccgcgccaccgcgcgccgctgtgtgtgtgtgtgtgtgtgtgcgtgcgtgtgtgtatgtgtgtctgtgtatgtgtgtgcgcgcgcgattgtgccttcagcgaacccagtgatgcctcccaacggtgcccttcctgcgtccctgctcccctccaggtggggttctcaggatggggcgcgccgtggctccaccccgggaccgcaccgcagtggcggggagg

SEQ ID NO: 9893 - DNA, 6000 bp, Homo sapiens
gttttccctccctcccttttttttcaagacattcatctgtcgaagaaaccatgttgtttgttgtctctgtagaattctgtgaatctctgaaaatgttatctgaatgggaaattaaatctttcaattgtttttcactttaaggaaagattaaggggaatgaattagtgatagatgcatggaaaattaagcaaatgaaaaaccaagcagtacttactgcaggagaaacaatgtctggagagggaattattatcctcacagcacacttcttgaatcagcttgaatacttgtttcacagttctagtattgtaaatgcagaataatgataccaaaaaactacagaaaaatatggaaagtaatagaagaactacattttcatattatcttcatagtagtcaatagattaacccccaaaactgaaaataattaacattagccgcataaatctgatgtgaaaataggataaataccagaagaaataaccagaagtaccagaaagacttgacaataattacttccagaaagtgggaattgagagtgaaagggaatggggtaaggatctgctgattttaaagtggcatcagatttcacacacaaaaaaaataaataactcttggccaggtgtggtggctcacgcctgtaatcccagcactttgggaggccaaggcaggcagatcacttgaggtcaggagtttgagaccggcctggccaacatggtgaaaccccatctctgccaaaaatacaaaaatcagccaggcctggtggtgcattcctgtagtcccagctactcgggtggctgaggcaggaaaacggcttgaactcaggaggcggaggttacagtgagctgagattgtgccactgccctccagcctgggtgaaagtgagagactctgtctcaaaaaacaaacaaaaaacctctttaaaaagatcaggtttgtttagttggtgttggtggaagctaaaatctgagaatgagtaggctaagactccaggagcccttcaggctgaatttggccagtttggtaaaagagtataactccccgtgccctcagagttcaggacagtgggcagagcacagagaaggttcaccagcctgcactttctcccacctgttctcccttttgtttattttctcatgcctgccagagcaaccagccagaatgaaaatgccaaccaactgtcctgggctttgtctaagcaggagatttcatcattgccagccccatcttctttgccttttctttctcactctttccttggggagtcacaacaactttcagctctgttggtttgaagtcaacagagatccaaactggagggcctattttcatggactcaattaactcctaacacagtaggggccgcctggaaggcctggggtttccctctcccccactttcctctctcaggttcttccagaggggcaggagggtgtcattactattaagagcactggttctggccaggcgtggtgactcatgcctgtaatcctagcactttgggagggcgaggcaggctgatcacttgaggccaagagtttgagaccagcctggccaacatggcgaaaccctgcctctactaaaaatacaaaagcaagattccatctcaaaacaaagagcactagttctaaagtcaggcctgtggcttggccccttagttgctgcatgacctttaacaagttattgaacttctctgagcttcagcttgccagctgtataatgaaaaacataaaacctagggttgtcatgaggacttaaaaagaataatggtgtgtagcatagtttttggcagaccaagtgcttggtgaacaggagatattgaccatcccttgtatacttggagtcaccttccatttatccccgccgtcccagagtctgcagaaggatgctgggagctccatctggagctgagatactccccgtccacacctgcgcacctcgtgttccccgcttacattcacctccaccccagccagtctcctctttccgcaggatcagctttcaccttggcctctagccaaagggatcctaatctctcttgcatttgtttggaatctcagaatgcctgccggttggtggtttagaaacgcgatgggattggggcccctggttccaaagagggcagccagcaagcagccagatggccctgcatggactgggaggtcaggcactcacacacctgcccttctcaggagaaactgaggaagggaaccgggccagctctgagcctgtggagggaatctcaacatctccaaaggaggctcccagcgagttcacaaggggaagtgagaggaaggatccagactcctcagcttctgtagggggccctaggactgcattctggccaagactgcccacatgggaacagacacaggtcccccaaaggaagttaggatgctgtcaggaagggaaatggttattgcaaaaccctccaaaatgtcaatcagctatatgtagaatcaggatccagttaacttcctacaagattgtaacaacaggctggatctaacaagataaacaacaaacaaatgtagaatcctacattaagagtcaataaaccagtggtacatgaagagatgggaagactttactactagatcaattgggtaacaaagtaatgtggctgctagaaacattaattcagtgtgaggccgtatgaatggagtagaatcctggaaaggagaggtgaaggttcagctttactcccaacaaggttcatttccaagagtcctactttcagaggggcgttgttgagctggtaagaagcaaacagagaagagattccacatggtgagaacccagaatcctgtcctgcaaggaacagctgaaaaactcggagtgtttgtcctggagaaagaagactctagagaaatgagagatgcctttacaattctgaagtggctccaacaaggaaaacagagctggtcaggtcatgtgtgaaacgggcaaggcctgcaccctctcccagagtcaagcagctgaatgcaggccccaccatttaccagccattagggatggaatattcttcaaactgcaacacgtcagacacaactggggcctgagtattgcttttctgtgagagctagaggtaggaagccattgggagggagatgtcagctcagccctaggaagaattttttctttttcttttttaagtgaaatttgattttttatttgatactgggtctctttctgtcacccaggctggagtgcggtggtgcgaccttggctcactgcaacctctggctcctggactgaagtgatcctcccacataaccctcctgagtatctgggacccaggtgcgcaccaccacacttggctaattttttttttttttttttggtagagatggggttttgccatgttgcccaggctggtctcgaactcctgggttcaagcagtcctccagccttggcctcccaaagtgctgggaatataggcatgagccattatacaggccaaattttcttcttcttcttcttcttcttttttttttttttttttttttttgtcagtctcgctctactgcccaggctggagtgcagtggtcattgcactccagtgacacagcttgtggtcaatggacagagtggtcaatgcactccagtgacactccagtggccatagcttactgcaatcttgacctcttgggctcaaatgattctctggcctcagcctctggagtaggtaggactacaggcatgtaccaccacgcccagctagtttttttgtttttttgtttgttttttaatttaaaaaagtctcaccatcttgcccatgctggtcttgaactcctgggctcaaaatgatcctcctctctaggcctcccaaagtgctgggattacaggtgtgagctactgcacccagccctatctcatttttgataaccacatatatttcctgtgtggctttcccttaaggaattgagcctaataatggatgtttagtatatcaagaggtgttcaaagaaagaccaagaacattttgacagtgtctaccagccccatatgcagacccatagattttactaccatgcctcggctaggcaattatctggtaggtgcactagtgtacgtgcacagtgatgtgttaagcaaggaatggcccctgctccattatccctgcgagcaaaaggctagaaacaacctatgtccaattacaggggacaggataaagaacaataactagctgaccatatgctggaattctcaacagtggatacaagaaatgatatagatctatagatatttacatgaaaaatgtgccagaatatattggaaagtgaaaaagacaaattacagaaatgtgtacagtggctgggcacggtggctgacgcctgtaatcccaacactttgggggtccgaggcgggctgatcacctgaggtcaggagttcgagaccaccctggccaacatggtgaaaccctgtctccactaaaaatataaaaattagccaggcatggttactagggaggctgaggcaggagaaccacttgaacctgggaggcggaggttgcagtgagccgagatcacgccactgcactccagcctgggcgacagagcaagactgtctcaaaaaaaaaaaaaaaaagtatacagtatgatgtcatttctatttaagatgtacatgtaactgtacattgagaagaatctgaaggatacataccaagctgtaggtaggatttacctaaaaggatgtagggatatagaaaggaagtgagctccccgtcccatgaggtatgcaagcagaggctagctgccccgttttcagggatgctgcagaagacatttccacatccctcagagatgacctcggttccactctgagccctgacaatccctgagcgaggggaagtcagggttgacagaagagtccacccctaaggggaaagagttaagcagggctgcgctcctgtgggcgggctcgcgatcggcagcgccgggctctgttagccgagtctgagcatctcggaggatgcggcgcggcgatcggctgcagggacgcgcgcaaggtgaacacgggggctgcggcgcgcaggtgaggagctggcccagggagggggcgatggcgggaccccgacggggagcgtggcctgctgcccccgtcgcgggcgcaggcgaccaggcctgcacggcgcccacccccatccaggacactgcgggaaggcgcggagccagggagagaggagacggaggaggaggaggaggaggaggagaggtaacccgagatggaccagctccgaggctgccccgcaacggcctcgccctgcccccaggccggcctctccccagtccctgcggcagagagatccgccaccccccacagcctctccagcagagtgggagcccagggctgggcaagcccccgccttgtccgcaggtgcccacatctcttgggttggcagtggtaggcagatggcatgtttatctttggaggccccattcagccgttttctcggcaaagctttttggacctcctgtggaagatgagcctccgagggtttcacaaccccgattgtgtccactcagctgtgtgaccttgggggagttgctcaccctctctgaacccccgtttcttccccctgtgaaatggctgttcccacaccttgtattgggagggcggagtgacgtgttgctaagctcagcgcaggagcctcactgggaaagaactaaacacaggagcactgtttttagccagtacctgtgttaggggcgtctcagcgcacccctactcccaaccctggagcaaagccctgtctctgggcccccagcacctagcctagaccaggagcagcccatggggctccgtgaatgtttgagaaatgaactaacaaggctttaagacagagtctaaactcgagtttggaggatgggactcaaaggtctttgaaccccttgaaattgttcacaactttcggtgagcctgggtcttttccccgggagagcaccaggggttttcagtggcttcttaaggtgtctgtgagccaccatgggttaacagccag

SEQ ID NO: 9894 - DNA, 6000 bp, Homo sapiens
attcatgtagccgggcacggcagctcacacctgtaataccaacactttgggaggctgaggcgggtggattatctgaggtcaggagttcaagaccagcctggccaacatggtgagacccccgtctctactaaaaatacaaaaattagccaggtgtggtgggtgcctgtaatcccagctacttgggaggctgaggcaggataatcacttgaagccgggagatggaggctgcagtgagccgaaatcacgccactgtacttcagcctgggcgacagagtgagactctgtctcaaaaaaattaaataaaaataaaaataaacctcatgtaaagaaccaggctcctgggtgctcatagtaggtaaacattcttttctccatacacctacagggcatcattctcagacctaggaagtcactggggagttccaatcagcctgaaggatcccacagcctcatcacaagaacaccaaggtatagcaggggctgacgtgtgccaggcgctgccttgaccactttatataaatattctcaccatggataggggctgtgtcccgccatttttatggatggggagactgaggctgagctgtctaacttgtctccagaacacccatgcctgctgagtcaggcaggcccccgcttgcagttctggaattcagggaagctggatgccatgctcagctgctgagctggctcccccgggctgtcagctgtgctcacaggacagtaggaggttgtcctatgaatcaccccctacacacagggcaatgaggtcacctcaggatggagttgagctggggcctgccttacacttctggcagctctatcatgtcccctgagatctgcccacagcaaagaggtaggaaacgccctgaggttcatccatcctgtaccaggtacacacacaaccagatgctgtaggaggtgcaaagagggaaactaaggctcagggagggaagtacctgaacttgggagtaggaggcaaacagaaggtaatgaacagtttttttggagcacctactatgtgccaggcatttaaacctttttttttttttttttttttttgagacagagtctcactctgtcgcccaggctggagtgcagtggcgcgatctcggctcactgcaagctccgcctcccggattcacgccattctccttcctcagcctcccgagtagctgggactacgggagcccgccaccacgcccggctaattttttgtatttttagtagagacgggggtttcactgtgttagccaggatggtctccatctcctgacctcgtgatccacctcagcctcccaaagtgctgggattacaggtgcgagccaccgcgcccagctgcatttaaacctttaagtggcaggaaacatcacccagtccagtggggcttatttaaatacagattctaggtcccactcctggagtttctgattcaggcccgggatggggtctgagaatttgcatttctaaaaggtttccaggggatgctgtagcagctggtccggggactatattttgaaaatatctagttccacctcctttcctctgcttagtggtggtccttaattttcttcttacatacctccagagacagagaactcactgtctattcagtcagcctatttcatgtctagatagatcttactttgaagatatgagcgtgtgtgcttatgctgaactgaacactcactctgtaggctctcccctgtggcctctggaccacagtggtctcattagaaaggagcaattggagaagacagacttataattagacccggggtccccctcaccctcacagtactccagcctctgccagttctacctctaaatcagcaccatccaatatagaagttctgtagctcctgaaaacttaaaatttaaaaaaattttcagtaactatgttaaaaatagtaaaacgaagcaggtgacactaattttaataatatatccagaccaggtgctttggctcatgcctataaatcccagcactttgggaacccagggctggagaatcacttgagcccaggagttcaagaccagcctgggcaacacagcagaccctttctctacacaaaattttaaaaagtaaaagttaaccgggcatggtggtgcacacctgtagtcccagctactggggaggctgaggtaggaggatcactcgagcccatttcaaggttaccatgagctatgattgtaccactgtactccagcctgggcaagagaacaagatcctgtctctacaaaataataataatatatccaaatatcattttaatagataatcaatacaaaaattattaatgatctattatacatatatatgttgtatatatatacatacatttttcataccaagtctttaaatctagtgttattttacactcacagcacatttcaatcctgaccagccatgtgtcaagggctccataaccgcatgtggctggtggctactgttcggacagcagagctgtaaacttcccacgaccctgtccctagtccccatctcccctgcatggctcatgctcacccagatgctggatcctcacagcttctccaccagtccacaatgcagcagccaaatccttatcttttttcttttctttttcttttttttttgagatgagatctcactctgttgccatggttggagtgcagtggtgtcatctctgctcactgaaacctccacctcccaggctcaagtgatcctcccacctcagcctcccgagtagctgggaccactggcatgcaccaccacacccagctaattttttgtattttcagtagagatggagtttcaccatgttggccaggccggtcttgaactcctggactcaagtgattcacctgcctcagcctcccaaagtgctgggattataggcgtgagccacggctcccaggcaaaattcttatcttaaacacaggtttggtcatgtccctctcaggtggctccccatccctctcaggatgcctggctgctgaggccctgcctctcttgcttcctcctctcccctctccatccccaaggcccccactctctggctgttcaggattatttgcagatcctccacacaatagtgctcctcacctctaagccctcacacatggctccctctgcatggaatatccttggaacacttcttgggctaacctttcaggtcactcattcattcaacaaatgtattgagggccagatgcagtggcttacgcctataatccagagctttagggggccaaggccggaggatcgcttgaggctaggagttcaagaccagcctaacatagcaagatcttgtctctacaaaaaatataaaaatcagccaggcgtgggggtgcatgcctgtagtcccagctcctcagcaggctgaggtgagaggatggcttgagcccaggagtttgagtttgcagtgagtgatgatcgtgccactgcactccagcttgggcaacagagcgagaccctgactcaaaaaaaaaaaaaaattagtgagcacctactgtcagacatgatcctaggtcctgtagcaaagcaatacgtaatgagaaaatagacataacaagaaaatatgcagcacagcagatggtgagcagtgaagcaggcagagggaaagctggtgtggggttactactttaagcaggatggtcagataaggcttcatggagtaggtgacttgtgaggagagagctgaagtgagcggggggccaggtggctttctagggggagagcactccaggcagagggaacagccagggcaaaggccctgaggagggagcccacccaggggaactggaacatgttccagtgttactggagcagagtgagggaggaagtcatgggaaccaaggtcagagagggccagaggtgtggggaagatctcgcaggggcttgtaagaccttgggttttaccctgagtgcagtgggagtgtggcagctgctgagcggggagggacatgagctgctttgggtttgaacaggaccccctggctgcctggctgatgagaatagccaggggcgaggcggggagcagggagcccagtgttgacactggctggatcaaggtgacagttgaggagtggagagaaggggctgaattcaggctatactgaaggcaggaccaacaggattttccagatgggtcagatacagagtgtgagaaagcaaagtgtcaagatctgggggctgagcttagggtatggaagacccctcttcaggaagtcctcctggggagcccacagctcctgggccttgcctgtttccctccaaggctgggggctcccgtggtaggacttgtttcctgtcctgctgccacagtgctggataagtgagaggtgagaggtggaggcaagctgagctggggccctgccctcggctgtgtgaggtctgacactgctcctctcacctctctagggacctgtgttttcccacttgcacaaggcgagtgggtgctctccaaaagtacttctagctgtaacccagtttcctccctaggagtgggcactgccagtctcctgagcccccaggccctctctcctgctccctgcccaacctcagcctcctgggagcattggaatatcttccttcccctctgggacgcgcagggcaggttgggacacgtggctggggcctgagtcagcctcaccaatgtgggtggagggggtacctgggacacgtcccctccttccttcccagagcttggtacagccaagggtggcacagctgcccccatttcactgtctcctggagtctgaaggcatggctgtggccctgaggcaggaccaggcatgtagctgccccacctgcccctccgcagtgttgtagggaagagtcaagtcagacaggaaggcctggggctgatagcaccagcaggaaggaatgccatcccagtgagcgagtggggcccagggacaacgtcacggtagtcccgccctccttgctgtcacaggtgcagcctgtcctctccttcccctgaccagcccagcatccacatagtctacacagagctccccttgctgcccagacaagctgaaggaccacaggtaatgggacatggggctgggtgagcagtggggtggagtgtcagcttttaaggaaatcgggagaaagagtgtcctcaataggcttgatattgtgtggttccttggtggacctgggtttgagtcccagctctgcatcttcctagctgtgtgagaacctgtctctacttcaggggaggatgacaaatattcaccttcctgggttgtgttgaggtttccacccgcctatacttggccatggtaggtgaccagctcccaattctgtcaccaacttgctgcaagactttcagaaaaacccttgacctttctgagcctcagtttccctacttgtaaaatgaagggtccagctagatctctgaaggcacctcacaccctcactgttatggaacctaacagcttaggaggggaggggtgttcccgcaaatgtctcagcctctgcaccaccatcagtgactacaggcagctgcccctctctctgcccttcctggaggaagccaccctgggctgccagccaggtttgggagacttggaaggaagaagtcagccgtcctctgcctccagctcaaaggcacccccggggaggatatgccagagagctgggccatggggagggggccctgctgcctgttgggggctcaggcacaggtggtgtggcccaaggggaggggggcttggcagacctctcagagctccccccacccacccccgtaggctgtcatccttgtcctagagccacctctgctcagagcaccctggcttttaggcctcaagccaacctagtttccttttaaggggaatgagaatgattatggtcttgtgcttattattttcttctgttttgttaagaaactgcccagaagagttcagagccctaactaaggagtcaggagtgtgtgttagtgggagtggtggggagtgaactcaagctagtgtagccctaaagcaccaggttacttttgctgggaaatcctc

SEQ ID NO: 9895 - DNA, 6000 bp, Homo sapiens
ttaggagactgcctttccctggcaccggctgtggccaattattattttagaaagagagtcagcaaccgcctgaccatcacctgatggtcacctgacattccaggtgtgtgtgtgggggtggtgctgggagcacccttctgccctcctcatgcctgactaactacctactgtaacaaattcacttctgggttctatttgccggtacttgatttagaatctttgcatcaatatttgtaagtgaaattggtttctgtttttctttgtcatactttggtattaagtgtgttccggctttttagaatgaattaggaggagccttccatctttttctatggtctagaccagtttgagtacatagcaagtatctgttctgtgatgatgcctactgctctatattaataaggctgtggagtattactgagtttttaatcttcactattatgatcttaaaatatgaccttgttttaaaaggagtcctctaaaatacttttcttccccctcttccaagttgccaggtttttggttatctcattgttttgctttttatttcacttgtgtttagataaaaagtttttaaatttcacatttttaggctggaaacttattgcaacaggagggaatatttagagaggagaggaacacacacaccatgcaagacttttgttgtggcgtagttggagatctgagaaggggaaggaaactggatttatcagaaagagggaggccagggctaaatgtcaaagcctggctgtagccctgtctcctataagctgagtgactttacgtaagccttctctgacttcaggctgtttttccatcatccatgtatcacgttgagaacggcctgatgtaattgctgtgaggatcagaagaaataatattcaaggacttctgaacccttaaggcattattttgatgcaaaggatactgttacaggcttattcttttccagtgattcgttataacagaatacttcttcagtgaaaggagatttttatttgtaaatgtttagatagttgttgatttttgtaagatagttttttttttcttaaatcagggcctctaatggtcatgagataaaaaacaggttttaaattttaccccttgtttttttcaccaggcaaagagactgttttgtagcaaactagtcttctagctcaaagaaaagaaaagagaaatatttttttctgccatgcactttcaataccagttaattgaactatatgttctgagcacctgaaatgaaattattgacgaattcattctgtctaactgtgtaatctcctagtcttattgtgaaaacttgctgcatcctcttgtgccccttgtgtcttccttcactggtcaccctaagggccaagggagagctttccccttggccctctaaaggttcactgaaaaatcaacttgcaaaaggcagattaataggagaaaaggcggatttatttaacgtgtacatgggaactttcagaatgaagatccaacccctcagtaaggtacagaagcttatataccaccttaaggttataaaaataatgcaggctcagagagtggccaaaaacagatttttttttaatttttattttttattatactattatactttaagttttagggtacatgtgcacattgtgcaggttagttacatatgtatacatgtgccatgctggtgcactgcacccactaactcctcatctagcattaggtatatctcccaatgctatccctcccccctccccccaccccacaacagtccccagagtgtgatattccccttcctgtgtccaggtgatctcattgttcaattcccacctatgcgtgagaatatgcggtgtttggttttttgttcttgtgatagtttactgagaatgatgttttccaatttcatccatgtccctacaaaggacatgaactcatcattttttatggctgcatagtattccatggtgtatatgtgccacattttcttaatccagtctatcattgttggacatttggcttggttccaagtctttgctattgtgaataatgccacaataaacatatgtgtgcatgtgtctttataggagcatgatttatagtcctttgggtatatacccagtaatgggatggctgggtcaaatggtatttccagttctagatccctgaggaatcgccacaccaacttccacaatggttgaactagtttacagtcccaccaacagtgtaaaagtgttcctatttctccacatcctctccagcacctgttgtttcctgactttttaatgattgccattctaactggtgtgagatggtatctcattgtggttttgatttgcatttctctgatggccagtgatgatgagcattttttcatgtgtcttttggctgcataaatgtcttcttttgagaagtatctgttcatgtccttcgcccactttttgatggggttgtttgtttttttcttgtaaatttgtttgagttcattgtagattctggatattagccctttgtcagatgagtaggttgcgaaaattttctcccattttgtaggttgcctgttcactctgatggtaggttcttttgctgtgcagaagctctttagtttaattagatcccatttgtcaattttgtcttttgttgccattgcttttggtgttttagacatgaagtccttgcccatgcctatgtcctgaatggtaatgcctaggttttcttctagggtttttatggttttaggtctaacgtttgagtctttaatccatcttgaattgatttttgtataaggtgtaaggaagggatccagtttcagctttctacatatggctagccagttttcccagcaccatttattaaatagggaatcctttccccattgcttgtttttgtcaggtttttcaaagatcagatagttgtagatacgcggcgttatttgtgagggctctgttctgttccattgatctatatctctgttttggtaccagtaccatgctgttttggttactgtagccttgtagtatagtttgaagtcaggtagtgtgatgcctccagctttgttcttttggcttaggattgacttggcgatgcgggctcttttttggttccatatgaacttttgaactgaaggaaatagagacacaagagacacaaaaaacccttcgaaaaattaatgaatccaggagctggttttttgaaaggatcaacaaaattgatagaccactagcaagactaataaagaaaaaaagagagaagaatctaatagatgcaataaaaaatgataaaggggatatcaccaccgatcccacagaaatacaaactaccctcagagaatactacaaacacctctacgcaaataaactagaaaatctagaagaaatggataaattcctcgacacatacactctcccaagactaaaccaggaagaagttgaatctctgaatagaccaataacaggagctgaaattgtggcaataatcaatagcttaccaaccaaaaagagtccaggaccagatggattcacagctgaattctaccagaagtacaaggaggaactggtaccattccttctgaaactattccaatcaatagaaaaagagggaatcctccctaactcattttatgaggccagcatcattctgataccaaagtcaggcagggacacaaccaaaaaagagaattttagaccaatatccttgatgaacattgatgcaaaaatcctcaataaaatactggcaaaacgaatccagcagcacatcaaaaagcttatccaccgtgatcaagtgggcttcatccctgggatgcaaggctggttcaatatacgcaaatcaataaatgtaatccagcatataaacagagccaaagacaaaaaccacatgattatctcaatagatgcagaaaaagcctttgacaaaattcaacaacccttcatgctaaaaactctcaataaattaggtattgatgggacgtatttcaaaataataagagctatctatgacaaacccacagccaatatcatactgaatgggcaaaaactggaagcattccctttgaaaactggcacaagacagggatgccctctctcaccactcctattcaacatagtgttggaagttctggccagggccattaggcaggagaaggaaataaagggtattcaattagtaaaagaggaagtcacattgtccctgtttgcagacgacatgattgtatatctagaaaaccccattgtctcagcccaaaatctccttaagctgataagcaacttcagcaaagtctcaggatacaaaatcaatgtacaaaaatcacaagcattcttatacaccaacaacagacagagagccaaatcaggagtgaactcccattcacaattgcttcaaagagaataaaatacctaggaatccaacttacaagggatgtgaaggacttcttcaaggagaactacaaaccactgctcaaggaaataaaagaggatacaaacaaatggaagaacattccatgctcatgggtaggaagaatcaatattgtgaaaatggccatactgcccaaggtaatttacagattcaatgccatccccatcaagctaccaatgcctttcttcacagaattggaaaaaactactttaaagttcatatggaaccaaaaacagattttaatggcaagacaggttataggggagagaataaaggaggcttgactagcaaaagtggccttgttatgtacatgaagcctcatagctagaggccctcagagagaatagatagtaaacgtgtcttttcagacttgtaaaggtgtcagactcaatctctcccagatctgtgaaaggcctagaaagggaagccctggctgcattaatggagattctctacagatgcaaatttgcccaacaagagacagctttgcaaggccacttctgtctgctggccctgtggcagccatttcaaaatgtgtcaaggaaatatactttggggtaaaatatttttattttcttcaagtgcaattaactgtaaagacataaactgtaccttttgcgggtggcggtgagcgcggagaggacgccatgaaggtcttgggcacactacgagagtacaaggtggtgggtcgctgcctgcacaccccggaatgccacacactgccccactaccacatgcaaatctttgcgcctaatcatttgtcaacaggtcccacttctggtacttcgtatctcagttaaagacaaagaaggcttcaggggagattgtctactgtgggcaggtgtttgagaagcccccactgcgggtgaagaacttcgacagctggctgcgctaatgttactgggggtccttgctcccagagctcccaagatggtggcgggctgcttccaagatggtggcaagccttgtcttctctgacctggggttcttggcctcacggattccaaggaatgcaatcttgggccatgcggtgagtgttatagctctattagaagtcgtgggtcacggaagagaaccttggaacccagtgactagtgttgagctggattaggacaaacccgtgcaggaacaatggcaagtctttagcccgatcaggagcggcaatgggcgcctccctggatggggagcacagcggacaccctgtcggatccggaggtatggaagtcagcagcgggtctgcgacggtggcaaagggcggcaaacagcagctagtcctgcctctcactatgactcccggagctgcacctacaacatgtaccggcaataccggtacctgaccaccgcaggcgctgtcacccagtgctaccgcgccagggcccactccatccagatcactccaccagatgaaggtggaggtgatcgcagccagcaagtgccgccggccggctgtcaagcagttccacgactccaagatcaagttcctgctgccccaccgggtcctgagccgtcagcacaagccacgcctcaccaccaagaggcccaacaccttcttctaggtgcagggcccttgcctgggtgggccccaaataaactcaggaacgccccggtgaa

SEQ ID NO: 9896 - DNA, 6000 bp, Homo sapiens
aacccaggaagcggagcttgcagtgagccaaaattgcgccactgcactccagcctgggtgacaggacgagactctgtctcaaaaaaaaaaaaaaaaaaaaaagaaaagaaaagaaaagacagagctaagagtctggggaaaccaaggcagctggagttcataggacagagcaccagagatgacagtgttgcacagagagagaacctggagacttgcagagggtcaccaagcattcagcatacaaggaaactaccaaggccagaaaaaggagtatcaaaaaagggaacattttcaacctgataaagggcatccatgaaaaacccacagctaacatatatttaatggtgaaagactgaaagctttgccctaagatcagaaataaaagatgtctgctctcaccatttctagccactgcactcaagcaagaaaaggaaatcaaaggcatctagattagaaaggaagaagaaaactgtctattcatggatgacataatcatctatacagaaaatccaagggaaatcttcaaaaagctactagaatgaataagcaagtttagcaaagttgcaggataagatcaacatacagaaatcaattgtattttggccgggcgcaatggctcatgcctgtaatctcagcactttgggaggccaagccaggtggatcacaaggtgaggagatcgagaccatcctggccaacatggtgaaaccccatctctattaaaaatacaaaaattagctgggcatggtggcacacgcctgtagtcccagctactcgggaggctgaggcaggagaatcacttgaacccagcaggcggaggttgcagtgagccaagattgcaccactgcactccagcctggcgacagagtgagactccgtctaaaaaaaaaaaaaaaaaggacaaaatatttgaatagacacacttcaccaaaggcatatggatggcaaataagcacatgaaaaaatgaaaaatgctcaacatcattcattactacagaaatgcaaactaaaagtgcaatgtggtcaggcacggtggctcacgcctgtaatccccgcactttgggaggccgaggtgagtggatcacttgagatcaggcattcgagaccagcctggccaacatggtgaaatcctctctctactaaaaatacaaaaattggccaggcacaacggctcatgcctgtaatcccagcactttgggagaccgaggcaggcggattgcctgagctcaggagttcaagaccagcctgggcaacccggtgaaaccccatctctactaaaatacaaaaaattagccgggcataggatgtgcctgtagtcccagctactcgggaggctgaggcatgagaattggttgaacccaggaggcagtggaggttgcagtgagccgagatcgtgccactgcactccagtctgggccacagagtgagactctgtctccaaaaaacaaaaacaaaaaacaaaaaaataaaaacacagaaattagttggatgtgtggtggacgtctgtaatcccagctactcaggaggctggggtaggagaattgctggaacctgggaggtggaggttgcagtgagctgagatcacagactatactccagcctgggcgatagggcaagactctgtcttaaaaaaaaaaagaagaaagaaaaagaaaagaaaagaaaaagcagtgtaatatcagggtggctaaaattaaaaagattgaccataccacctattgccaaggaactggagcccttatacattgctggtgggaatgtaaaatggtacaaccactttggaaaataatcacccaggctggagtgcaatggcgagatctcggctcactgcaacctctgcctcccgggttcaaatgattctcctgcctcagcctcccgagtagctgggattacagacatgtgccactaagcccagctaattcttgtatttttagtagagccagggtttcaccatgttggccaggctggtctcaaactcctgacctcaagtgatctgcccacctcagcttcccaaagtgccaggattacaggcatgagccaccgtgcccggcccaatgcctggcagtcttttaggcactgaggaaataacagcaaagaagacaggcaaaaatccctgtcctcttgccttctggtactaaagttcaaataaggaaagtaagaaacgtaaaattagttcagactgtgaaaacctgtcctgctattttctcatcacagataatagatgtgcaggctggagtgcaatggcgcgatctcagctcactgcaacctccatctcccaggttcaaggtctcccacgtagctgggattaaacatgctgcagctgtagtctcataaataacccctttctttgagagactaccgctttttttctttttcttttcttccttttcttttcttttttttttttaagacagagtcttgctctgtcgcacagtctggagtgtagtggtgtgatctcggctcattgcagcctccacctcctggcttcaagtaattatcttgcctcagcctcccatgtaacatgagccacctcactcggtggcgactactgctttcttagcaagaaactttgttctctaaaattaaaactttgctgcttgacatcatgtctattccctccaggcaatgaccaccaggaatatacttattactgaaaacactaagtttattactcattgctatgagggagaatgtacaccatgggggaaccatggggtgtctcattaagagagtgttagaaaataattataggatttgggcttgttaagtgatttaggggagggtttaaggaagtacagctttgcttggagatggaggctgtcagaagattggggtaattctatgattaggtaccctgatatatcttatttacagggaggcatctttgcaaagccagtatgtgataaacaactggtatcaggccaaaaaaaaaaaaaaaagaacttgtatcaggctaaagagattggtaaagaagtggtactcttatttgctgggaaatgagatgtttggttgtggcttggacaatgtacatgttttgtgttcaacatgattatggagtgttctagttttgtcttgatccgtcacaatcagtctgatgttggtgttttatgaaattgtttatgctcaacaggaacaccaagacctagctgtgagtgtcaggccaatttttttttctctttctcacatttcaataagcatgaaacatctcattcttggctgaaggatctacatccctttgacacagagaagcagccttgatttccatcccaggtgcagagcttcagctaacgattacattccacatcgatcttaaccttgtagtttccacagaaatgaccctgggtcccctttgcagtccacgccagattaggactccacacacagctgtgctgtgctttgagcatatcaaacaccggttcacttaaatttcacctgaattcgactctttcccaaatcatataacaattattttagtgactgtcaataaacttgactttggtggaattacaggtttgtccactgatctgaggctgattgggctagaacaaaactatatacggtataatagatataaatgttatggaaaaaaataaaagcaaggaaaaagaagtgttgggaaagggacagtttgtgatttaagtaaggtgctcagggaaggcctcacgaataaagtgacatcggagcagagacctgaaggaagtggggaattttaaaatcagcttaatatctgggaaaaggggcattccaggaagagggaagagttagtataaaggctctgaggacaggcatacagggcgtgttgcaaccacactgttttttaacgaagtctcacactgctgcccaggctagagagcaatggcgtgatctcggcttactgcaacctctgcctcccaggttcaagcgattctactggctcagcctcccgagtggctgggatgacaggcgccccccaccacgccaggctaattttttgtatttttaatagagaagggggtttcactatattggccaggctagtctcgaactcctgacctcgtgatccctccgtctaggcctcccaaagtgctggcattacaggtgtgagccaccgcgcccagccgcaaccacactttcttagtgagacccaccctgacaacctctttaattctggaacctacccctgcccccattggtactctctaatcccactttgcttttctccacacaacttttcaagatataattccgtgtcggccgggcgtggtggctcatgcctgtaatcccagcactttgggaggccgaggccggcggatcacgaggtcgggagatcaagaccatcctggctaacacggtgaaaccccgtctctactaaaaatacaaaaaattagccgggcgtggtggcgggcgcctgtagtcccagctacactcgggaggctgaggcaggagaatggcgtgaacccaggaggcggagactgtagtgagccgagatcgcgccactgcactccagcctgggcgacagggcaagactccgtctcaattaaataataataataataataataataataataataataataaattccctgtcctttgtttttgttcatcgatgtagcccaagctcccaggagtgtggggcatacagaaggcgcttgacagccacgtgtggagaaaaggagcccggggctgggcagagagcgaggccaagggaagaagaatactcggtcgcgtggagccttgggggcccactgggagggctcgggcgccacgcagatctgcgcggaatgagccgccagaggccgctggcagtcgcacagagaagcccatcgtttcctaccacctgggactcgacggacgtctacgcgcgtgcgcagcggtcccatcgaggcacccgcctcattggctgtggctggctcgcaaaagtggcattgcgcatgcgcgcttccttgcgcgagccgggctgtcgggtgtgttttgctctccagcctccgtcgtctctgcagcactccgggttctcctccagagcgctagtcccaggagctcggaatgttcgtggaacttaataacctgcttaacaccacccccgacagggcggagcaggtaagaggtcccgctggccggaagggggcgggacctggcagggcagcggaatactgcatccgggaggcggtgcgcacgaccccggggaatggcgcgacgacccggcacggggtacctgggagttgtagtccgcagaggatcgacccggggattggactggaggcttgggcccgccgaaagtgggcttctgggccatctcgcatattctcaacggctgtgcgtgtccttaaaagtccctgggaagcggccgggcgcggtggctcacccctgtaatcccagcagtttgggaggccgaggcgggtgcatcatctaaggtcaagagttcgagacaagtctggccaagatggtgaaacccccgtctctacgaaaaatacaaaaattagccgggcgtggtggctcatgcctgtaatctcagctactcgggaggctgagacaggagaattgcttgaacccgggaggcggaggttgcagtgacccgagatctcgccaccgcactccagcctgggcgacagagcgggactccacctcaaaaaaaaaaaaaaaaagtacctgggaagcatggccgacagtggggttgggttatattcgcggacgtgaactgtggcgcgctgtgcatgttcactggggtggggggtcccaggcgctcagaggagactgcagaataggcccgagaggagaggggagttcgtttcgccgccgtcttcatgggcgagcttcctaaccgccacctcgccccggagcaattggcacattgtattgaacgctgctgttcttcttactcttcctccttgtgatctctaatagaactgttagaagcaggacagagccaaattggcttggaccaagtccgtcttgggcaccccaggctggcctgttctctccaccctcctcacactccggggtaccttgaaacctttcacatt

SEQ ID NO: 9897 - DNA, 6000 bp, Homo sapiens
cccaagcctgcccgagcccccctctgagtccctgagcctccctctgaggctggcccccttttccgctacagattttccatgacttccgggagattgaggtggaggtgtacatggcggcctgccacagtgagtagggtgggaacagcaggagggacctgggaagagggtaggatacttttggccaaggggttttccaagtagcacaaggaaaaagtctttctctggaactggaggtcagaggtgtcctgggagacaggagtccagggttacaagtgatgtggattcagctgtagcctcaggggtggaggtcaggggtgatgaggtcagggcattctgttggctcccgggagttgagttcctagaggttctgagagtcaggggaggcctacttcttgcccacaggccctgtggtcagccagcttgaggctgggcacttcttcgatgcatccatcaccaagaagcatctctttgcctctgtccatgatgctgtcacctttgccctccaacacccgaggcctgtccccgacagccctgtttcggtgagcctacctctggcctgccaagctcttttttgttaatctattgcttgtccccaccctggccccagctccagggagtctttcctggtggccatggctctgtccccagtgggcccagtgctttctccgctgtctttggataaagctgttctaggggcgggggttggtctgtgtcctttggaaactgactagagcctcccctcctctgcctgctcaggtcaccagactctgaacatgctacatcctgcccaagactgcacctctggaggtgcagggcacccttgagaagcccctcacccctaggccgcctccaggtgctacccaggagtcccctccatgtacacacacacaactcagggaaggaggtcctgggactccaagttcagcgctccaggtctgggacagggcctgcatgcagtcaggctggcagtggcgcggtacagggagggaactggtgcatattttagcctcaggaataaagatttgtctgctcaactccagtctctgctgtggcttggtggggccctggtggtgggtggtccacagctgtggctgctgacccttcctgtgccctgaaggtgagacggggcagaaggtgtaggaaggactcgggaggttagggtacagagcaggggagctgtggaggcatcccctgttaaggtctctccccagccatgcatagccctcactcgctgtctcctcagatgtgaaacagttggaaccagagctgcttctcaggaataatttgctctcaggaatacccgagaaggtacagggcagcgtgggtgccaatgggcagtccctggaggatacagagtgaacacctaggagcagctgttcccccacactgctgctctatgcttaagaataagcatgaccgggccgggcacggtggttcacacctgtaatcccagcactttgggaagcagaggcaggtggatcacttgacatcaggagttcaagaacatcctggccaacatggtgaaatcccacctctactaaaaatacaaaagttagtcgggcgtggtgatacatgcctgtaatcccagctactcgggaagctgaggcatgagaatcgcttgaacttgggaggcagaggttgcaatgagcccagatcatgccccgcatgggtgacagatcacctgggcatggtagaacactgtcagccaaggagtgtgtgttgatttctgccattaaatgccgacatctgggcatgtgacccagcaggcagtggggcgttgggtcagctgacagtgatggcaggggagggaccgggtcttaggatctgtctgggcctcagtgtgctgttcatcggtagagcgtgagtggctacaattcttgcttcaggggttgctcagtgaatattaaatgagtagatgccgggcctataatcccagcactttgggaggcccgaggcaggtgaaaccccatctctactaaaaatacaaaaatgagctgggcatggtgctggacgcctgtaatcccagctactgggaaggctgaggtgggaggatcaattgaacccaagaggcggaggttgcagtgagctgaaatcatgctggagggagctgcactccagctcgtgtgacagagcaagaccctgtctcaaaaataaatgaggaaatgccaggaaatgcgaaaacaatgctgggctcaggtcctctcctccaaacatgcgagcactgctgttcatcaggtgctgagcaggtgccaggctctgtgcaggggtctgggcaccatcctgagcatggacagaggccaccctgcccttcaaatcgcagaggtacccttgcctggctctgttttatcatggtctgtattggtgcctggcaccatcaccccccaccccccaactcatggcctagaagttcagccccaggaaataagagcttttatttactctgtcacaccacgtcctagcatcagaaatggtgcctggcagctgctcagtaaatattgtttgaatgaagcttatatgttggagagggcagtttagacctcaaacaggaaattgcaggtagttagaaatgctttgaagaaaataaagcagggtcacgtgatagaagaggtcatatgttacccaagatgctcatgggagggggactcagcaggtgaccctggaactgaaattccagccataagaaagaaggtgactttctaggcctggggagctgtggtgctggcagtgggggtattgaggcaggcctgtgggaggcaggggcagcatgagctgaggtgagagggtggggggacctcacagtccagggggagactttgggctttgttctgacagcgggggagctgcctgtggattttgatcccacatctttgagcactcacccaactgcgatgtggactgtggggctgcggttgggtgtgggggacctgcgagtttggtcagcctagagaggtgatgcccctggtggaaagcaaaaggttttaggggccgtgtggattttttttttttttctttttaaatcggctcttgctctgttccccgggctggagtgcagtgctgtgatcaccactcactacagcattgacctcctgggctcaagcgatcttcctgcctcagcctcctaagtagctgggactacaggtacatgccaccacacccagctagttcccccacctccccccacccaagacggagtctcgctctgtcgcccaggctggagtgcaatggtacgatcttggctcactgcaacctccacctcctgggtccaagtgattctcccacctcagcctcctgaatagctgggattacaggcacccaccatcatgtccagctaatttttgtatttttgtagagacgaagtttcaccatattggccaggctggttttgaactcctgacctcaagtgatcctcctgccttggcctcccaaagtgttgggattacaggggtgagccaccgcacccagccccagctagtttttgtttgtttgtattttgagatggagtctcgctctgtcgcccaggccagagtgcagtgacatgatctcaactcactgcaaactctgcctcccgggtttaagtgattctcctgcctcagcttcccaagtagctgggactacaggggtgtgccagcacgcccagctaatttttttttttttttgtatttttagtagagacggggtttcaccatgttagccaggatggtctcaatttcctgatgtcgtgatccacccacctcagcttcctgaagtgctgggattacaagtgtgagccaccacagccggcctttttcttttttttgagatggagttttgctgttgttgcccaggctggaatgcaatggcgcgatctcggctcaccacaacctccaccttccaggttcaagtgattcccctgcctcggcctgctgagtagctgggattacaggcatgaaccaccacgcctggctattttagtagaggcaggtctccatgttggtcaggctggtctcgagcccccgacctcgggtgatccatctgccttggcctcccaaagtgctgggattacaggcctgagccatggtgcccagcctagttaaaaaaaaaaaaaaagtttgtaaggtcgggtgcggtggctcacgcctgtaatcccagcactttgggaggccgaggcaggtggatcacgaggtcagaagattgagaccatcctggctaacacggtgaaaccccgtctctactaaaaatacaaaaaattagccgggcgaggtggcgggcgcctgtagtcccagctactcaggaggctgaggcaggagaatggcgtgaacccgggaggcagagcttgcggtgagcggagatcgtgccactgcactccagcctgggcgacagagcaagactctgtctcaaaaaaaaaaaaagaatttctgttagttactggtttctttaactgtttgggacttagtttctttttttatcttttttgagaaaaaatctcactctgttgcccaggctggagtgcagtggtgcaatcacagctcattgcagtcttgacctcccaggcttaggtgatcctcccacttcagcctcctgggtagctgggacaacaggcatgtgccactatacccagctaattatttgtattttttatggagatggggttttgccgtgatgcccaggctggtctcaaacttctgggctcaagccatccacctgcctcaacctcccaaagtgctgggattccaggtgtgtgccactacacccagcctagggcccagcttcaaaaggaggtgctccctcagtttggggccagctaggcccgctgggacagcaggacccagaacccaggtctgccgttgtcctcaagccctggactccagccccctgaccacagccagtttctggccaggctgctcatgaaaggccatgggcctggctggaacctgctgccttagagccaggcctcttcccgggggaggggcgtttgcccgttgccaggtgcccgggttccggccctggcactagcgacggccatgctgcatgtgctggcctcgctgcctttgctgctcctgctggtgacgtctgcctccacccacgcctggtcgagacccctctggtaccaggtggggctggacttgcagccctgggggtgtcagccaaagagtgtggagggctgtaggggtggcctgagctgtcctggctactggctgggccctggagcaagccgcatctaccccgtggctgcggtcatgatcaccaccacgatgctgatgatctgccgcaagatactgcaggggcggcggcgctcacaggccaccaagggtgaggtgagcacagctcttctttctcccccacagcccctgcctcaatatacgtacgctcagtgagcccgtcttccacccaaccctgccccatgggtccacactggcctgtggacctcccacacccccacccccagctcacagcccattgtccctgtgtccacacaccttcgtggaacccatgtccaccacccacagccagcaccctgcccccaactctcccctttagtacccctgctctcatccagcccctgtgggccccatgaccactgtagcccacaacagaccctcggtgatcctctatcaccctgagtctccctcccatcccatctgggcactgccccacaccctactccctgctccccagctccatcactgccccttgtcacatctccctctctgcccaccattctcactcctgcctcttggtcctggtctcagcatccgcaggtgaccactgagccctgcggaccctggaaacggcgggccccaatctcagaccacaccctgctccgtggggtcctgcacatgctggatgccctcctggtccacatcgaaggccacctacgtcatctagccacccagcggcaaatccaaataaaggggacttccacccagagtgggtgaccgaacatgtgcctctctttgcctgacagcctgaggtcctgggccaggtctgctctttccaggcctgtctggaccgtgtgtccct

SEQ ID NO: 9898 - DNA, 6000 bp, Homo sapiens
cagaacttcagagtcttcatcacagtatgtttccagtgcatgtagaaaggctcagtgttgttgctgtactagtcctgggttgagccagcttcatgggtgtgtgacttgtatagtcagaaggaccctgcacttcatttaatattctgttgttgtcatcttgagattcttagcaattttttaacaaggggccctacaaattgggtagttagtcctgctgccagggaaagatactttctttttatccaggcccccggtcctggagtctcaagacctctctgaggaattccagtagaagtggacatacattagtaactaaatttatttattatttctggtcatattcatgtatatcccacaagattttccatgcacacacttaaattctgtctaaataaaaatggcttacttcatccttgtaatatttattttttttctttcttttttttttgagacagagtttcactctatcgcccaggctggagtgcgatctcggctctgcaacctccgcctcccgggttcaagcaattctcctgcctcagcctcccgagtagctgggactacaggcgcacaccaccatgcttggctaatttttgtattttttggtggagtcgcagtttcaccatgctgcccaagctggtcttgaactcctgacctcaagtgattcacccaccttggcctcccagagtgctgggattacaggcatgagccactgtgcctggcccttatctgaggaatttagaagggagcaaagaccacctggtaaccatccaacaggccatccagaggcaaaactccttatctggggaaattagaagtaattaaacttccctagtatctaaagtgggcatctggttccaggcctctttcaacttttataagtaactaaaatttctaggcatctctggaatgtcatgctgaaactaattttacaaccctaagctcctgcctgaaggtccataaatgcacctaaggaaaatccaccaaggccctcagtcctctcgctggggtgccccgctgcactcttctgcagcgttctttctttctaagaaattttcctttttcaaacctatactgttgtcagtaaattttttgccaacctgtgaggcgaccacttcctggtgctggggctcagacacctcaccaggcattttgtgttctagtgttctgcgtttcctctttggcaattaagctcacacacacacacactcaactgtcccaaagaagagagtcacctgattctagttattccgagggctgtgtaagcactgatacacacacacactgtcacacttacacacatgcaactgtcccaaagaagagagtcacctgattctagttattccaagggttgagtaagacgttagtcaatctctagggaagccctgctgctgggcactggagctcagaaatttatctcaaagaattagaattcataaggagctctgtgttttggaaagaggacacattgtttaggacagtttccattccaattgtgcagcatgaaatagaaaaatttaataagtgggccaatcaagtatctggaatcctttggataaattcatttattcaattaatccatactgagctctggctgggctctggacaaaatgggaagcaaaattactttacagccatataatagaatagtttgtagccattcaaaatgattgtatcgatatttattgacctggaatatgttcatagtatgggtaaacttacaaacaatatattatgaacccaataaaaatatatttcagggattggctgggtgtggtggctcatgcctgtaatcccagcactttgggatggtgaggcaggcagatcacctgaggtcagcagttcaagaccagccaggccaacatgataaaacctcgtctgtactaaaaatacaaaattagctgggcgtggtggcgggcatctataggaggctgaggcaggagaatcacttgaacccaggacatggaggttacagtgagctgagagcacgccactgcactccagtctgggtgacagagcaggaaaaaaaaaaaaaaaaaaaaaaaaaaaatatatatatatatatatatgtatatgaaaaaatcggaaaggttctacatcaaaatggtaaatttcgtgttatatatatttcactataataaaagattgtaacagtggctatctctggatgctgtttttattatttgtattttttagtttttttgcaatgaatatgtgacaagtaaaagaatgactacaaataaaaggaaacataaaaaattaagtctgatgctcttttaaagcccatctgattcactcttgactgcagctttctctccatccacccatccactggagccggctttctgtgtcactttttaaagtccattttttttttttttttgagacggagtcttgctctaatgcccagtgcagtggtgtgatctcggctcactacaacctctgcctcccggattcaagcgattctcctgcctcagcctcccaagtagctgggattacaggtgcccgccactgtgcccagctaatttttgtatttttaatagagacagggtttcaccattttggccaggctggttttgaactcccgaccttgtgatctacccacctcggcctcccaaagtgccaccgcacctggcctaaagtccatcctttaaggcaaccatactgttgggctggaagccaggagagccccactataatagggcagggagccaggctaggaattggaaacagtaagaatgcgaaacaggatgaggatttgaagaccctcttaaaaatgggggaaaaaaaaaaagactgcattccaaaaataatgcagaaagtcaagtcttgggaggaaggtttggtcttaacggtgaaatctggaaaaggtataggaagtacaatacttgaaaaataccctgcaaagatttattttggctggcaacattcagtagattacagctgtttctgtggttatttttgtagattaacatggaccaaaatatggcatcatcttactgggtgtgttcacttcccgacagttctagaacatggtactcgatctgtccttgttgccttctaaactattcgaagcagacgctgtatcagactttctagcttctgaaataaaggcacaggaattacagggaagcagagcaagtgatctgggacgtggagggtttttcttccattgtgtgcagtttggaaagttgccatctattcaggtttcactcaaaccggctttttccagaccccagaacaaattgtagccagaagctctgctctttgtcaggaggcaattataccccagacttagccaggaacttgcctcttcccttagagaacaacttctctttatgtataaggatcctggctctccttttacccagggggttgggatacagcctctagttctttctagaaagaccccaactgtcccagggtttccattttgttttttaccattgcacaggtctctggataataaccttcctaatagcgactgaaatgtctcacagcctttcctcgtttttgtttctctttagctaaagaaagcaaaaataaataatccccatcttcattgttggaaaccccaggcaattaaccttttgaggagcttcacacaagatacagatctgtgaagccacataggttggcattgagtttaaccccttgcccagaaagttaaggttaggaagcttggttcctattttctgttcaaatactgctttcctttgttagagataaactttcttttaaggcaaataatcacttatatgatagaacctttaaaataatcctgttgactacaaacaggatagtgcaactcttccaaatcttgaatgtggtggtgactgcatgactgtgtatgggtgtcagaacataaaactagccactaaaaaggctaatttttggggggaaaccgtctgctctgtcgcccagcctggaatgcagtggcacgatttcggcgcactgcagcctccgcctttctcaattctcgtgcctcagccgcgccatcatgcccggctaattttttgtattttagtagaggtggggttttgtcatgttggccaggctggtctcaactcctgagctcaagcgatcatcccgcctcggcctcccaaagtggtgggtttaaaggcgtgagccaccgcgcccggcctaaaaaggctgatttttactgtacctaaagtctacctcgattaagaaaacgaggccgggtgcgggtgaggtcaggagttcgagaccagcctggccaacatggtgaacccccgtctctaccaaaaatacaaaattagctgggcgtggtggcgcgcgcctgagcgagagactccatctccaaaaaaaaaaaaaaaagtaaagaggtcgaagctgtctaagcggacgctgcggtggactagcggtcaagcttgcctgcgagcggctcacctgagtcacccccaaaaccggcctccagcagcatacccgaccctgcagtaccccctcccacgcagcctgcgatcgggacgcctgcaggaggcgccagagtcttcgcgggggttgcaatcccgcgcaagggcccccggctcccaaggcatccgcaaccttccgatcccccgggaaggccctgcacgtctcggccgctccctgccagcagcccgccccgccactacactccgccgcggccgcgctgacgtcaccaccccgcctccccgccttgctccgccgttcccgccccgccccctttcccggcgtgcgccgcggctgaggctcctcgccctcagcttctgcctgtcgccccaaaatggcggacacaatgagccggcgacgcgccggttgtccgtgaggtggctgtgaggacgaacggtcggcgaggctccacagtccaggcagaagaccctcgaccaagcaggaagaagaggaggaggcggcccaactgttggccgacttcccgctagccgccggcgcggcgcccgccccgcctgggttggcccctcggcagcccgcccgctcgccgccgggccccgccccggccctgcgccgccgctgccttccccagccgccgccatgaagctgaccgacagcgtgttgcggagcttccgcgtcgctaaggtgttccgcgaaaactcggacaagattaactgcttcgatttcagccccaacggcgagacggtcatctcgagtagcgacgacgactccatcgtgctctatgactgccaggagggcaagtgagtgcggcggaggccctgggcccgagtctcagtgcctccctccggtggcccagcacaggtccctcggcctgccctccgtcccgacttcagcccccagcctattttgcacgcgttcctgccagggccgcctccaccccgcagccgtccaggagaccttttatttttttcttcttaaaaaaaaaagataacgatagtcataattttataatattatttgtatgtcttcggtctcctttgagcgctatgcatcacttgccaaaccccaccttgaccttgacctttaaacgcccggtccgcccaccctgggcccaccaggtagcgttttcagctcctcaggctgtcaaaggtgctggtctgctccggcctcgacgcaggactgcaggggctgcttttctgcctccttcggcagcgtcagctctctcttgtgctctctccactgtgacctcgattccgccctggcactccgcccatcccctgcccctcagcttcccgcggcctttctgccgtcagaccgcgtgggttgcacttcttagctgtcaggatttatttgttgtgcccctttgagcccccttgctttttcttcctgctcctagcctttctcttactcattcagacttggtgcccacgttcataagtgaacttttcagcaacatctaaaacttcctttttgccacacacaaacgaacttggtcgtcccatcctgacctgaatgtgagcttccgttaaaacaaagcaagcatcgtagaacaatttcaggtttcctttcatacttttttttttctattacactttttggtccactttgaattcc

SEQ ID NO: 9899 - DNA, 6000 bp, Homo sapiens
ttcttaaatgtgtaacagtcacattgtgaagggactgcatttgtctggatttcacctgcagctgggcccacagcctgcctgaggtcagaaaatttttcatgacccattttttaccctgaattgacaagtttagaaaacaggttaatggactacttcatcctcctggaccttgaaaagctggctgaccaatattagactactactgctcaattagtgtgctagggaaacctttttgctgcacatgcagatttttctgtgacattttgactagattttgagggcttctggggactatgctgttttcctttgtacaccatcttcatccttctcatttgaagcagagttgaagtggctaatgcagggaatgcatttatggaagcttgcacgctatctgcctttgttcagcaatgcaggtggctcctagcatttatctatgttatagatatgtgaggtcagggaagggtacttactaacctctggaaaagatgagcttcttgataaatatttattgacttatggtagaagcaaacatagaaaactagttcagaacttagccttaatatgccttttctcctggaagtaaaatattctcactgtgagagagaagacattggaccttagcttccagaggacctggatacactttacttgctctctagtaccaattcagtcacgaatgtggtacctgaatacaatttaaaagctttaggaggccttaggtagggtgggactcagaatcatttccctctctcaagccaaaaagtgtttctgagggacacatagaatatcaggcaatctagatgggaacatttgggaaaactatcacaggcaattatatttacttggcacctatatcaccaaagattgttctatttgagacaccatttactggtttaattgatcaacagtggaacacaccctggatttgaactctgatcctgtatattgaggatgtgccgtgtgtgcacacaccagttcagaagtgttctgtgttatcagtaggaaatctgttggtcttatgaagttaaatgagtagaaggcatcactacaaaaaatgaagtacaaatcttggtggggaccagatgccccctttgcaagcttggatttccttgctcctgggtccactgtaagcaaccatatgtttgtcatggtgctgactcagaaatcgtaggacagagagcctcctgcaaaaccaaaaagaaatgttactttcctgcgattataattcttccttgactttgttcactttagatgttttactagtgagttttgatgactcccaccccttatgtgagaatgtgcatactttggaaacttgaatttatccaaacaagctacctatgacttagagtttgggcataagttttaaattcaatgctcagtcgaactggatctggttccaggcccactccaagggtggtttcaggggtgttttttcagtacttgtcccagaccacacaggtagccttgtttctgagggcagctttatggggaggtgtagaaggtggtgggcagcaaatgcactgcagagtcattttcttgggtatggtgtttaagaagcctgagattttcacaagaaccagcaaaaccaggagtggagagttggggagatagagaagtaggcctaaaactccctcttcttgagtcttttttgacttaatacaccattgggtctgtcctggtgctatggcctatcacaaaggactgttttaagagagaagcaagccacagccttgccagataagtctccaacaccagcagaaaagcacggaccctgatctgtgggaggcaagggtctcccattatttctggaggcaaatggtgccttctagtgaaatggtgccaccatttgctgatgggggtgcctgttctcaggatgtgtggaaactcaggcctgagggtttctacatggtttattcaatctaactgcatacctagcttggcagaatggaggtggacaaaagtgctgaaaggatgagggtaggcttttagggcaaatcaagtcacaaagcagatgattgagggaggttacaaagcttaggcagagttaaagttgggcagtccattagctccttttgcaagaatctctggagacggtagtttgaatgtttcccttgagatttcaagtgctcatttcttttcccctcccttcctttcttccttttttttttttttttttttttcattgaatattctctgaagacaatcagaggcctgccagggagggactcctggctggttccagcactgtccttaggcctctttttaatactaacttgttggaactgatgcactttgtttaatgtattttaccttttttttttaaagctgctcatttagaacaaaatcaaatgcttattgcattgtatccttcctgcttgctgtttttcctcttaatttcaaaagttatgcattaaagataaaagtacacttaagaagtatgcacaagaatacctattaaaataactaccatcaagtttgatggtataacttcaaaggattaaaaaaaactattttggattaatattttgcgtgttttttttgtaaatatgattgtatataaactggtggtacgttatgacagttttaagtggttgtgagaaaactaaagagaacaggtcttaagctatgtttaaccttaactttgtgctgatttgacaacaaggaaggcattttggccagagtaaattttttaaaactctttccagcgggacctcagagaatcatttccaaatagatgagaagttccttcctactttaataaaactccggaattcttccccctctcttgctgtctcatcctttaccttctggatttaggtgctttttaattccagttcaggaaagataggaagagtagaatttccccacagcaaccttgctcctgacattggggattccgcccctgatctctgaagactgcttcttgtttgttcctctgtgagccttaaggattcctccacagctggatgtgcagaacaattctttgtcaaaaacatcacttttcagctctatgtccaattttccttgagctgtctgtgtcttcaagcaatcaatagtctccttatgcccaaccacaatctattctgctttaagacgtagcctcttgtttggttctctctaaacatgtactgttaactgttgagcatcctcataagatccctcttagactaaaagacagtcatgcaattttaattttcccttatccatttatttttttaatctgattttctgtatttgcccacggccagtacttgtggagagtttaaaattttataaattaaaattccatttaaattaagcattttgtcgcatgttctctgtaccaggcaccatactgaatttgaattgaagggtaaataaaaataattcctgccctcaggaggctcacacttagctgtgggagagagacatgtgtacagctgtcaaatttagcagtctgaaaagttttggtggaacagtacacactaggtaatgtgggagcaagagggagagggaggtcagaaaggctttgacacatgaggagcagttcatggagcagggaaaagggaatggcatccatgcagctagaatgctacataaaggcacagaggtgtgaaaatgtaagagaaggctggagaattgcatttttattctctaatcaggttaatattcctgttcaccaagaaagcttttagctagcatataaccctcttaggtaattggaatttggggggctatttaataggaaactttttcctagagatgatatttaccgttgaaaacacgtagctcagtatcaactggacttacaccatatgttcactgacattctgcagcaggaaggtcagcggctctagagcaccaacaagaaggtatccagagagagcccagattgggctgggagaatgggtgagtgtcaactggacttacaccatgtgttcactgacattctgcagcaggaaggtcagcggctctagagcaccaacaagaaggtatccagagagagcccagattgggctgggagaatgggtgagtgtcaactggacttacaccatgtgttcactgacattctgcagcaggaaggtcagcggctctagagcaccaacaagaaggtatccagagagagcccagattgggctgggagaatgggtgagagaatggggactcagggtcttgttaaaggcagagcacaggttctgagaagttggaaagggttagatgggagtgtgtgtgtgcagggggatgttggagcctggaaaataccaaccatttgtcttttacactctaaaggtagttgtgctccccaagtgaataaggtgggacatgtgcacgtcaggttttcagtgtgaaacctggtatatttccaaatgaaagtgattggattcaggtgaccatttaaattatgtctatgaaaaaagaaaatagacttggggccttgataagcctttagctagggaagtaggaaaaagactcaaatgtctgggttggagggaagactcctgtactcagtctcagattgttttccttattcacttgcttcagaataatccaggctgcaaactattgggacccaccccagaactactgaatcacgatctctgagggtggaattcaggaatgatgataatttctccaggatatagggattttccttagagggaaaaataatttgaccacaggccgtcccagctcctacctccggacctggagctcgtgattcccaggctctcattccggtctgcggtggccggctcacctggcctgtctacctgcgggcgtggcggggttggagaggggagcgggacccgcgaccccgccccgtggcccggccggagccccgcccctcgggggcgggtggggagagctgccgcggccgaggcccgccccaaccttggctgcgccaatcaggcactgcgatctcagacgtcgggttacgcgcggcgcggagtcggcggccgggcggaggtaccggctcaggcttgggatcccggctgcgggtttggcggcgctgcgccggcaggcagcgaggccgggcgggccctgggccctcgcgcccctcccgcgaggcctgtcatgcagggccccgccgggaacgcgagccggggactgccaggcgggccgccctccacagtcgcgtccggggcgggccgctgcgagagcggcgcgctcatgcacagcttcggcatcttcctgcaggggctgctcggcgtcgtggccttcagcacgttaatgcgtgagtctgggaccccccgaccctccggaggccctgcgcggcagccgcggcccggcccccctgggggcccctcctgcgcggagagttcaggccttgggacccgaattgctcctcccccgcaaacccaggctgggtattcctgcactaggggtagcccgagcccctcacctactcgctgtggcctccagacaggagtgacccttcccctttccaccttaaacgtctgtcttttgagacgccagtctaaaactcgcctacctcccaccttaccatctcgaattgttaccccacttcccagcctggaatcatgacccccaagggtgacatccccttgtccgccccttctcaggggctcttcgtgcttagaacccacatccctcaatccccagtgcgatgctgagctcttttctgccccttcactcttcaaggatctgccttctccgttcacatttaaatcctgctactttgcatccctctcaacacctggagtgttagggccatgccttccgtttcccagtacccgcctccctctccgtggcccttcttcctcagctttagtttcccttttgtcagggtaggacccacccagtctgccttcttccccagatccccttcctctcgtttcttccggaacaggcccacctgttccatctctgtcccaagctttcctaataagccgcatctatagcttcccctggctgttccctttccacttttattctttatattttaagtttccttttccattaaacttgggcaccttagtggctgaatagagaaggaag

SEQ ID NO: 9900 - DNA, 6000 bp, Homo sapiens
acatgcctccaatgtcaaactttctttctaaccaaacgaaatttctgcatggatttgtggtgccaagggcctactccccactattcctggctgcagctgtcactaggcctggctgccttccctggcattagatcgccataccacatggtttggatgaggagcctgttgacagggatggaggagcacttggccatgactttaccaaggcagaccttacaattgggagaaatgctcatatttgttataagggctcatcacacgtagagaccccttggcagagaaagacagatgttacctgtggggctaattctcttggtgagagaggaggcaaactctaggcatgctatatttacacagataactcagccagtcactagaagataagacatctcaaatattccagtaaaggaaatgtgcctttacttgcttcttaatttttgttgtagcgagttgaatatacagaagtataagcagaaaacatttattttcccctctttttctttagtctcccctccaagtaatcagcattatcagtttggtgactgacctttcccacttattccattttcagacaaaccaacgcgtatttatagggttaattcctccatctctaacacttttttgaatataaatgggattatacaatatgcttcctattcaaattgctttattttgcctcccactttattatgaatattctcccagatgggtatatttagttctaattattctttttcatttattattattattttttgagacagggtctcactctgttgcccaggctgctgtgtagtggcgtgatctcggctcactgcagcccactcttgggctcaggtgatcctcctacctcagcctcccgagtagctcagactataggcgctcaccaccacacccagctaattttttgtatttttggtagagatggggtttaaccatgttgcctgggttggctttgaactcctggactcaagtgatccacccaccttagcctcccaaagtgctaggattgcaagcgtgaaccactgagcctggcctttattctttaaatacctgtgtaatattgcctgggagaaagagctattacatgctggatttcaagacattgtcaattttattgtagggttaataatcattgatttttcatttcagggaaattaaatggtaaatagactaacatattagaaaacattctggcttaaaaagggcaaaagaatatgtctcagaagcttggaaatttttgaaatctcagtgtgaatataaacacaattttactctacgggtgcatctgcagctagctcccatgtgggaacctggggtcctggcaggtcttggggccaggagaccctcatagtgcagttctcctctttaaggagtggctctggcctgagctgcattcagcatctctccttggttcctctttttgcaagcatggctgtcttgccacctcttggatctgctcaccacgggagggagggagaaagaaaaggcactgcctagcattagcatgcatatcacacaccctccctttgttctcttggctgaggtcagatggaataaatcaatcagcctccacatccaagtgtccggggcgggcagtccaggccatgtgtgcattgtccatcttttaacccccaattggggtcagcatgagtaaaacagaaccaaaaaaaccccttgggcagtaagcagatgttgccaggaacccattagctctggggcttctctaggagtttcctgggcattcgtgttttaggtgggagcagccagctcagactctttgaagtctgtaaatccatgctgctagtaagagatgccactttgttttttgttttgttttgagaaggagtctcactctgtcacccaggctggagtacagtggcacgatctcggctcactacaacctctgcctcctgggttcaagcgattctcctgcctcagcctcctgagtagctgagattacagaaggccaccatcacgcccagctaatttttgtattttagtagagatggggtttcaccttgttggccaggctggtctcgaactcctgtcctcaactgatccacctactcagcctcccaaagtatattgggattacaggcgtgagccaccatgcttggccaagatgccactttggatcttttgctctaccagatatgtgctaggcacttaagtatcacttgatcctccctgcctccggcgaggtaggtattatctacattctacagatagaatgctgatgctcagagagcctgggattttcccaggaccatagaactttagggaataagcagcatgaaagtgtgcttcttcatttagcttttaaccagaagtgtccttgactgcctttggttctctgccagggtcttgacctccaacatccaattgtgctgtcaatagattgatcattttcaggcccccaagtctaagatatctggatcccagctgggccttatagacacagctaaatatctccactataacctaaagaggtatttaaattctctgtctgtctaagcccccttaaagctggtaagtagagtgcctttcaatcccatttatgctttttgaccagaatgacaaggttctggacataagaaggccttaaagatcatcttacccaaccccctcatttgatagatgaggcaacaggagagtggatatgtttgcctgggtggtgggagttgagggtgggtgacaggtggggtggtggactagtgagagcagttgccagaggatgggataaccagagtttgcagatcacagcctgtgggccgatctatgcctctacctgtttttgtaaataaagttttattggaatgcaggcacacccattgatttatgtattgtctttggctgtttccaaactataacagcagagtccaataattgcaatggagactgatggctcttaaggtctaaaatgtttactatctggccttcacaaaaaaatgtttctgaccccagggaaagagagaggcacacaggtagatatgagttattagtaactttctagttcttagaaggagtgttaagttcacaagtgtttgttgtgttatgataaattaatgattgaatgctaatgggggccattgatggttatgtatgtatttccattaataatggaaattattgtcattaaattctgtgcacctgaaacagatggataggaaggagggattggaaggaaggagggaagaaatcattgagttcttaagatttaagtggctcttcatcacctgacttgctttgtcacctacacctgacttttgcccattgtatgtgtgatgctcaaaaaaatgttggagagaaggacaaaagatggcaggttgcgtaaagtgggctttctggaagaggcaggatgaatatactgggttatgtggggtgacaaggggcttggccaaaggatgaaagagtccacaaagtacaggttgttgaaaataatcaaaatttgatgttttcaacttccattcacaaagggcctcttccctttgtacctgcagagtggcacgaagggccaggttccatggccctctgtcaagacctccctcaggacattcctcctgctgaccggtccaggttgtcctcagaagttggcagcatacaaatcctgaaagcctttctcatgcaaaattgtgaacacttatgaagacactctgggccatgtcgtgtactgccatatttaatcctgggcacagcctggtaaagtaagggctaatgttgtccccatgtcagagatggggctctgggtgggtaagtcacttgcctggagacacgcagctggtgatggtggagccaaatatcgactctggacccacctgattccagagcccaaacccaatggctcaattatacctcctggagccaaggattgcacttcatgctgcttccataaaagcgtacacacagttacacacagcagaacattttgttttatctagaagggcagcttcaggggttgaaaccccacctcagcaaatggcaggggatttccacattcaaagaaacggttccagtccctggtgggaaagttccctgaagcttcaattagagaagagtcacagtcgactgacgcctgatgctcacagggggcggctttattgttttatatgtgaaaagtgagggaagggccaggacctcagcatcagggaaacgaagaaagattaagaagtatttcttaagtcacactaaccaaaaggtcaattcaactcgggggctggggagtgggtggggtgtgggggcagcaagcaagcaagcaagcaagcagctgagaagttatttgtggcaccagaaggaaggttgtgatgtccactaaaggaaaccatggctatgaatttcagggcatcaagaccctgtcaacacagctaatccccacagatgttggctgaataagacttcgatgaccaaagaagtgcacggtgcaaaccgtgtcagcctccagcaggccaatttgtcctcatattacacactctgcgggctctgctgctcgacccccaggtgagggtcccgtccagcatcccccaacccaaagaggggtgacccggcatggttaataagtcaacagaattcagaagccacagccggattaagaaggcagttttattttggtgccctgtacttcaagcagattaaataatcaaaaaggccgaggcactggggtcatgtttgaatgctacagctgttcaccaaggtttgacaaacattctttacgcggctcatcgtctgaatgggaaaggcagggatgatcctggggaggccaacattttaagaaagaagaggggcacgatcccaagatcctcttatggaaactgatcccagccagatggagacaaggggaagggctgcttaaataaatggtcttttgaaagcaacaactgttttctgcattgaagaaaagcaagggcagggttcagaaagactgaatgtaaagctgggctctgagtctgccatgcccttcgtgtgttgctctgcacattaattaaagggtctacgaggtcagcaaggacgcccaaggagactcagtcatgaaaggtgagccctgatcaattcccgttggaaaagttcttgtctgggagaaagatggtatcccctcacaaaggtatctgcgggaaatctattttcaagtcgtctgtcttaaaagactggacagatatgaaaaatgtctctgcatggaatgatttatgtttgcgcatgttgggtgcagaggaagagggtggagagaaatgtatgcagtcatgacatgaatatgtagttggcatgtcacgggccatttcataggaaacatggtgcttgtagttggagttcgtatattattcctttggggggaaaagtggaaccaaagaaagaatgaacaaattggctacaatctcagagaggcaagcctttcattaatagatcagtggattctgcggcaaacatgttctctggtttaagaattaatttcctgcaactaattaatgcttgagccccacagctaaaaatgaggggtgtccgttcattactgaggggaagatgttttggctttgaaaggagtcatttagattatttgcaaaattatagaaaggaaaacagtggttttgctctttgatattctggaaaggggaaggggactgtgatgttctgcatcccttaaactaaattaaactgagaagactctctttcagaaggctctctaaacatcttccctattgccctagagcactgttagcctcagtagagaatttaaggaagaaaggggaaaaggctcaagtgcatgacagccatgctgtgtatttccctagttaaggcccaaaacaagcaagcaagcaaacaatcaatcaaacaaagcccctttcaagagcttccactttgagtagataactattttgagttttggatattactgtgtggctcatgaattcctctaccactttatagtaaaatgcccttggcagatgtttgtcatattttgaaattcaagtctcaaaaaaaaagaagggagtgttacagctactttggtga

SEQ ID NO: 9901 - DNA, 6000 bp, Homo sapiens
tgtgtgtgtgtacagcacggttagaccccaaaggttgcaattagcatagcagggatccctttgtaataggaatttataacagttggggtgacttagacgtaggaaaaaagatcaatggtgttaaataaagtttatgggaggtcgttgttttggacagaactctggcactaggcctcaagagagcagacaaaaccagaatggaggcaacttgtcctaggtgctgcgtaattaaactcagctttaaaaggggtcagttttccaacaaataggagaaggggcccatatacctgagctggcatgataaagaagtcccctctgatgtaactctttgaggaaagtaacttcaaaatgaccaatctgctttttgttccttatttctgctttcttcagcccttttctgcctataagcccaaccccttctgctcagctcattagaacacttttctgttttatagatgagatgctgcctgattcatgaatcactaataaaagccaattcgatttttttttttttttgagacagaggacagtctaactctgttgcccagcctggagtgcagtggcacaatcttggctcactatgacgtctgcctcccgggttcaagcaattcttctgtctcagtctcccgagtagctgggattacaggagtgtgtcaccatgcccgggtaatttttgtatttttagtaaagacagggtttcaccgtgttggccaggttggtctcaaactcctgacctcaggtgatctgcccacctcggcctcccaaagtgctgggattacaggcgtgagccaccatgcctggccaagaactttaaactaaatttgatgaaattttgtttcttgacagtgggcaacatgatactggacaatataggtatatagtatagtacaggtatatatctttatacaggtatatataggtcagtgtagatatatttagtaatcatagaactacaaatatttatctattttcttttttttttttttttttgagatggagtttcgctcttgttgcccaggctggagtgcaatggttcaatatcggctcaccacaacctccgcctcctgggttcaagcaattctcctgcctcagcctcctgagtaggtggattacaggcttgcgccaccacacccggctaattttgtatttttagtagagatggggtttctccatatttgtcaggctggtctcgaactcccgacctccggtgatccaccagcctcgacctcccaaagtgctgggattgcaggcgtgagccactgcgcccagcaatatttatctattttctaaaatgtacatggttatatccctaagccttgtggaaatatggaaatacagggaagtacaagatcaaatctgtgctcccaggagtttagaactagtagggaagacaaatatgcttccttagagatagtttacaatttaaggcaatagttaagtgccactggtttcagtggaggaaaagatcaatatgaagtggaaatctggagaaaggggtaggaggggtatattttgtactgaagaaaaggaaacgttacagttaaggaatattgtgctggagtcactaaaaatatgggagccataatttgcagaaggtggggatcaaatttagcttgacagtagtggaggctttaggatgcacgttaaggaatggtggaagagaaaataatgttgattacctaggaatgggccgtatcggtcacatattacacccatatgggcatttggtctatattccaccagggcagaaccacccagtttttgtatgagtgaggctcactttgggtgaacagacaggaaaaaaaatgtatatccaaaactatagcatatttcttctggaatccaaatgaaactttagtcaaaaatttttctacttccaggaaggtgtgcagtacagtcatgtgttgtttgacaatgggaatatgttttgagaaatgtgtcaggcaattttgttgtgtgaacatcatagattatacttacacaaacctagctagtatagcctactacatactgaggatatttggcatagcctattgctcctaggctacaaacctattcagcatgttactgtactgaatattacaggcaattgtaacacaatggtaagtattggtgtatctaaacattgaaaaggtacagtaaatgagtaaaaatgatacacctgtataaggcacttaccatgaatggagcttgcaggactgaaagttgctctggataagtcagtgagtggtgagtaaatgtgaacacctagaacattacgctactatagattttataaacactgtacagttagaccatactaaacttataaacacgtttttctttcttcagtaataaattagcttattgtaacttttttactgtacaaacctttttttttcaactttttgactttgtaataacacttagcttaaaacacaagcacattgtacagccatacaaaaatattttttctttctttcttttccttccttcctccctccctccctcctttcttttcttttctttttttttttttgagacagtctcgctttgttgcccaggctagagtgcagtggtgctatctcagctgactgcaacctctgcctcccaggttcaagcaattctcgtgcctcagcctcctgagtagctggcattacaggtgtacaccataacacctggctaatttttgtatttttagtagagacagggtttcgccatgttggccaggctgctgtcaaactcctggcctcccaaagtgtggggattataggcatgagccactgcatccgacctattttctttatttctatctttattctataagcttttttctatttctaaaatgttttattttgttttttactttttaaactattttattgaaaactaatatgcaaacacacacgtgtgtgtttgggtcaggcctatgcagggtcaggatcatcaatatcaccatctttcacctccacatcttgtccctctggaagatcttcagggtcaagaacacacatggaactgccatctcctaggataacaatgccttcttctggaataccttctgaaagacctgcctgaggttgttttacagttaactttcatttttttaaaataagtagaaggagtacaatctaaaataacaataaatgtatagtatagtaaatatataaaccagtaacaaagtaatttattatcattatttagtatgttatactgtacataattgtatgtgctatacttttatacaactggtagtgcaggtttgtgtacaccaggatacattgcactacaacataaagacagctacatcattaggcaataggagtttttcagttttattatactctcatgggctcaccatcatttatgtggtctttcattgaaacatcattatgggacacatgactgtatttaaaaatgaaaaaaaaaccagaatggttgtacgagtactggaagtacagtttctactgaatgagtgttggttttgcaccatcataaagttgaaaaattgtgagtcaaaccatcctaagttggagacttgtgtgtattcctaagtgacagctctgtggtacattaggacattaggaatatttgggaatattagcaactttactggtttcgatatcagtcattctggctctaaattctggttctggctcttattagccaggctattttcttttttttctattattattattattatttttgagacagggtctctctctgttgcccaggctggagtgcagtggcacaatctcggctcactgcaaacttgacctccagggctcaagtgatcctcccacctcagcctcccaagtagctgggactacaggtgtgagccaccatgcccgatttatttttttacttttttcatagagacaaggttccactatattgctcagggtggtctcaaactcttgggctcaagtgatcctcctgccttggcctcccagtgttggaattacagtcatgagccaccctgcctggccaggcaggctattttcaacaagctacttaacttctcttaacttcagtttcttctgtaaaataataaccatagtagaagctatcaaaatgtgagatttaaatgaaatgtgtaaagctactaatccagtgcctgacacaacaaaattcttaataaaggttaatcattcaatcaatacaaacaactttctattaaggagattaaaatctctggagtgaaagattacacaaatgctccttttgacactcttatcttcttctaataccaaactattgtcaattcctgaactcaagatgacgttgctcacagatctttacctttttatctgccacttctccaggaggactgccattctcccacaaagcccctatgcctttgtggagtcttggctgaaaccccaagctctctgcaaagcttttcttggtattgacatcaccaccatcccacagaattcgttagtgttacatgctatctctggaccttggacacacttttaatattgtaacaaatggtaattactgtattttcttagtgtcgcctctcttccactagactctgagcttttgtggtattcgctttgtaaccacagcatctgtctagttcttagcaaacaataagcgcagggttggatgctgacgcatgacttcatgacttgggctccctcacttagcagtaacgtgaccctaggtgacacctcctaatctacactcatctgtaaaatggcggtgataacttgtacatggttactacatggagtccaagagacagcaagaaggatcagtagcatggtgcccgcacctagcagccgctagctgactgaggccgaaagaggaaatgctttggccaacactggccggaaggggcgggaccgcgagttaagaggagaaggcgcgccccactgcgcaggtgcaaatggtaggggttgtcgtgccggctgattccggggacgcactcgcggctggggcagaccgcggtcgcgtagctgacgtcatcgccgtgcgctgccacgtctgctcagctccgcggtaatggaggctagggatgggtgctgaagtatcaggctctggctctagctttagctctggcactggaactgcgtcggagtctgggtctgagtctggcagcccgaagcctggacaccttttcttgattctctaggcgggggctgcctgcgtccaagcagctggtttgcagcgttccaacgctgggagggagttcccttacctggggtccagtctgtaaagttgtcgccgctttctagggaccccgccccaccggctgggactcttccatgcgtgagtattactgagctgccccaaggtccggctgtcctggacctgcctcggccctcttgggtgtgcggcggagactgctttgtctacctttctgccgacttctcttagggaccagtctgttgaagtttgtggtctcctgcagtccaccacaccgcatactctcacctcttccgtcccagttttttccctgcacttttctttccctttgcttgttaatggagcaaggaccagcagcccctgcatccagcggtttgaatgctttgtttgacttggggttagtttacagccgaaggctgttaggaatagggagcatttgaaaacacgggttttttccagtgtcatccttgggttttagttgtattgtttaggaaacattggtatccatgttgacagaatcatgatttttgccgtagaatgatgaaaagagcttttttttttttttccagtgaggatctttatcttttacttgcttcttaatcttgcagtttcagtaatttctgtatgattttacaccagcttttctggagcgggcatccccttgaagagtttctttcaatattttaaccctaacatatagagataccactcgaacagttttacttttaaactgttaaaagaactactggtaccctttcattccacttcctcagtcctgacaacctctgcagaacaggggacactccccccccccgccccccccccttgaagaaacacactcagaagaacacactcagaagt

SEQ ID NO: 9902 - DNA, 6000 bp, Homo sapiens
caacaagagttcgtgggcctttattaaccctagtgctctgccatgaatctctttgactgagctcagctcccttcatggggcagcctcattgggttcttggccactcactgactaggtggcccaattccaaagtccagggacaggaaacagcccttggctcctcctcctgaggaagacatctatccagttccaatcagtcatggttggggtgggggtggggaagcaaaatcacatggacttcagagctattcttttcaagtgctctaggcaagtctgattaagccagaaaaggttggctgctcttcacaaagaggcacagtaaatgccaggctaactcactcccacaggaacgtcttacctgttcttttctcccacctgtttcccaatccagcatgtgcctgggaaaggactgcagttgacagaggattgcagctgtcctttgtcagactgtgtgggcctgtgctgtaaatgagtggcctcgatgggggctgctgcagcctgcgggaggtgcactgggtggttagagtcagctctgcaggtactgggttgggggccaggagggttgggaatactgagattggggaaacacagtccagggcttcttccctaggcagacaggttgagcgagaagaatgacaacatgagtccagggggcaggtcagaggaagcaagcagatgctccagttgtgagcctgtagcaaagaaggttagcaccaccaaaaatagctccatcaaaggtcccttatcgcctcgtgttggccaattgccatgaccctcaggtttccctgctgggtttctccatggactctgacacttgccccagttcctttcctaacagtctttcttgggctctcaggacatttctttttttctgtttctcatctcacaaatgaaacagtgcatcttgttctctttcactgtttccaccatttccttaccaggctcctgatttcagtcttctttctcaaaagggtagtgcatggtaagacatttgggctctgctgtttgcgaggtgtgtgacctctgttgctctgttgacttcattcttcctaagcttcattttcccaggctataaatgtgggactgttaagagttcctactttagaccgggcatggtggctgaagcctgtaatctcagcactctgtggggccaaggcaggaggaacaccacaggccagaagttcaagactagcctgggcaacacagtaataccctgtccctcaaaaaagagttcctacttaatgagggttgttatatggaataaataaatatataatagaataaataaataaataaataaataaataaataaataaacaaattgacaaggcaaaacttattccacttcagcaaagcaagtgtcaatattctacttatggatgagtggaggaacacatgttcagatgaaatcacttgtgcaaagtgatttcacttttacttttaaaagtgtaaaaggcttagtatgggccaggtgcggtggctcacgcctgtaatcccagcactttgggagactgaggcgggcagatcatgaggtcaggagatcaagaccatcctgactaacacgatgaaatgctggctctactaaaaatacaaaaaattagctgggcgtggtggcacacacctgtagtcccagctacttgggaggctgaggcaggagaatcgcttgaacccaagaggaggaggttgcagtgagccgagattgcaccactgcactccagccagggcaacagagcgagactccatctcaaaaaaaaaaatgcttagtatggggtctggagtgtactaagtactcaatgaaagtcagctgctgttactttccctctcttgtggtttctaggagaccttctcccctcccctcatttcaactatctcctgtagaatgacctccaaatctgaatgttcggtccgagctccagagtgtcacctgcatgtcgaatggcagtgaagggcagaggaaaaagcatggccgcacatgatggcagacaaaggcttgttcctgttcagcactaacagctgtaaactttgcacaagtgatttcatctgaacatgtgttcatccactcatccataagtagaatattgacactcgctttgctgaagtggaataagttttgccttgtctatttcatccatggcacttaccatgctctagaatgacatctttccatgctcttccccagctgaaatgaaagtgaggtccttgccagcaggagccttgcctcctttctcctcactctattccttgccccagcagtctcctagcacaggctcagtaacatcagttcctcattcactttctctcctcctatatccctttgacttctcaaggtcagtatgtatcaaaccaaacaactaatcattgtcttcactagacctgacccatgaatttaacaaacaagtattaagtgccagggttaagggttgagacagaaagaagatagttgagacattgtctcattgatggaaatgttcactgtctactagggagatggataatgacactggaatatgtatttgtgacaggattagagacatttctcagggggccccaagcatagagaaggaatgattctgactataggggttggaaaagccctctcagagaaggtgataattatcctgggtcctgatgaaagagtagaaatttgccaggcagagaagattgacagatggctagaagagtggtgtgatggggcatgaactaacatggtgtgttcagctggaatggagggctgacaccattttcccccattttcttaagtggaaatttgacacatacacaagaatagaaaaaaaaatagtttaacacccaaatagtataaaacacccaggtgatcacccagcttcaacaactatcagctcatggacaatcttgttctacctacatgcttactcactaaacccccataccattattttgacacaaatctcagacattgaataatttcatttgtaaataatttttggttctacatgctataacaattctgtgaaaaaaattttaaataaataaatactttggtatcttaaaaagttaaagtatatcctctttttgtccttaaaaaggagtgatacatagcatactctaacactgcaacttgtttgttttatttgtatcttagccatctatctggtgaccacactgtatcaggatatgtagaattgctttcctcttttaggaggctacctagtattccatttgtgaatagttaacctagccagtcaccagctgatgggcatttaggttgttcccaatctcctaacataaaaacaaagctgagagaatacccttaaatatacatctttgctacctatggggattcttggatgtggaattaaattccagtacattcttggatgtaggttacattcttggacgtagaattgctgagatcttgtgcacatggattctgaaaggtgctccctatttggcccaacaggtgctttaaatgataggacaaggatgctttctctctgttgtccaggcttttgacactttggagttctctttctgtcccttccttcgtttactcagtgacatatcataccaatccaactacccccagcctcctccctccatgtccactgctgtggtcctgggtcaggcctgagtgctttctttctttcttttttgagacaaaatttcgctcttgtcgccaaggctggagtgcagtggtgcaatgtcgggaaagtaactgcaacctctgccttccaggttcaagcgattctcgtgcctcagcctcccgagtagctgggattacaggcacatgccatcatgctcggctaattattgtatttttagtacagacggggtttcaccatgttggacaggctggtctcgaactcctgacatcaagtgatccgcccgcctgggcctcccaaaatcctcggattacaggcgtgagccaccatgcccagccaggccggcgtactttcttatcaggacagttgtggctatcaagtcagcacgtattctaatcatctgccaaagcgaacatcctaaaacaggaacgaaatcattctcttacttaaacacctctgttggtgtctcatctacattattaaaaatctaactccttagcctgccttcagtgcactcttgtttgtccccagattctcacttatttctcatataccttaggcttcactgaaactggattctggtgccttacctgggaccgtgttcacccattcccttctttttctgcttgaagaaaagtgttgctcatccttgaaggtaaacttaaactccatgtcctccataaagccacacagtgttaagggccactggttttggactcaggttgacttggattcttatactgtctctcttttggggggatgtcatttaattcttctgaaactcagagttttcatctgttagagaaagacaaaaatacctaccttggaggatgattgtgaggctcagggatgcgggaatatagtaggagctgaattaaaagcaattctgattatttccgtggtcactattgccgccccaccgcacttgattgcagcccctggtgctacaccagctacatttgctttatgtgacagcaggttgtggacaagactgccttgatctctagactgcaagctcgctgtgggccgggctcacgattcacccccggatctcccagccctggcaccaagccggcactgggggcgcgccatgcctgcagaataagtggggaaagcgacagggataaacgtagaaaaacaagcacagacagacggagagagggcagactgggaggcaggtttttcccggagtctccaccgaaggacagagagggcggagtcagaatcgggggcgggggcctggctcaggaggtggggcctggttcggaggcgggtctcggcgcggacccctccctggtccgtcagtgaacgtgctccgcgggctcagtccgcccgccgctgcgtcccggagtgcaagtgagcttctcggctgccccgcgggccggggtgcggagccgacatgcgcccgcttctcggcctccttctggtcttcgccggctgcaccttcgccttgtacttgctgtcgacgcgactgccccgcgggcggagactgggctccaccgaggaggctggaggcaggtgcgtggcgggaatccgggttcgggtcagaggaagggagccgggtccgaggaccggggctgggaatcggagattcggagattcgggttccggtatcggaggcgttgggaattgaggttcacttatcggactggaatccgggtctggtatccgggcccgcgtccgcacggtctcggacagaagggtggatgggagcccggctccgggcctgactgggacctgtgtggtgctggctgcagggtgtgcagggcgtcacgccgcggtgcctttggttgggtggatttgccgagggagacgcggcgctgagcctgcccgcgccgttgctttcccagtcccagccctgggccccatttccagcccaccttcgcccccgtgcgggcccccagcctcttcaagtccactttcaactgtctctcctcctccccaccccacttacgtcaggtctgcccttgagactttagacattagatcttcaggagaaatattgcatagacaactttaaattattcacgaattaattatcgactctgcccgtcttcctggttgtctctacttttaccttttttttttttttttctgagacggagtcttgctctgtcacccaggctggagtgcagtggcgcgatctcggctcactttaacctcctcctcccgggttcaagcgattcacctgcctcagtttcccaagtaattgggactacaggcgcgcgccaccacggccggctaatttttgtatttttagtagggacgcggggggggggtctcattatgttggccaggctggtctcgaactcctgacctcaggtaatccgcctgcctcagcctcccaaagtgttgggattacaggcgtgagccatcgcgcctggcctccttttccccttctaatgaacgactggtcgag

SEQ ID NO: 9903 - DNA, 6000 bp, Homo sapiens
cctggcctcccaaagtgctgggattacaggggtgagccgccatgcccagccagttgtgattaaattaaggatggggagattatcgcagattatctgagtagaccacgaatgtaatcacaagtgtctaagagagaggcagagggagacatgacacacacggaggaaaaggcaatgtgatcacgaaaggcagagatggatcgacctgggtgacgccattaagggaaggaatgctggcagccaccagaagctggaagaggcaagggaatgatagattctccccctatagcccccagaatgggtacagccctgctgacaccctggctttggcctagtgaaactgatttctaacttctggcctccggaactgtgagggaatccactgaagttgtgctgatttgttacagcggccaccggaaatgaatccatgccgagtccaaggacacgtgcccaggagctggatttagtatgtctatgttcttgataggcagagtggctgtgataccagcgatctatggaccacgctgccccaactgctcaggcaggggactcgaagcaaaggactcaaacccttgaacgggggtttgtagtctgggctccatggaatccatagttgaatttcagtgggtaggggctggttcataattttttttaaattgtatgaggaactatgtgtggtgtgcacatatattcatatttttcaaggatgaggtgtttttgtttttgttttttcagattctcaaacgggtcacaaaaaaaggttaagaactaaccactaatctaagaacaaactgctgaggtgtgtaagcccagcccagagtaggtggggaggagtgaagcaccttctaaatcaggcccagctctgagggttcatgctgagccgttctccaagtctctacaaaactcacagcacagggagctctgccccagggcctggtgggaggatgacacaagactgggtggggcacttccctgctttagcaggagagtgagcagcaggtgggcaatgtccccaggagagctaggatccaggcaatcacaggttagtatctgaggaaggtaaaggcagagatgacccctgataagcacacaggacacaccagaagttccaggaacacacggcaggaatttcagacggggtccttcaacagtgtgggcagtggctcagctagaaagaccctgtgggtacttagtatttatagactatgagaaacttggttatgtattttttttcttttaacacttcactcattcctccattcattttataacacttcatcttaattgttttattattttaattttggccctttttggtaaaaaccattttaattgtatctttttgttcagttgcttgcttaatttcttttttttgagacacggtcttgctctgttgcccaggctggagtgcagtggtgcagtctcaactcactgcaaccttcgcctccagggctcaagtgatcctcccatctcagcctcccaagtagctgggactacagatgcatgcaaccacgccaggctaattttttgtagtttttgttgacatggggtttcaccatgttacttaggctgacctcgaactccagagctcaagtgatccacttgcctcaccccccgaattgctgggattacaggcgtgagccacagtgccccgccagttgcttgcttaatttctgtctctcctactggactgtaagctccaagtaagtaggacccatgtctgttttactcaatagtgtgttcccagctcctaacgcaatgcctgtcttagtctatttgagctactataacaaaatgctttggactgagtggcgtgtaaataacacagatttgtttttcacagttgtggaagctaggaagtccgagatcaaggtgcctgcagatttagttgaagggcctgctttctggttcctaaaggcgccacctaatatagtttggtgcaaaagtaattgcggttttggccattaaatgtaagccacttttaatggccaaaaaaagtggcttactcttaatggccaaaaccgcaattacttttgcaccaaagcttacttttaatggccaaaactgcaattacttttgtaccaaagtacttttatctggctttttttgttttgttttgttttgtttgtttgtttgagacagagtcttgctctgttgcccaggctggagtgcagtggcgtgatctcggctcactgcaacctctgcctcccaggttcaagagattctcctgcctccgcctcccaagtagctgggattacaggtgcctgccaccacacccagctaatttttgtatttttagtagagacagggtttcaccatgttggccaggctggtccggaactcctgacctcaagtgatccacccgcctcagcctcccaaagtgctgtgattacaggcgtgagctaccgcttccagtacttttaatagccaaaaccacaattacttttgcaccaatctaataccatcaaattagtgattagatttcatttctcctgagaggttataactttgttttgttttgagagaccggggtctccctatgttgtctaggctggtctccaactcctgggctccactgatcctcccaccttggcctcccagagtgctgggattacaggcatgagccaccttaccaagccaaatcataactttgaaaacacagtgaaccactaaaatagtgtagccactttggaaaatagtctggcaattcctcaaaacattaaacacagttaccacagatcccagcaaggacactcctaggtatatacccaagagagcatgaaacctgtgtccacacaaaaacttgtgcacaaatgttcagagcagcattattcataatagcccaaaggtgaaagcaatccaaacatcccactaatgagtggataaacgaaatgtggtataaaaatacccataccatgtattatgatgagccataaacaggaatgaagtactgataacacgcagcaacatgaatgaaccttgaaaacatgctaagtgaaagtcacagaaaggtcatatagtggatgattccattgatgtggaatgtccaaaatgggcaaatccatagagacagaaggtagatttgcgattcctgggctgcgagtgttgaggggagtggacagtaactgccagtgggccgggttcttttcagatgggggtgatgaaaatgttctaaaagtagacagtgatgttggttgcacaacgctatggatacactaaaaactgctgaattgtacattttattttttgttttgttttgagatggagtcttgctctgtcgcccaggctggagtgcagtggcgccatctcagctcacagcaatctccgcctcccaggttcaagcagttctcctgcctcagtctcccgagtagctgggattacaggcgcctgccatcatgcctggctaatttttgtgtttttagtagagatggggtttcaccatgttggccagggtggtctcaaactcctgacctcaagtgatccacctgcctcggcctcccaaagtgctgggattacaggcgcgcaccaccatgcccggctaatttttgtatttttagtagagacagtgtttcaccatgttggccaggccggtcttgagctcctgacctcaagtgatccgcctgcctcagcctcccaaagtgcagggactacagttgtgagccaccgtgcctggccagaattgtacattttaaaagtactatgtaggctggatgtggtggctcacacctgtaatcccagcactttaagaggctgaggagggcagatcacgaggtcaggagtttaagaccagcctggccaacatggtgaaacaccgtctctactaaaaatacaaaaattactcgggtgtggtggcgggcacctgtagtcccagctacttgggaggcggaggcaggagaattgcttgaacctgggaggcggaggctgcagggagctgagatcgcaccattgcattccagcctgggcaacagagtgagactctgtctcaaaaaaaaaaaaaaaaaaaaagactatgcttatggcatataaataatatctaaataaagctgtagtttttgaaaattaaaaaagattttttttctttttttcaatcctgctccttctatagaaatattgttttcaagtcatgtcttgctttaaacaaacctactaaaatcaataaggagatttaaaaattacaataatagtttactctcaagaaaaacagccctgtgtacttgaactgtgcggtgtgtggctggacaggaggcggccggttgcagagataaccagctcttggctgcggggccgtgggctaggatgacatccaggagcagggcttgggcgactgcctgggggcggagggtgccgttggcagcttcagaaaggagagtgagaggcagatgtgggggtatttgttctccggcacgtttgtttcctccttcctggtcttgcaccccaccctttttactgcgccctgtcggcgatcaggaccacgcccccttcacctcgggatcccagcacccatgcgcttcagcagcgcaactaattgctgttggctcaggaaatgtggacaatacgcaggaagggacgccgtgccttacagcgaccggcagggactcggccgtccgcgagcccagccgcccgccccgctccggccaggatgttggaggtgggtgaccgcgaagaggtcggcggggggcgggggccgcagtctttgtgcgcgcgcagctcccggctcccgccgctggggggcggcctccgccctgccgacccccgacaatagcgcgaggggtggggagcgcgcggtcccggaaacttttccccggcgccttcgccgccgccgcccgcgcccgggagcgcgcccttctctgcccgcggtcggtgcgctcggccggaggcgccgcggcggaacggaacccagagaagggcacgcggggcggcggcgctcggggcttgcccgcggcgagggaggctgcgcccaggtccccggccccgcgccgcgcgcccagccgcgccatgggggaggcgcccagccccgcgcccgcgctctgggactgggactacctggaccgctgcttcgcccgccaccgcgtctgcatctccttcggcctgtggatctgcgcctcctcctgctggatcgccgcccacgcgctgtaatggggccacgggtcggggggctgtcgggcggggaaacgggcgccaatcccctgctgctccctctcggaaacctagaggagggggcggaaagggggatgaaggagatggctcagtaataggatccaatggaacattgctctgtagactgaagtgggatcttctttccggatcccacgcacagggaagctgggctgtgagccaaagggaggaggctgggtggtgcagcggatggggccccgaggacaccgcgagccctgggtgctattgtcagcccttcgccattgactcgcagtgtgacctgggcaagctccagaacctctctgggcctcctatgaccggagataatacctcataggatgatgggaggattcgatgaatcagtaccgttaaagcacttagtaaatgctcattaaacatcatttgtattgctccagctaggccaccaactcttaggaccttggcaagtcccttgatgtttctggcctcagtttacccaaagtcctcttaggtgggaagggaggtagtgatatgatccagctggcctgtctttgccctggtctgtccagcacctggactggtttgtccagatgcccacggtagcctaagttctaagagtgaatctccaggtcctcagccgctctgtcctaggcatggaaatccactagcagtgctcaggatggtgccgcccaagcattccctggcaggggagaaaggaccagcacccctgggagaggttagaactgtctccctgtaggcactcagtggatattctcctaaggcgtttggtcgtattgcagagattctgcagccccactacccagtactgcaatacaaataaaaagacgcctagaacatttactgtaggcc

SEQ ID NO: 9904 - DNA, 6000 bp, Homo sapiens
agtggggaactggaggcccgaggggttactctgagtgcaggacttcagggtggggctgagaacagaactgagtgagcagtcagatacaaagacaccttccacccccagctgtttagttttactctcggtagagccaccccaacccgtctttctctcacatctccaacagcaaattggaatggctcgatcttcaaatacatccagaaagagctgcatccctcacctcttcgaccccatctcccaccatcactccctgcactccagccacgctggcctctgcttttacttgaatgtgctgagcacatgcctacctctggcctttgcacagggtgttctgtcctccaggagcaccttcccttccctcaggtaccctcacagcgatttctccctgctttcacctcctgctcagatgccaccgtccctgaccactgcccatctcccttatcccgctttatctttctccaaagtgcttttcgtcacccaacatactatgtatgtttaccacttgatgcccccactggaatgtcagctcctcagaggcagtgatttttgtctattctgttcattgcagtatcctgagagcccagaatagtaccaaggacaaagtgggtgttcaatatttgttgaaaaaaatgaatggagaaacaactctggattagggcttgaagacccaagtgtaagaattaaagaggagagaaacacgaagggtggcttttcagtcaacagggacaggtttattttaaacaaacctgagaggggctgctggctgagttaggtcagagccacactctcttacagactaagagtttttaaggattcagggtgggagagcttatcagtggcttggactgcttctgtgtctctttgttgtgcttatctgggaggcagactggtgtgtctgtttccatacatctttctgcagctgcaggcatatccccccaagactgcttttagcttccctatcttagtacacctgaagggaaaggaatgtgcttattaaggcccacagttttactggggcccattgtatgagggtgaagtttggcagtcacccaagagactttccccccacctccctctgtgtcccagctgtcttgtctgtgttttactgtctgctctttctggctgcttgtagttagaagagaagtgacttccttgaaatgcatgaggctagaaagggagctggaacttaatgtgccagtgtttgtccgagatgacgctactcctgctctgtcacccagtcccagcagaaagcaggaagacagaatggttatcaccattaagtgagtgagaccaaaaaatcccttggatgagtagtttgatttcccccatgaaaggggaggatctttatacaccagaatctctcagctcatccaccccagaaggaatgcccctgtgtcctgcagaggaagcagtttattgtctcccatggatgctgactccccagggtcatgtttgagaatggcaacctgcactaaggacttattttctttcgtttttggctaagttgattcaatacacctgtgatacaattccaaccactactttctgaagctcaacccaagaaagagatctaaagccagagggagtggtgcctgtggtgtattttgagtgaggtaaggggtttctaagagtttgataaatctgactgctaaggactttcatgtttagaatctaacccctttgaaagatacaactcccccatacagaatcaagtgtctgtgaagaatacacaaatggctttcagacagagtgttaagaagaatgcaagtgttagaagtttagctcaacaaaccttcctcagctccagctctgtggtagtacctggtggtcacagatgaatacgacacaggcatccagtggagaagacggaaggggagggatcctacctttgtccctgacaaagagcttcagggagggaaggaggggaatagacattccagaaggaaccatcctgggcaaagcctggagggcaaaaggagggttttaagtagtgttcgctcacacgtgtttaggattgcaaaaggttttcttaagaaagtggcatttaaaaggatgtctgaagcctcaggaagccttctcagaccccatagagcctttcactaaacgatcatagcatgctgggcttttccttcatgtcacctatgacagtctgtaatcatgcatttgtctggtgatgttttaatggcaatctgttccaccatgccaggagggcagagaatgtgtcaccttgctcaccactatatgcccaatggctggcacatcacgtgtgctctataattgttgactgaacaggagttggcaggctctgcattagaaagaggaaactaagaaagaaacactatggtgctgacacaggagaagtgtggctagcccaaggcccaggtgcgaggctgagagcccttgaatgccaaaccaacgagtttaacctgaaggctgggtagcaggtggacccctgaaataaacttgtacaggcaagtgattcactcagaacagagggcaggtaaatgcatgattcaataaagatgtgggcacccattgtacaccaagccctgtgctagatgctggggattccacagcccatctgatgctctcagcttagtgcgagaagacaggcaggaagtaagatggcaaaaaataaaaaaggtcatttcagacagttcaggatgtgaaagacacaaagggtcaggaggtgatattggagctaaatgttaaaggatgaggagtcagccacggaagagctgaaggcaggatataccaaaccaagggaatagccaagaggctagaggctgggcagcaaaagggtgggaagagaccaggctggaaaggcagacagggccagatcacataagctctgatacagtaagcagtttgggatcattttttaaaaatcctatgggaagcataaaggatcagtggggggcggagggggggaagttagggacttcttacggggacagtggtatgcacaagataaatactaaggaaggcctataagtgagtgctttcaattctcactcctctccgaactaagagagatctttgaagcaggaaaagatagggctccatgttttggaggcagatggacctagcctcccctttccagagaaaactgcctcctgtaaatcctcaaagaggagggtcttgtttatcagcacagcctcattatacccaaaggctcaaaaattatttgctaaatgaagtaaattagagaaagactcgaaattaaaaacaagagtggtgagggcagaggacttttgcttatggcacacattaagtagtaatcagcggaaatataatagtactcattaaagagtgagtcttatggctttacgacccagaggaggagaggttctagaagcagacagcgccaccagggaaaaggctcagaattttaggctgagctagtctcctaactggatgtgtaactacaggtaggccacctccttctctgggcttcagattgcttgaattaactgacggagctggagtattcaccaaagaatttctgggggacttccaactctctctgtagttttataaccatccatcccccttctctggcgcagagaaggtgcttcatgagtatttgccgtatcaatgaagcccaacatctcattttacaacactggataccagggcctggaggggttaggtgggagctcagggccaaggagccagtttgtggcagtgtgtggggaggccctccgacctgtggctcgggtacttctgagctcttgggtagagtaacatcaaggaagcagtaggtggtcggagctcaactttggggtgggaggtaggcagggttctccctgcaatccactgggcactagattggataaggctcttctggggtcacaatgcccaggctcaaaccccagctccacgatttgctggctgagtggctttagccatgtctcctgtgtctaactttactcttcagtaaaatgtgaccaacaacagagcctgacttacaaaggtcgcagcgagatctgtgagacaagccaggcaagtttccttgaacagtgcctgacaggtagcagggggctcaaaaacattcccgttagtggaactcctagcactccagcacagcacacgctaccccgagtggcaacttttcgggacgcgccttttaaaggcgcgtgcaaaatgtaaacacgtggggtatggcaggagcggtagtgataattaaccaccatacattcccagtttcgagccacacgcaacgtgctcggcacttcccgtgccccaaccggacctagtttacgacttcctacgcacaggcccctctgaggtcagggttcgggcttcactgtgaccttggaccagccccgttccccccagagcttcggttttctcatccgcaaaacaggagtagcgaccccccagccggcccgcctccgagtgtcccagggtgggcacctgggccgcgcctcaggtggcccgcgcccggcgtggtcgcggggcgccggggcccgcgtgtctcccgcaggccctcgtaggccggtctccgtggcagcccgccctccctaccttcctgccggcaataggacatggctgcagcccgtccctgagaccttgcagaagcggcggtggcggcagctgcacctttacgccgtgacctccctctcctctggcagggcgggctcctccgaagcccgcgcggacccgccccctcccaggcctgcccgccgcgcgcctgcctcggcgccctcgcaaccgcggccaggccaacctcagccggaaactacatttcccagcaggtcgcgcgctcctcgacagctctccaggcagtagaaactacatttccccgaaagctttgcagtgcgcaggcgcatcaatgaggtactgcaatgtcccggaccgtatagtttccaggacgtctcgccgcgcgcatgcgcagaaacactgggcacagggggaggtaactgcagtaagtcccgcttggccctggagtccacgcggattttcgaagctggggctggcaagaggccgctggacaccacgctccagtcgtcagcccacttcctagctgaacagcgcgaggcggcggcagcgagccgggtcccaccatggccgcgaatgtgagtatccccgggccagccgggccacacccaggcttccccgtcgccctggggcttttccccggggtcctctaggtccatttcgccgcctggagctcctccgtgcggctaggcccgcatctccctctgctcgccgtgtctgtgccttcgccagctcatccctctgctcatctcgcggcctgtccaggcttcttttgtccgtgttccttggctcgcctcgtcctcggcgttcgtgcggaggcggactcggaggtgttgctcccgtactgggatctgcttgtacgcctctccgcggcccctccttgcattcccagttccctcctgtaccttggggccctgaaacttgcgcattatgagagctggacgcgacctcagagagggcgccagtcccttgggagggaggaaggcgatccagcccaagtggagctgtccagcaatggacagacagggctgtccaggcgggcagagagctctccgccctagggagtctctgtaaaccgagtctgtgatgctccaaaaagcttaggctgggctgggagcgaaggagttgggggagagggagcatttctctactgtcggggcccctcctccccctagcaaggatttggttggaggaggcctggctgagggctgttccctcaaggcctcttctccctgcaactagcctttctcgggaaactatttaagcccaacattcattcaacaagcagcgcctcctaccagggcgctgggtgtgggagaagctggtgactcacctctcccctcctctgtgaaagtgcttctagggcccgcttaggagcccagccagccccagacacaccctccctcctgctttggtagagtgtcctagcagctctccccttgcctgtcacaccctatttccagacaccgcctctgtccccaagcgtcctctctg

SEQ ID NO: 9905 - DNA, 6000 bp, Homo sapiens
ttaaggcagtgagttcggcttgctgagaggtagtggaggagggcagagcggtagcctcaatgatagatgtggaagatactacagcatagcctgttttgctggtgagtggcaattaggcctggtggaactgccatcagtaaaccaagtgtgatcaggatgaggaacaggaaagaaggaaatatagggaaatggagtgaatgtcaggtggatcagagagatacagtcatgggggtctagtttggtatccagaataatgtgggaggccggactgaagtccgggccagaaaaatggtaactgtgggagactcaacaaagagtgaggatagctgaaggagtcgggaagcagaaagtatatgcatcaagtgggaggaagaaaatagattttggaaattatgagaactgtagaaagtgagttgagcatagtttgtgatttttagggcctctaaaagtattagggcagcagcagccgctgcacggagacataatggccagcctaaaacagtaaggtcaagttgtttggacaaaaaggctatggggcgcggtcctggtccttgtgtaagaattccgactgcacagccctgcactttggctgtgtgtaatgaaaagggttgggatgagtcacagagagctagtgcaggagcagtctctaaagctgtcttcaaggaacggaaagaggagtggggaaaagatttaggatctatagggtcggctagatttccttttgtgagtttatttaacggttttgttaggatggcaaaaccaggtatccaaagtcgaaagtatccaaccatgtccaggaaggaaaggagttgttgttttgtagaaggggttggggtttgagagatcagtcagacatgatcggcagagagagcacgtatgtttttatgaagaattatgccgaggtaggtaacggatggagaagaaattgagctttggagggggatacccaatatcccttggagaataaatgttgaaggagcaggagggtgtcctgttgagaagattcaaaggaggggctacaaagtagaaggtcatcaatatattgaataaggtgagaagcagaagggtggaaagaaagtaaatcaagagaaagagcttggctgaagtaatgagtgctgtccctgaagccttgcggcagtacagcccaggtaagctgctgggactgatgggtgtcagggtcagtccaggtaaaagcagaggctgggacgaggggtgtaggggaatagtgaaaaaagcatctttaagatcaagaatggaatagtgagttgtggaggaaggtattgaggactaaagagtgtacaggttgggcactacagggtggataggcaaaataatttggttgataaggcgcagatcctgaactaacctgtaagacttgtccggtttttgaataggtaaaatgggagaattgtaaggagagtttataggttttagaagcccatgctgtagcaggcgagtgataacaggctttaatccccttaaagcctgttgtgggatgggatactggcattgagcagggtaagggtgattaggttttaatgggatagtaatgcgcgtgtgatgggttgccagggagggagtggaggtgtcccatacttgtgggttaaggtgggggggatacgagaggaagacacaaaggaggctttcggttgggaagaagggtggcaatgagatgtggctgtagtccaggaataatcagggaagcagataatttggttaaatatttcagcctaataagggaactgggcaagtggggataactaaaaaggagtgcattaaagaacgttgtccaagttggcaccagagttggggagttttaagaggtttagaagcctagccgtcaatacccacaacagttatggaggcaagggaaacaggcccttgaaaagaagataatgtggagttggtagcctctgtattgattaagaaggggatggacttatcctccactgtaaaagttacccgaagctcggtgtccgtgacggtccagggggcctccaaggcgatcgggcagcatcagtcttcagctgctaagctgagaagatatgggaaggagtcagtcagagagccccgggccagagttccaggggctctgggagtggctgcagggcaagctggacagtctgatttccagtggggtcccgcacagttgggacacggcttaggaggaatcccagggctgtgggcatttcttggcccagtggccagatttatggcactttaagcaagctcctgtgggaggcggtcctggaggaaagcctggccactgcggttcagacgttttgaagttcttgtgtgctggagatgtggctggggtttctctcacagtggaggcaactaattgcaactcagaaaaacattgctacttggctgcctttactctattattgtacaccttgaaggcgaggttaattaggtcctgttgtgggttttgagggctggaatctaatttttggagctggcggcttgggtgcggtggctcatgtccgtaatcccagcactttgggaggccaaggtgggtggatcacttgggcccaggggttcaagaccagcctgggccacatgtcaaaatcctgtctatacaaaaaatacaaaaattagccaggcatgatgcacccatagtccctgctactcaggaagctgaagtgggagaatcacttgagcccagcaggttgaggctgcagtgagctatgatccaccactgtactccagcctggcagacagagcaggaccctgtctcaaaaaatacatatatatataatctgggcttgatggtacctgcctgtagtcttagttactcaggaggctgagctgagaggatggcttcagcctgggagctcaaggctgaagtgagccatgattacaccattgcactctagcctgggtgacagagagactctgtctccctctaaaaacaaacaaaattcagtctagctctagacctaatgagaatcttcatcttagcaagatccctaggtgatgtgtgtacacaggagtttcttagaggcagaaatcacttcccagcagtgtctgaggatggcatcacttcagccatcatcaccagggctggggacctggagattaacaacgatgtagtccctgccctcaaggagcttgcaggctagcagagaaacagacaaccagaggaacaaccacaggactggtacaaaggtaggggagtagcagagacggctttacagaggaggtggctctgagatgcttaacctttagtgctagtagaggcatcgtttgttctaagaaaatttgctttacattctttaaagcatgcagagttgatcaatgcaacacctcttgatttcctgataagagctttcagagggtatcatctttgagcagctccttactcaatggagtggtgcagtgagacctctgagcctcaatttcctcatctgcaaaatgggacagtttgtaccatattggcgttactgaaattatccgtgtttttttttgagacagagccttactctgtcacccaggctggagggcagtggtgcaatttcggctcactgcaacctctgcctcctgggttcaaacaattctctgcctcagcttcccaagtagctgggaatacaggtgcccgccaccacacccagctaattttttttgtatttttagtagagatggagtttcaccatcttgaccaatctggtcttgaactcctgacctcgtaatccacccacctttggcctcccaaagtgctgggattacaggcgtgagccaccgtgcctggccttatccgtgcttttatttgagccacaaaaccaccctgtgagagaagcagcatggtgtggaaggacttccataaaaacttgctaaacagaagatacaaaaagaatgctgctaaacagtatgttcaactgtgaaatcatttttgtttaaaaaatgcatatacatattctataatttttttaacattttaactatatataactaaatagacatatagaaaaatgctctattaacactgattttcctggagagtggaaatagcactttatacatttcaacactttattttcaaggacgtgtactttttaaatgggaacattttatttttatttttattttttgagacggagttcactcttgttggccaggctggagtgcaatggcatgatctcagctcaccacaaccttcacctcccaggttcaagcgcttctcctgcctcggcctcccgagtagctgggattacaggcatgcaccaccacgcccggctaattttgtatttttagtagagacggggtttctctatgttggtcaggctggtctcgaactcccgacctcaggtgatccacccgcctcggcctcccaaagtgctgggattacaggcatgagccaccacgcccagccggaaacattctaaacatacgtaagtataacaggagattagaagtcatgttgattctgcgtggcttgattatggatcattgtcttcctctcatcgcagatcctcattttttcggttttctgtgatgcgcttgtccccatatggggctctggcgtctttctgggtctggaggtccccagcgccctctgccgaggcatctcttggtccggcggtcctcaggctggagggtggagcggagaagcctggtcgacgtggatggactcggtgggccggcgcggggcccgttaggcatctttaataagtttcaccgggagccgggtggccgggatggagacggctaagccgcgagaagtttaccttctaccacagcgtccacagtacccggcttggcctcaggcctcgggtcccgacgtcctccccagagcacaaacctactacaggttaggccggaggccgccacagcccagggtctctgccacctggcccgccccctccgaggcgccggagagcgattcccaaggggcctgccggagcgtggcgtcacaggagcgtcgcgtcacgtgaggctgccatccaatcgcggcgcgcgctctgccctgcgggcagcgggtgccaggcacggtgtcagcaggcaacatggccgagaggccggggcctccgggcggcgccgtgtccgcgaccgcgtaccctgacacccccgcggaattccctccgcacctccaggcgggtgcgatgcggcgccgcttttggggcgtattcaactgtctgtgcgccggcgcgttcggggccctggccgccgcctccgccaagctggccttcggcagcgaggtcgagcccggggcgctgttggtgctgctgctgcgggcgggcgggcggggcgccgctgggcggaggaggggcgctgcggggcccgcggggctcttggggtggggcgggggtgggcgcagggcgccgccgcaccctcgccggtctgtcccgccggggccccgggccgcgggcggcgctgcggtcagctggggtggcagagagtgtttcgcctctaatcacgccaaaccctcgtccagtgtaggtggtaagagacgtcggggactgaggcctcttcccttaccagggacctaaaaccttttctccggttgggctagttcgctctcggggaagaactacacctcctacatccaccctctacctctcattttaagtcccttgtgcctgagcatttctctccacgtgactcttaaggtgagaagcctcttgcccatccctttactccgtaattaacgggtgttgtgaccagatgaccagtctgccccactaccaggaaaattgggagtttgggatactgtaggcataagaggatactgacagagacgttctggatgttttcctgacgctgagaactcctaaacttgcatcctggcgtctgctaaggtgtatctctgcctctccctcccacgtcgtagaccagcctctgcttgctataggggtttcattgcgtctgcagcccaaggttagcctctgacctggacagtggtcactgattatttagggttaagcctatttagggctaatccagtagtagctgccatgcttcaggttagtatcccattgggtgtagttcatggggtaagtg

SEQ ID NO: 9906 - DNA, 6000 bp, Homo sapiens
ctaaaagacacaagtataatagtccccctttaactgcgtttttgctttccttggtttcagttaccctaggtatagcacaatgagacatttggagaaaaagaccacattcacataacttcttatttctgtgtattgttacaattgttctatcttattattgttgttaatcttttgctgtacctaatatacaaattaaactttatcacaggtgtgtatgtgtaggaaaaaaaagtcatatacatatataggatttggtactatctggggtttcaggcatccactggggtttgtagaacctactccctgaagatgaggagggaccactctacttgtattgccattatttccattttacaggtgagataactttgtgaatcgtttatccagtatcttccaggggccaaattgtctgggtttacacagctggaggagctgggatttcaacccataccatgtagccctagattttactcataatcactataacagagttgaatactatgattgattatctgccatatgtacaggaggagggaggaatggcatatcatgcatttgcaatttttcaattctggtctttgccccacctttcaatcatcattttttccccttctcctgttaaacccagttaaataacactactttctctttcccaatgctctatgctcttatgctttcatgtgggctgttccctaggcccagaacaccctttcttttgccctttgctggcatcttagtccattcgggctgctatagcaaagtgccataagctggatggtttataaacaacagaaatttattttcacaggtcaagaggctggagatcagggtaccagcatggacaagtgctggtgagggacttcttctggatgacagtctgctgacttcttattgtatcctcacatggcagagagcagaagcaagtctctggagactttaaaaagggcattaatcctattcatgagggctctaccgttacaacctcatctaatcctaattacctcccaaaggccccacctcccaacatcatccactggggatgggaggtttcaacatatgaattttggggagaaacagtccacaacacctggttaactcctacaactccggaattcagttcacgtataatttcttgcagaaagctttccctgatttcatcagtcagaattggtactccatctctacgcgatcttacagtgttatgcgcctcgcttgtaacataaaagtttttattttgaattgtggtagcttacctctcttaaaatgagctaaaagacaaggctcatgtagtgtgttgattgaaagaatgaaacctgaatccttacctcatctctgctccaaactgttgttttctgaagcttacctgcttcccacgtccagtttgtaattgttaagacacaggttttgaaccacaggtgatttccagctttcttagctttttcttatatcagtttggaatgtccaaacattttattcagtaagacttttgcccatttacacttgtattgcctattacatgcatgagataggtgttccttccataaaccattatctctccttggtgaataagcttgcaaattttgaaatctccatttaaaaaaaatcagcttgttgggaggggcacatgaggtcttcaactgtatgtataatgcttgatttcttaagttgggggaggtacagagaggtatatattatctacacatattttaagtctaaattgttttgtgaaaatataaaagcgaatattaatattcttaacattcgttatagagaatataaagaaaaccaagttttctacaaaaatgccttgtggttgggttaaatctgtacacagtcacagtaaagggataaaagtatcagttattaaaacacagatacatagacacaaaatgttatcctgccaggatttgtatgacagatggagactagaaccttgggtaatctatcggtcttcatgaatgaaatcaattaagtttagagaagctatttattgtcagagagataaaaaggtaattagcaattataaagcagtctatgggggttctaataataatacaacaatgggtggatttctgggacttggcaaaatggtggatggcttatatcttatctttttctttcttttcaaatatacctaaatctcttgctgggcaatttctggactaaggggtaggaaacctggtttgagctaactcatatcaagttactaatatatccatttcccaagacaggaaaaccaggttatatgtatgaggcaagtagactgaaaaacagaggatgaacgacagcctggattttttttttcaaattcacatcctcaagcaagagtctttgtttcttgttgcttctttctgtaataatgacacccacaaagagaaaaataaatgcttttttcctagttaaaaatttacattactcagttaagtagcagtgaaaactgtccttgttttactcaatagataaagcaagtttacaaggtgagaaaaatttctcccccatttgaatgctgtgaaatatatttttaaaagtgtcacagaaggagggaagctagtttgcaggctcacacattgggcttccatatttctggtgtcacaaataaagtcacttttgagtaggatggctggtgttggtagaatgttctgagggatctcactaatttagttaaaatctaagtaggtcatattccactacattgaatatcacaccataaaaaagttgtacaatagttttccaaggtgcaggcactaatcacttttaaaaagtaacagaatttggtaaaacgccagtaaagagaattgggaacccttggaatctttgaaatagactcacctaggtgatgggttgctaggtgcagcaaaccactatggcacacgtttacctttgtaacaaacctgcacatcctgcacatgtaccccggaacttaaaaaataaaaaataaatgctcaaatggaaatctgttttagttaagaagggcataaaacaagtaaagctattaccagagagtttatcagtttggcatggttaacaaaaggcaatacgttcttttagaaatatttagttaatcaattgaaattaaacctagttgtgaacctagcttttcaatttattccattgactagtctttggagtatttattacctatgaattatttttggcctttaaaaatcagttctcaaaaattatgtggaaactttcttctgttttcagagtgtgtatgtcattagtgatttgtgttgcagagtttagttttccctgttaaaaaatgcgtctatcgatctagcagcttatgcaggtgttctcaagcatggatggatatcaaattgccagtagaactttttaaacctatagctgcccaagccccacttctcatcccaatcagaatctccaggcacagggccccacaacctacttccataaatacttaccatccagctaggcttgagaaccactggtttaatgacagcaaacaaactttttttgaggctttcaaaacatttttcttgcttagacatttctttactcctgctgtagccagaaccattgctgtgacaggtttaacatgttcccagaaactctgaattttgtgcgatgccatctctgatagggacaatgtgatgaacaatgtctgagattgctaggtgggcttcacttctggggatgagaagccagagaagttcaggacacactgacaaaggtgaagttttctctaagcgacagtttgatcaccttgatagtgagagagaaatgctgaagcagggttataccacctggtttcaagagatgagagatgaaggttttggagaattcagcacttaagaatcttgaaccacggcggtacactactgggtaataagagcttggctacgctgaacgacaaaggttctagctggccagtccgaaaacactgagtccttaggtcaaatttgagaaatgacagggccagtgggagtcctaacttctagactctggaattactgacagaagaatatttggacagtttttaagaccctcaaggcatattattttacaacctctttagcttatgcctgaatttgtgctgtgactgttagcttcccggatgttttctccacatgcttctttctgaactagcctgtatagttctacaacaaattgttacgttttgagaagcagggaccacttataccacttctctggccaagtgtctggcaccgcgccactcagacacacacgcccaaccctttaggattaacgtagacacagtgttctcttccatggccattccgtctccacttctggttccacactccagtcaccaagttggcatgattgctgctccatagaccaagggtgggtaatgtggggattaaacacaccttccctcagctggtgcccaaactgtaagcatcaccgggacaccccatgtagccacaggaacgcttctcatcagtggaagaaggacaagaaaggtcgtgcaagtttcaaattacgtggagctggggctacagccattactttcggacaggtgcaattcaaagcgtgatcctccgaccaagagcttcgtcatcgccacctgggagcttattagaaatgcaggatctcaggtctccaccccagaccttctggatcagaatccgcattttaacaagagagtcaagtgattcttatttatattagaatttgagaagtcaattgatctggtaattgatcaactgagtgccacttagcccccgaaaacagagaccctttgtgcccgcctcgcacccgctctgctaggtagcaaccgaacccccagagacatcggagcgggcgctgccgagggcaatttggtgattggctggtctcaccacgtgaccggcgctgagccttccgtgcgaccggattggctgtcgcggacgctgacggacaaggccggggcgggccagagcctggtcggaggggcgcgcgcgggggcccgaggggcgaaggcgcgagtgcgcgagagcgcgtgcgcgagcggtggggctttctcctgagccgtcggagggagccggagcgcttctcccgaggtaagcggcgctccggggcgtccccccagtccttcccatgctgggtcccggcaagcgggttaggctgggctgggcggggctcggggaggtgtggggtcagcttgccccgggagcccagcttcagggaggatgcagccccggttgccttggtttcccttttcctatcctctcaggcaccttcccatcctccccactgcgtgacgggtctgcccgaggggagttgcccacctggcagccctgcctccgcctttgtttcccgcctggagggttgctggcatgaaccccctccccaggtggagggtgcgggtgatggggcgcgggcgtcaggagcgctggacctgggctggggccgaggaggaggtggctttaatgcagggggacctgtcacatggggaaacgaagaagaagaaatgtagtgtcactttggccagcccgagggactcgaactaatcctgcggccgcgagcggagccgaattcctagcgcagctgtgcgaagagccctcctgcctaggtgccggcggcctcgccggggacggagcctccgtgctgcccgggaggttgctctgccggctggacctggcggttttcaccccagagttgcagcgaaattgaacgctttgagcctgctggaggaatccagagattggttcaggggctatttttttttttaagcagttgggcaccggtggagccggtctaaatgaaagtctacaaaaaccaatttcagatgcagcgtaactgatgactggtaaatggtgaggagggaaatgcctgcagtgaactgcagaccaccacactgagattcttccttaagaagataggggtttttttcggaggaaaggttgtagtttctgcaaacaggtttttctgggggtacccaggaaggttattacttattttcagcatgttactgggttgtggggagagggaaggcagggtctaaactaaacctactcacacgtccttaattct

SEQ ID NO: 9907 - DNA, 6000 bp, Homo sapiens
ttctcttgactgcaaatggtgccatatacagtctgtgtttgtgtaagttttgataagttttttttttttttttttgagatggagttttgttgtttcacccaggctgcagtgcagtggtgcaatctcggcttactgcaacctccgcctttcagtttcaagagattctcctgccacagcctcccaagtagctgggattacagccaccatgcctggctaatttttatatttttagtagagacggagtttcaccatgttggccaggctggtctcgaattcctgaccttgtgatctgcccaccttggtctcccaaagtgctggattacaggtgtgagccactgcgcccggcccagttttgataaattttaacttttttttttttgagacagagtctcactctgtcacacaggctggagtgcagtggcgcaatctgggctcactgcaccctccacctcctgggttcaagtgattctcctgcctcagcctcctgagtagctgggattacagatgtgcaccatcaagcccggctaatttttgtatttttagtagagatagggtttcaccatgttggccaagctggtctcgagtgatccacccgcctcagcctcccaaagtgctgggattacaggtgtgagccactgcacctggcctgataaattttaatgttttataatagatttgtgtatattttacgacagtaaatgatagaatggacaagtatctacatatattttatgcattcatgatgtacctaactttttcttaattttttttctatatttctaggctatatggtttgtaaattttttcaaatggtcacaaatctccaaaaacttttctaatatatttactgaaaaaaaaagggccacatataagtggatctgtctacttcaaactgatgttgttcaagagtcaactgtactgagctttgtatctgattgtgagagtgaagtcgatgatgttgataagaggaaataagtatctccagaatggtaatgaggaactctggtaacttattcagggctttgaggattctagttctttgctgggatcagaaaaggggccacttaaataaaaattatgagtatatgaaaactcagactaaaatacattctaagaatattttctggtatctctttgtataggaacagcaagacatttcactttattttttgttttgttttttatttatttgatttttttttttgagacagagacttgctgcaatgcccaggttggaatgcaatggtgtgatctcagctcactgcaacctctgcttcctgggttcaagtgactctcctgcctcagcctcccgaatagctgggattacaggcatgcaccaccatgcccggctaatttttgtatttttactacagacgtggtttcaccatattggctaggctggtctcgaactcctgacctcaagtgatctgcccaccttggtctcccaaagtgctgggattacagacgtgaaccactgtgccggctgacatttcaccttattttttaagttaaagaaacagttcagctgcctcgctgtcattttcaaaagaaacactagtttggtatccacaaaaaatactggaaagcaatatacatcttaaccaaagttgttttgagatgtacctgtagtggatattttcttttttcacctgcccatcactatatggtttgttctggtaaaaagaatcttgattttcttttggaggatgaactctcccctattctctgtctctagattttttttttttttttttagatggagttttgcttttgttgcccaggctggagtgcaatggcatgatctgggctcactgcaacctccgcctcctgggttcaagcgattctcatgcctctgcctcctgagtagctgggattacaggtatgtggcaccacatctggctaaattttttttttttttgagacggagtctcgctctgtcatccaggctggagtgcagtggtgtgatctcggctcactgcaagctccaccttctgggttcacgccggtctcctgcctcagcctcctgagtagctgggactacaggcgcccgccaccatgcctggctaatttttttggattttttagtagagatggggtttcaccatgttagccaggatggtctcgatctcttgacctcatgatccgcccgccttggcctcccaaagtgctaggattacaggcgtgaggcactgcacccagccataattttgtatttttaatagagacgggtttctccatgttggtcaggctggtctcgaactcctgacctcaggtgatccgcctgccttggcctcccaaagtgctaggattacaggcatgagctactgcgcctggccctgtctctagattaaggtatatgagtttgctaatgaaacataagctcaatattttattggaactactgggaaataagtgctctgcttcttttggaatggttagctataaagatgatataagttgaacactggggaaaggtggggaggtggcaagaaatcactatgtgaaaacaaactctttgatgtcaacaaagaggaaaggagagatcatgtcctgatgtcaatgtttgcattcgtgaatctagtcatatctgaagttacctatctatggatttttcagttattaagccaaatatactccttttcttaaatcagtctgagtttaagtttttgacacttgtaaggaaaagccctatgtatcatagcacaaaataattccatttattaaacatcacaaaatgtctaaaaatcctctttcatatctttctataccttggtgtcactcagaatgtcagctgtgctaaatccctagtctcactctctcaaaactcccagaaaccatctctcctagtcagctcattccaggtctttttttcttactcccttactcaaactttgctggtcgccttccttatccccaccccatcccaccttctccaaaacaaaaaatctgagccttgcagatcagccgagccttctgaggctccttttgcttctttacctctattccttattgagatcagcacaattaatgcatgtctgaacaacaaatgatcctttctctttggaagggtgaaagtttggaaatatttacatgttaaatgttctgttctggtctcatttgtattcagtacaaatagtgtgtttgcttggacattaattttatttgcaaatagctacagctgggggtccctttgggtaagtcttgctaagatactgcattggtgggttttttgtttattttgtttttgttttgtttttcaaggggatggggaaggaatcaaagtagtcaaatcagtttggttgtttttacaagcccgagaaatggtcaaattttggattcagaccaagcacaccatagtgtgctagaggcaatttaatgacttcctaccctcttgcctttttccccctctttgggaacattcttggattttctacagaaacagccagaggctctcaattgacaattgcctcactcagcagtttcttgttaagcacacttgtcagacactgtttccaggactctcttaagtgtcctaagaatattgactcattcaaaagcagcccagctgtagttgggagagcaccagcacttgctctataaagatctagattgtctctctacctcaagaggaatccaaaatcctgttatgctggactctgaaatgatccccagccctttggtgatcacactgtttatgagcagtctgaattccattcttgggtctacctaaactagcaccctcgggctatggggcccagtggggagaccacctagcatgctggctgcctggagcccagggaactgtcaagatggctctggaagacttctcgccttttaaaagccccgtatttcttttacatatatttttgtcctcatgaattttgccaaccgcaatggactaaaatctattatagcgtcctggaaaggtggggaaaagatgggatagttgaggagagtttaatgaagggactatttaaaaaggtgtggatggggttaaaggaaacctctgggcgtcattacccactccaggcctgaaggggcaagggtagttagtggtaaccagaacctggagaaaactgcaggagagggccacaggatgggagtaatggctttcagatgaagaacatagccactgctaacagggtggcccgctggggatgcaggggaggtcctgaatcacatcctgccttctgatctgcaggtgcctcccacttgccaaaaccaattgaaagccagattatagttgacgtagcccataaaggtcagtcctgagtcacagagcagagtggagagtgggtctgaagggacagaggaaaaaccagcaagcacctcctgttttttcccacagccagcaccttggttcagcccttaccctttcttgcctgtcccctggacccatcaaatccactgcttttaatgaccagtctgtttccaagaggctatattcattccacttgggactggggcatatgcacttgggtagaagaaccagctgtgcagtgtcaagacccttccctcagagaccttatcagtaaaatggcgggtggactcggggatgcccgaagacttttccggaccacgattttccgatgctggacacatatttaaacatgaaggaatagacttgcgacttttaagcgcaaacaatgggtggaaatggacagaaactgcctccgtgcccacttgcagcggactacgtagccctggcagacaggcaattgcttcaaacaagcgccctccaagggcgtaagctagaggggcccgggcgggcgctttcccgtggaccctcccacctcgcgggtagaggaagtccttcagttcaggcacaaccctgagcgtcccccgcagtctccaactccggcgccagtcaggttgtggggtgggggcggcggagggcggagagcgcaggcgcagagtccgcgcggcggcgcccctctccctccgcagtactccgggcagcgcccgcctcgattttcccaggcgagggcacgcccgcgtcagtcgcctccggggcaccttcctcgccacgacacgcaggtaaccgggccccgggagccggtcggcggcggcggactgggaccttgatcctgcctgcccggccgcccgacaagggaatgagagcggaccccgaactccacacacccgcgtttagccgccacacctaaggggcacaacagtctttttgggtaagggccgggctgggggcgacgcgccccgcccgctttgcagacttcggggtgctctgcacgacgcctgaaaggccgcggggcccgcatttctctgtgctgccctcctggagaaccgggacacggggacgggagggccagcatcggctacggcccggtttcccgtttctttccgctgtcgcgtgtctgggccctcctgcagcgtccatgatgaaggccaggggctgttgctttcctctcgcccagtagccaacccaagcaaggggtgagtcactgtggcgtcatatgggatcaatttcaaatacaagttttaaaaaaggctggatgattttagaaatatggccaagaatttgtattttccattactctcttgtctcatgtccatgactcttgaacgccagtctgtgggcgctgagattttcgtggtacatcgacggtttgtagacatcttttcccaagggaagacgagggcaagggttagtggaggaagggcctcgtcacggccgagagtggcggagaaggctcagggcaagtccgcacagcctccagcagccacggggaggaaaaggcgaatctttcctcacagtgctctgggcgctgtagaatttctacgccacgtgcacccatttggcctcatttgagaggaggagagggaagaagggtcgcgcgggccggcaggaaagagactcgtgttgcggcggatgaaggctcagcgcggacctgcatctcgggccaggttttctttcacccggctccgcgaggagcgaggcggaaagctcgggtccgagtgttgatcgaggacctggagatagta

SEQ ID NO: 9908 - DNA, 6000 bp, Homo sapiens
gagagagaatgaagtattatgaagattcaaaaattaaaatcttatgattctggtacagagataaaccaacagattaataagacagaatagaaagttcataaatagggaaggaaatttagtatatgataatggtggcatttaaaatcagtaggggaaatacggattattaatgaaatggggttggaaaaatgtgtagctatcaagatataaagttggatccactccatttacctcaaatcaaaataaattcctgattggtcaaattttaaaagtaaagaacatggctgggcatggtggctcatgcctgtaatcccagcactttgggaggccaaggtgggcagatcacttgaggtcaggagttcaaaagcagcctggccaacatggtgaaacacagtctctactaaaaaaatacaaaaattagccgggtgtggtggcacatgcctgtaatcccagctactcgggaggctgaggcatgcatgagaattgcttgaacctgggaggcagaggttgcagtgagccaggagtacaccactgtactccagcctgggcgatacagcgagactcagtctcaaaaaaaaaaaaaaaaagtgaagaacataacatcatgagatgtaaacaagaaaccatggaagaatttaaaaagtaattgggccaggcatggtggctcatgcctgtaatcccagccctttgagaggccgaggtgggtgggtcacttgaggtcaagagttcgagaccagcctgaccaacatggtgaaaccctgtctctaataaagatacaaaaattagttgggtgtggtggcttatgcctgtagtcccagcttcttgggaggctgaggcaggagaagcatttgaacccgtgaggcggaagttgcagtgagcctagatcatgccactgcactctagcctggggaacagagctagacccgttaaaaaaaaaaaaaagtaattgaagagagagagaggtggaggtctttctaagtacgatgcaacccagaagtagtacgtagtaaaagaaaagcctggtaaaattgaccagttagaaatagaagttttcacggccaataaacaaaaacaaaaacaaagtagcataagataaatcaaaggacgtgacaaactgaggaaaagttttgacattcatatctaagaaaaaggactgttctattatataaagagtttctatacatagtagaaaattagacaatacaaataaatagataattcacagaaaatgaaagacaaatgtctctttaacctgagaagatgctctcgaactcactcttcataagaaaaatacgacttaaaatgttttttcatctactagattgatgagttccatttctgaccaaaatagagtaagtccactgctgcccatgtctgctactgattgatcactactaaaacctctagataaaatgtaaagaacaactacccaaggactctgaaaagtaaataatagcaggtggatcatgatggcagggaactcaaagcctgaagaaagacagatagagtagtagtgagagtcttgtttttatttttttctcctttacctcttggctttgatctgaggacagatgaatagggaattgtcaaccagacactatcagcaaaatgtccgagagaagccggaccatgtagccacaggaccaggaaaaaagtctgctgcaagctagagaaagtggtggaaactgctgattcctttttttctctccctccgtttccctgaagccattccctgtctgggagctgccctgcagtggtatggtgacacagtcacctgagagaaaacctgtccttctggacagaggagttgggaaaagggactcttggaagccagagagaacatggaggaaatacccaaagagagacaagtggagaaaggaatccctaattctgtgtaattgtttgacatgcagtcataggtaattgatacagtagttctccttagccacagtttctctttccatggtttcaattaccttcagtcaactgaggtcagaaaacattgcatggaaaattccagaaataaacattgcataagttttaaattgtgtgccattctgagtatcgtgatgaaatctccgcctgtcctactccatccctcctgcgatgtgaatcatctctttgtctggtgtgtccatactgtaggtccttgtattagtccattctcatattgctataaagaaataactgagactgggtaatttataaagcaaagaggtttaattggctctggtttttcaggctgtacaggaagcatgatgctggcatctgcttggcttctgggaaggcctcaggaaacttaaaatcatggcagacagcaaagggggagcaggcatatcacatggcgagagcaggagcaacagagagagagcaagatgccacacacttttaaacagccagatcttgtgaaaagtctctcactatttcgaggacagcaccaaggggatggtgctaaaccattcatgagaaatctacccccatgatccaatcaccttgcaccaggccccacccccaatactggagattacaattcagcatgagatttaagtgaggacacagatccaaactatatcaatgctacataccttttggtcacttagcagccatctaggctatcaggtcgaaaaaacataatatatacagggttcagtactatctgtggtttcaggcatccagtgggggtattgaaatgtggctaagggggactactatatagggatctatgtcattaactcaggtttgccatttatgctgtccaacaatttgctatacttaacagaaagttttaatttgttaattgtggagatgaaataagattatacaagagaaaatgacttttatatttccattcatttttcttcctaattcctccagccacataaatataagaaaatgaaattatatggaggatggccgtgcgttctaggatgagaagataagaagagtacaatttaaaaacaaaagtctaaggagtaattcatgtctaaacttattgaagttcataaataatttgtcctgattttcagaagaaagagagaacttctgaacataaccacacaggacctacaaaaagatagctgcacaaaaactggttaataatgttgtgagctgccatgatagcatcggaggactagaaagaatgacaaactgctcctaccaagtaacgagtcttctgctcctttcttttagtttccctgcctcctgcctggaacctggaagacccagagaagggtggggagtaaagaacagaccagccttctccgcactgcagtttgttgaggcattgatctggccaaagctggatgtatggaggcagaaagtgttcattcattttttaaatttttcatttcagaattattgcttgtctgctatggacctaacactgttctaaacattggggctggtaatcctccattatctgtgggagatacattccaagatccacagtggatgcttgaaactgaggatagtataaaactctatgtatactatgttttttcctacacatacatacatactatgataaagtttcatttataaattaggtacagtaagggattaacaacaatgaataataataaaatagaacaattataaaaatagactgtaataaaaggtgaatatggtctctctctctctctccaaatatcttattgttctggcctcacctattttcagactgtggtagaccctgggtaactaaaaacacttaaagccggcagggcgcggtggctcacgcctgtaatcccagcactttgggaaaccgaggcaggcggatcacctgaggtcaggagttctagaccagcctggccaacatagtgaaaccctgtctctacaaaaaatacaaaaattagctgggcatgatggtgcgcgcctgtaatcccagctactcaggaggctgaggcaggagaatcgcttgaacccgggaggcggaggttgcagtgagccgagactgcgccactgcactccagcctgggtgacattgcgaggctctatctcaaaacaacaacaacaaaaagtcaaaaagtgtggtggacagaagaaataggagagcaggtaaggaaatggtggggtgaggagcagatgagaacaggtattaagtaggatggtcagaaagggcctcagggagaaagtgagagcccagcaaacactgagggaggtgaggaagtgagccaagcagccaaccgagggaagagctttctgggcagaaggaatggctggggcagactctgagcctggaggtggaaaggtgtctggcgatttctaggaggagcaagggttttgggatttggctgtggttggatgttaggttttaattataaaaggatctgcgtttttcacaacttgaaagtgagctacagttaaaatgagacttgttcttatacctgaaagtgaccagaaaattaggttctggtctttaagagatggaagagggaaatgtgaaggggcgtattcctttcccctgccccgaccgctcgcggttggagagcccagccacatgccgccccggctcggagtgacagcccaaccaggcctctgccttctcggccgcgcctctcccgctgccgtccggatttcgatgggtggtacagtacgttaggcacgcccctccctttctcccggcctggtctcctgttccaggcgacagcccaatgagggctgcctttttttcttcggaccggttccagtctaggttctcgtccactacgatcgcccagtgaggccccgcccctcccaccgcagttccgcccctcccggagctaccgcccagtgaggccccgcctctcccgccgcggccccgcccccctgcgtgtgaccgcatctaggccccgccgcgtccgccacgcccagcgctcggcggcgcccgccccactggcctggcccgccccccgcaccgagcactctttcgcccggcctccggttctcgccggctctcggacccgcctccgaagacgtggagcgctgcggcggctggtgagtcggggagggcacctcggaccccccagctgtccgcagcagagcccggccccttgcagccacagagccccggccgctgcaggctccaggagctccgcctggtcgccgccctgcgttcccgggccgcctcccggtgccagcacccctggggatgggaagtgggaccaggatgggcgcgggggctgtgggggcagggacgagtgaaggtgttgcggggagcggcggtcgcaggggaggggagaggtttgtggaggggattatgggtctggggcgagggtttgagtcctgagagaaaggcggtgaggcggaaatttggggctggtgaagtcaggatggaggatgttgggggcctcagcgctttggggaaggaggcagtgagtggggtggtcggcggagcggagtgaagggtggtttttagaagggtcagctcgcgggtcccggggttcttgcttcccgggcagtccggggatcagggcggactaggctgtctccaagcaggtttggccggagcgggcttgcaggataatgctcacatcgaggtgactgagtttccaggcttttgactgggacatactgtacagtttaaataatagatacctgtctggctagtgcctgggacacctgagaaacgtggatggaatggggttctcccctataggcagcgtctgattttgtgggtgccttcacagcaccagcattggtgtgcgctgccttctgtaaaaccttatattccagcaggacggtgtatggagatcccagacttaaaaagtgcagctgaggtttattcagactcaagacacagttgtatcatattgccttaaatcctgcggagtttaaatctaatcctgtggggtttaaagcggttaaatccactttgtagtgtctacttttaatttaaagtcatacaaatctagaggactagatgttttctaagggcccattctgcatgataaacagtttaaaattcgctatggaaagtaaatcatctgttctgaacagctgttgctgaaagaatcgtagagt

SEQ ID NO: 9909 - DNA, 6000 bp, Homo sapiens
ctgataaagggcatccatgaaaaacccacagctaacatatatttaatggtgaaagactgaaagctttgccctaagatcagaaataaaagatgtctgctctcaccatttctagccactgcactcaagcaagaaaaggaaatcaaaggcatctagattagaaaggaagaagaaaactgtctattcatggatgacataatcatctatacagaaaatccaagggaaatcttcaaaaagctactagaatgaataagcaagtttagcaaagttgcaggataagatcaacatacagaaatcaattgtattttggccgggcgcaatggctcatgcctgtaatctcagcactttgggaggccaagccaggtggatcacaaggtgaggagatcgagaccatcctggccaacatggtgaaaccccatctctattaaaaatacaaaaattagctgggcatggtggcacacgcctgtagtcccagctactcgggaggctgaggcaggagaatcacttgaacccagcaggcggaggttgcagtgagccaagattgcaccactgcactccagcctggcgacagagtgagactccgtctaaaaaaaaaaaaaaaaaggacaaaatatttgaatagacacacttcaccaaaggcatatggatggcaaataagcacatgaaaaaatgaaaaatgctcaacatcattcattactacagaaatgcaaactaaaagtgcaatgtggtcaggcacggtggctcacgcctgtaatccccgcactttgggaggccgaggtgagtggatcacttgagatcaggcattcgagaccagcctggccaacatggtgaaatcctctctctactaaaaatacaaaaattggccaggcacaacggctcatgcctgtaatcccagcactttgggagaccgaggcaggcggattgcctgagctcaggagttcaagaccagcctgggcaacccggtgaaaccccatctctactaaaatacaaaaaattagccgggcataggatgtgcctgtagtcccagctactcgggaggctgaggcatgagaattggttgaacccaggaggcagtggaggttgcagtgagccgagatcgtgccactgcactccagtctgggccacagagtgagactctgtctccaaaaaacaaaaacaaaaaacaaaaaaataaaaacacagaaattagttggatgtgtggtggacgtctgtaatcccagctactcaggaggctggggtaggagaattgctggaacctgggaggtggaggttgcagtgagctgagatcacagactatactccagcctgggcgatagggcaagactctgtcttaaaaaaaaaaagaagaaagaaaaagaaaagaaaagaaaaagcagtgtaatatcagggtggctaaaattaaaaagattgaccataccacctattgccaaggaactggagcccttatacattgctggtgggaatgtaaaatggtacaaccactttggaaaataatcacccaggctggagtgcaatggcgagatctcggctcactgcaacctctgcctcccgggttcaaatgattctcctgcctcagcctcccgagtagctgggattacagacatgtgccactaagcccagctaattcttgtatttttagtagagccagggtttcaccatgttggccaggctggtctcaaactcctgacctcaagtgatctgcccacctcagcttcccaaagtgccaggattacaggcatgagccaccgtgcccggcccaatgcctggcagtcttttaggcactgaggaaataacagcaaagaagacaggcaaaaatccctgtcctcttgccttctggtactaaagttcaaataaggaaagtaagaaacgtaaaattagttcagactgtgaaaacctgtcctgctattttctcatcacagataatagatgtgcaggctggagtgcaatggcgcgatctcagctcactgcaacctccatctcccaggttcaaggtctcccacgtagctgggattaaacatgctgcagctgtagtctcataaataacccctttctttgagagactaccgctttttttctttttcttttcttccttttcttttcttttttttttttaagacagagtcttgctctgtcgcacagtctggagtgtagtggtgtgatctcggctcattgcagcctccacctcctggcttcaagtaattatcttgcctcagcctcccatgtaacatgagccacctcactcggtggcgactactgctttcttagcaagaaactttgttctctaaaattaaaactttgctgcttgacatcatgtctattccctccaggcaatgaccaccaggaatatacttattactgaaaacactaagtttattactcattgctatgagggagaatgtacaccatgggggaaccatggggtgtctcattaagagagtgttagaaaataattataggatttgggcttgttaagtgatttaggggagggtttaaggaagtacagctttgcttggagatggaggctgtcagaagattggggtaattctatgattaggtaccctgatatatcttatttacagggaggcatctttgcaaagccagtatgtgataaacaactggtatcaggccaaaaaaaaaaaaaaaagaacttgtatcaggctaaagagattggtaaagaagtggtactcttatttgctgggaaatgagatgtttggttgtggcttggacaatgtacatgttttgtgttcaacatgattatggagtgttctagttttgtcttgatccgtcacaatcagtctgatgttggtgttttatgaaattgtttatgctcaacaggaacaccaagacctagctgtgagtgtcaggccaatttttttttctctttctcacatttcaataagcatgaaacatctcattcttggctgaaggatctacatccctttgacacagagaagcagccttgatttccatcccaggtgcagagcttcagctaacgattacattccacatcgatcttaaccttgtagtttccacagaaatgaccctgggtcccctttgcagtccacgccagattaggactccacacacagctgtgctgtgctttgagcatatcaaacaccggttcacttaaatttcacctgaattcgactctttcccaaatcatataacaattattttagtgactgtcaataaacttgactttggtggaattacaggtttgtccactgatctgaggctgattgggctagaacaaaactatatacggtataatagatataaatgttatggaaaaaaataaaagcaaggaaaaagaagtgttgggaaagggacagtttgtgatttaagtaaggtgctcagggaaggcctcacgaataaagtgacatcggagcagagacctgaaggaagtggggaattttaaaatcagcttaatatctgggaaaaggggcattccaggaagagggaagagttagtataaaggctctgaggacaggcatacagggcgtgttgcaaccacactgttttttaacgaagtctcacactgctgcccaggctagagagcaatggcgtgatctcggcttactgcaacctctgcctcccaggttcaagcgattctactggctcagcctcccgagtggctgggatgacaggcgccccccaccacgccaggctaattttttgtatttttaatagagaagggggtttcactatattggccaggctagtctcgaactcctgacctcgtgatccctccgtctaggcctcccaaagtgctggcattacaggtgtgagccaccgcgcccagccgcaaccacactttcttagtgagacccaccctgacaacctctttaattctggaacctacccctgcccccattggtactctctaatcccactttgcttttctccacacaacttttcaagatataattccgtgtcggccgggcgtggtggctcatgcctgtaatcccagcactttgggaggccgaggccggcggatcacgaggtcgggagatcaagaccatcctggctaacacggtgaaaccccgtctctactaaaaatacaaaaaattagccgggcgtggtggcgggcgcctgtagtcccagctacactcgggaggctgaggcaggagaatggcgtgaacccaggaggcggagactgtagtgagccgagatcgcgccactgcactccagcctgggcgacagggcaagactccgtctcaattaaataataataataataataataataataataataataataaattccctgtcctttgtttttgttcatcgatgtagcccaagctcccaggagtgtggggcatacagaaggcgcttgacagccacgtgtggagaaaaggagcccggggctgggcagagagcgaggccaagggaagaagaatactcggtcgcgtggagccttgggggcccactgggagggctcgggcgccacgcagatctgcgcggaatgagccgccagaggccgctggcagtcgcacagagaagcccatcgtttcctaccacctgggactcgacggacgtctacgcgcgtgcgcagcggtcccatcgaggcacccgcctcattggctgtggctggctcgcaaaagtggcattgcgcatgcgcgcttccttgcgcgagccgggctgtcgggtgtgttttgctctccagcctccgtcgtctctgcagcactccgggttctcctccagagcgctagtcccaggagctcggaatgttcgtggaacttaataacctgcttaacaccacccccgacagggcggagcaggtaagaggtcccgctggccggaagggggcgggacctggcagggcagcggaatactgcatccgggaggcggtgcgcacgaccccggggaatggcgcgacgacccggcacggggtacctgggagttgtagtccgcagaggatcgacccggggattggactggaggcttgggcccgccgaaagtgggcttctgggccatctcgcatattctcaacggctgtgcgtgtccttaaaagtccctgggaagcggccgggcgcggtggctcacccctgtaatcccagcagtttgggaggccgaggcgggtgcatcatctaaggtcaagagttcgagacaagtctggccaagatggtgaaacccccgtctctacgaaaaatacaaaaattagccgggcgtggtggctcatgcctgtaatctcagctactcgggaggctgagacaggagaattgcttgaacccgggaggcggaggttgcagtgacccgagatctcgccaccgcactccagcctgggcgacagagcgggactccacctcaaaaaaaaaaaaaaaaagtacctgggaagcatggccgacagtggggttgggttatattcgcggacgtgaactgtggcgcgctgtgcatgttcactggggtggggggtcccaggcgctcagaggagactgcagaataggcccgagaggagaggggagttcgtttcgccgccgtcttcatgggcgagcttcctaaccgccacctcgccccggagcaattggcacattgtattgaacgctgctgttcttcttactcttcctccttgtgatctctaatagaactgttagaagcaggacagagccaaattggcttggaccaagtccgtcttgggcaccccaggctggcctgttctctccaccctcctcacactccggggtaccttgaaacctttcacattttaacgtaggagtaacctctttcaggagtgtatcttttggcttatttatttatttatttatttttgatggagtctcgctccctcgcctgggctggagtgcactggcgcgatctcggctccctgcaacctcacctcccgggttcaagtgattctccttattcagcctcccaagtagctgggattgcaggcgtgcgctaccacaccgggctaattacttggctgatttttttttgtattttttgttagagacggggtttcaccatgttggccaggctggtctggaactcctgacctca
